United States Patent Application Publication US 2024/0309370 A1 - sequence listing, part 2

SEQ ID NO: 2319 - RNA, 21 nt, synthetic construct
  source 1..21: mol_type = other RNA
  modified_base 1: mod_base = OTHER; note = 2'-O-methyluridine-3'-phosphorothioate
  modified_base 2: mod_base = OTHER; note = 2'-O-methyluridine-3'-phosphorothioate
  modified_base 3: mod_base = OTHER; note = 2'-O-methylguanosine-3'-phosphate
  modified_base 4: mod_base = OTHER; note = 2'-O-methyluridine-3'-phosphate
  modified_base 5: mod_base = OTHER; note = 2'-O-methyluridine-3'-phosphate
  modified_base 6: mod_base = OTHER; note = 2'-O-methyluridine-3'-phosphate
  modified_base 7: mod_base = OTHER; note = 2'-fluoroadenosine-3'-phosphate
  modified_base 8: mod_base = OTHER; note = 2'-O-methyladenosine-3'-phosphate
  modified_base 9: mod_base = OTHER; note = 2'-fluorocytidine-3'-phosphate
  modified_base 10: mod_base = OTHER; note = 2'-fluorouridine-3'-phosphate
  modified_base 11: mod_base = OTHER; note = 2'-fluoroadenosine-3'-phosphate
  modified_base 12: mod_base = OTHER; note = 2'-O-methyluridine-3'-phosphate
  modified_base 13: mod_base = OTHER; note = 2'-O-methylguanosine-3'-phosphate
  modified_base 14: mod_base = OTHER; note = 2'-O-methyladenosine-3'-phosphate
  modified_base 15: mod_base = OTHER; note = 2'-O-methylcytidine-3'-phosphate
  modified_base 16: mod_base = OTHER; note = 2'-O-methyluridine-3'-phosphate
  modified_base 17: mod_base = OTHER; note = 2'-O-methylcytidine-3'-phosphate
  modified_base 18: mod_base = OTHER; note = 2'-O-methylcytidine-3'-phosphate
  modified_base 19: mod_base = OTHER; note = 2'-O-methyluridine-3'-phosphorothioate
  modified_base 20: mod_base = OTHER; note = 2'-O-methyladenosine-3'-phosphorothioate
  modified_base 21: mod_base = OTHER; note = 2'-O-methyladenosine-3'-phosphate
ttgtttaactatgactcctaa

SEQ ID NO: 2320 - RNA, 21 nt, synthetic construct
  source 1..21: mol_type = other RNA
  modified_base 1: mod_base = OTHER; note = 2'-O-methylcytidine-3'-phosphorothioate
  modified_base 2: mod_base = OTHER; note = 2'-O-methyluridine-3'-phosphorothioate
  modified_base 3: mod_base = OTHER; note = 2'-O-methylguanosine-3'-phosphate
  modified_base 4: mod_base = OTHER; note = 2'-O-methyluridine-3'-phosphate
  modified_base 5: mod_base = OTHER; note = 2'-O-methyluridine-3'-phosphate
  modified_base 6: mod_base = OTHER; note = 2'-O-methyluridine-3'-phosphate
  modified_base 7: mod_base = OTHER; note = 2'-fluoroguanosine-3'-phosphate
  modified_base 8: mod_base = OTHER; note = 2'-O-methyladenosine-3'-phosphate
  modified_base 9: mod_base = OTHER; note = 2'-fluorocytidine-3'-phosphate
  modified_base 10: mod_base = OTHER; note = 2'-fluoroadenosine-3'-phosphate
  modified_base 11: mod_base = OTHER; note = 2'-fluoroadenosine-3'-phosphate
  modified_base 12: mod_base = OTHER; note = 2'-O-methyluridine-3'-phosphate
  modified_base 13: mod_base = OTHER; note = 2'-O-methylguanosine-3'-phosphate
  modified_base 14: mod_base = OTHER; note = 2'-O-methylcytidine-3'-phosphate
  modified_base 15: mod_base = OTHER; note = 2'-O-methyluridine-3'-phosphate
  modified_base 16: mod_base = OTHER; note = 2'-O-methyluridine-3'-phosphate
  modified_base 17: mod_base = OTHER; note = 2'-O-methyluridine-3'-phosphate
  modified_base 18: mod_base = OTHER; note = 2'-O-methylguanosine-3'-phosphate
  modified_base 19: mod_base = OTHER; note = 2'-O-methyluridine-3'-phosphorothioate
  modified_base 20: mod_base = OTHER; note = 2'-O-methyluridine-3'-phosphorothioate
  modified_base 21: mod_base = OTHER; note = 2'-O-methyladenosine-3'-phosphate
ctgtttgacaatgctttgtta

SEQ ID NO: 2321 - RNA, 21 nt, synthetic construct
  source 1..21: mol_type = other RNA
  modified_base 1: mod_base = OTHER; note = 2'-O-methyluridine-3'-phosphorothioate
  modified_base 2: mod_base = OTHER; note = 2'-O-methylguanosine-3'-phosphorothioate
  modified_base 3: mod_base = OTHER; note = 2'-O-methyluridine-3'-phosphate
  modified_base 4: mod_base = OTHER; note = 2'-O-methylcytidine-3'-phosphate
  modified_base 5: mod_base = OTHER; note = 2'-O-methylcytidine-3'-phosphate
  modified_base 6: mod_base = OTHER; note = 2'-O-methyluridine-3'-phosphate
  modified_base 7: mod_base = OTHER; note = 2'-fluoroadenosine-3'-phosphate
  modified_base 8: mod_base = OTHER; note = 2'-O-methyladenosine-3'-phosphate
  modified_base 9: mod_base = OTHER; note = 2'-fluoroadenosine-3'-phosphate
  modified_base 10: mod_base = OTHER; note = 2'-fluoroadenosine-3'-phosphate
  modified_base 11: mod_base = OTHER; note = 2'-fluoroguanosine-3'-phosphate
  modified_base 12: mod_base = OTHER; note = 2'-O-methyladenosine-3'-phosphate
  modified_base 13: mod_base = OTHER; note = 2'-O-methyladenosine-3'-phosphate
  modified_base 14: mod_base = OTHER; note = 2'-O-methyladenosine-3'-phosphate
  modified_base 15: mod_base = OTHER; note = 2'-O-methyluridine-3'-phosphate
  modified_base 16: mod_base = OTHER; note = 2'-O-methyluridine-3'-phosphate
  modified_base 17: mod_base = OTHER; note = 2'-O-methyluridine-3'-phosphate
  modified_base 18: mod_base = OTHER; note = 2'-O-methyluridine-3'-phosphate
  modified_base 19: mod_base = OTHER; note = 2'-O-methyluridine-3'-phosphorothioate
  modified_base 20: mod_base = OTHER; note = 2'-O-methylcytidine-3'-phosphorothioate
  modified_base 21: mod_base = OTHER; note = 2'-O-methyladenosine-3'-phosphate
tgtcctaaaagaaatttttca

SEQ ID NO: 2322 - RNA, 21 nt, synthetic construct
  source 1..21: mol_type = other RNA
  modified_base 1: mod_base = OTHER; note = 2'-O-methyladenosine-3'-phosphorothioate
  modified_base 2: mod_base = OTHER; note = 2'-O-methylcytidine-3'-phosphorothioate
  modified_base 3: mod_base = OTHER; note = 2'-O-methyladenosine-3'-phosphate
  modified_base 4: mod_base = OTHER; note = 2'-O-methylguanosine-3'-phosphate
  modified_base 5: mod_base = OTHER; note = 2'-O-methyladenosine-3'-phosphate
  modified_base 6: mod_base = OTHER; note = 2'-O-methyluridine-3'-phosphate
  modified_base 7: mod_base = OTHER; note = 2'-fluorouridine-3'-phosphate
  modified_base 8: mod_base = OTHER; note = 2'-O-methylguanosine-3'-phosphate
  modified_base 9: mod_base = OTHER; note = 2'-fluoroadenosine-3'-phosphate
  modified_base 10: mod_base = OTHER; note = 2'-fluoroadenosine-3'-phosphate
  modified_base 11: mod_base = OTHER; note = 2'-fluorocytidine-3'-phosphate
  modified_base 12: mod_base = OTHER; note = 2'-O-methyladenosine-3'-phosphate
  modified_base 13: mod_base = OTHER; note = 2'-O-methyladenosine-3'-phosphate
  modified_base 14: mod_base = OTHER; note = 2'-O-methyladenosine-3'-phosphate
  modified_base 15: mod_base = OTHER; note = 2'-O-methylguanosine-3'-phosphate
  modified_base 16: mod_base = OTHER; note = 2'-O-methyladenosine-3'-phosphate
  modified_base 17: mod_base = OTHER; note = 2'-O-methyladenosine-3'-phosphate
  modified_base 18: mod_base = OTHER; note = 2'-O-methylcytidine-3'-phosphate
  modified_base 19: mod_base = OTHER; note = 2'-O-methyluridine-3'-phosphorothioate
  modified_base 20: mod_base = OTHER; note = 2'-O-methyluridine-3'-phosphorothioate
  modified_base 21: mod_base = OTHER; note = 2'-O-methyladenosine-3'-phosphate
acagattgaacaaagaactta

SEQ ID NO: 2323 - RNA, 21 nt, synthetic construct
  source 1..21: mol_type = other RNA
  modified_base 1: mod_base = OTHER; note = 2'-O-methylguanosine-3'-phosphorothioate
  modified_base 2: mod_base = OTHER; note = 2'-O-methyluridine-3'-phosphorothioate
  modified_base 3: mod_base = OTHER; note = 2'-O-methyluridine-3'-phosphate
  modified_base 4: mod_base = OTHER; note = 2'-O-methyluridine-3'-phosphate
  modified_base 5: mod_base = OTHER; note = 2'-O-methyladenosine-3'-phosphate
  modified_base 6: mod_base = OTHER; note = 2'-O-methyladenosine-3'-phosphate
  modified_base 7: mod_base = OTHER; note = 2'-fluorocytidine-3'-phosphate
  modified_base 8: mod_base = OTHER; note = 2'-O-methylcytidine-3'-phosphate
  modified_base 9: mod_base = OTHER; note = 2'-fluorouridine-3'-phosphate
  modified_base 10: mod_base = OTHER; note = 2'-fluoroguanosine-3'-phosphate
  modified_base 11: mod_base = OTHER; note = 2'-fluorouridine-3'-phosphate
  modified_base 12: mod_base = OTHER; note = 2'-O-methylcytidine-3'-phosphate
  modified_base 13: mod_base = OTHER; note = 2'-O-methylcytidine-3'-phosphate
  modified_base 14: mod_base = OTHER; note = 2'-O-methyladenosine-3'-phosphate
  modified_base 15: mod_base = OTHER; note = 2'-O-methyladenosine-3'-phosphate
  modified_base 16: mod_base = OTHER; note = 2'-O-methyladenosine-3'-phosphate
  modified_base 17: mod_base = OTHER; note = 2'-O-methylcytidine-3'-phosphate
  modified_base 18: mod_base = OTHER; note = 2'-O-methyluridine-3'-phosphate
  modified_base 19: mod_base = OTHER; note = 2'-O-methyluridine-3'-phosphorothioate
  modified_base 20: mod_base = OTHER; note = 2'-O-methylcytidine-3'-phosphorothioate
  modified_base 21: mod_base = OTHER; note = 2'-O-methyladenosine-3'-phosphate
gtttaacctgtccaaacttca

SEQ ID NO: 2324 - RNA, 21 nt, synthetic construct
  source 1..21: mol_type = other RNA
  modified_base 1: mod_base = OTHER; note = 2'-O-methylcytidine-3'-phosphorothioate
  modified_base 2: mod_base = OTHER; note = 2'-O-methyladenosine-3'-phosphorothioate
  modified_base 3: mod_base = OTHER; note = 2'-O-methyladenosine-3'-phosphate
  modified_base 4: mod_base = OTHER; note = 2'-O-methyladenosine-3'-phosphate
  modified_base 5: mod_base = OTHER; note = 2'-O-methyladenosine-3'-phosphate
  modified_base 6: mod_base = OTHER; note = 2'-O-methyluridine-3'-phosphate
  modified_base 7: mod_base = OTHER; note = 2'-fluoroguanosine-3'-phosphate
  modified_base 8: mod_base = OTHER; note = 2'-O-methyluridine-3'-phosphate
  modified_base 9: mod_base = OTHER; note = 2'-fluorouridine-3'-phosphate
  modified_base 10: mod_base = OTHER; note = 2'-fluorouridine-3'-phosphate
  modified_base 11: mod_base = OTHER; note = 2'-fluoroadenosine-3'-phosphate
  modified_base 12: mod_base = OTHER; note = 2'-O-methyladenosine-3'-phosphate
  modified_base 13: mod_base = OTHER; note = 2'-O-methylcytidine-3'-phosphate
  modified_base 14: mod_base = OTHER; note = 2'-O-methyluridine-3'-phosphate
  modified_base 15: mod_base = OTHER; note = 2'-O-methyluridine-3'-phosphate
  modified_base 16: mod_base = OTHER; note = 2'-O-methyluridine-3'-phosphate
  modified_base 17: mod_base = OTHER; note = 2'-O-methyladenosine-3'-phosphate
  modified_base 18: mod_base = OTHER; note = 2'-O-methylcytidine-3'-phosphate
  modified_base 19: mod_base = OTHER; note = 2'-O-methylcytidine-3'-phosphorothioate
  modified_base 20: mod_base = OTHER; note = 2'-O-methyladenosine-3'-phosphorothioate
  modified_base 21: mod_base = OTHER; note = 2'-O-methyladenosine-3'-phosphate
caaaatgtttaactttaccaa

SEQ ID NO: 2325 - RNA, 21 nt, synthetic construct
  source 1..21: mol_type = other RNA
  modified_base 1: mod_base = OTHER; note = 2'-O-methyluridine-3'-phosphorothioate
  modified_base 2: mod_base = OTHER; note = 2'-O-methylcytidine-3'-phosphorothioate
  modified_base 3: mod_base = OTHER; note = 2'-O-methylcytidine-3'-phosphate
  modified_base 4: mod_base = OTHER; note = 2'-O-methylcytidine-3'-phosphate
  modified_base 5: mod_base = OTHER; note = 2'-O-methyladenosine-3'-phosphate
  modified_base 6: mod_base = OTHER; note = 2'-O-methyluridine-3'-phosphate
  modified_base 7: mod_base = OTHER; note = 2'-fluorouridine-3'-phosphate
  modified_base 8: mod_base = OTHER; note = 2'-O-methylguanosine-3'-phosphate
  modified_base 9: mod_base = OTHER; note = 2'-fluorouridine-3'-phosphate
  modified_base 10: mod_base = OTHER; note = 2'-fluoroguanosine-3'-phosphate
  modified_base 11: mod_base = OTHER; note = 2'-fluorouridine-3'-phosphate
  modified_base 12: mod_base = OTHER; note = 2'-O-methyladenosine-3'-phosphate
  modified_base 13: mod_base = OTHER; note = 2'-O-methyladenosine-3'-phosphate
  modified_base 14: mod_base = OTHER; note = 2'-O-methyluridine-3'-phosphate
  modified_base 15: mod_base = OTHER; note = 2'-O-methyladenosine-3'-phosphate
  modified_base 16: mod_base = OTHER; note = 2'-O-methyluridine-3'-phosphate
  modified_base 17: mod_base = OTHER; note = 2'-O-methyluridine-3'-phosphate
  modified_base 18: mod_base = OTHER; note = 2'-O-methyluridine-3'-phosphate
  modified_base 19: mod_base = OTHER; note = 2'-O-methyladenosine-3'-phosphorothioate
  modified_base 20: mod_base = OTHER; note = 2'-O-methyluridine-3'-phosphorothioate
  modified_base 21: mod_base = OTHER; note = 2'-O-methyladenosine-3'-phosphate
tcccattgtgtaatatttata

SEQ ID NO: 2326 - RNA, 21 nt, synthetic construct
  source 1..21: mol_type = other RNA
  modified_base 1: mod_base = OTHER; note = 2'-O-methylguanosine-3'-phosphorothioate
  modified_base 2: mod_base = OTHER; note = 2'-O-methyluridine-3'-phosphorothioate
  modified_base 3: mod_base = OTHER; note = 2'-O-methyluridine-3'-phosphate
  modified_base 4: mod_base = OTHER; note = 2'-O-methylguanosine-3'-phosphate
  modified_base 5: mod_base = OTHER; note = 2'-O-methylguanosine-3'-phosphate
  modified_base 6: mod_base = OTHER; note = 2'-O-methylguanosine-3'-phosphate
  modified_base 7: mod_base = OTHER; note = 2'-fluorouridine-3'-phosphate
  modified_base 8: mod_base = OTHER; note = 2'-O-methyladenosine-3'-phosphate
  modified_base 9: mod_base = OTHER; note = 2'-fluoroadenosine-3'-phosphate
  modified_base 10: mod_base = OTHER; note = 2'-fluoroadenosine-3'-phosphate
  modified_base 11: mod_base = OTHER; note = 2'-fluorouridine-3'-phosphate
  modified_base 12: mod_base = OTHER; note = 2'-O-methyladenosine-3'-phosphate
  modified_base 13: mod_base = OTHER; note = 2'-O-methyluridine-3'-phosphate
  modified_base 14: mod_base = OTHER; note = 2'-O-methylguanosine-3'-phosphate
  modified_base 15: mod_base = OTHER; note = 2'-O-methylcytidine-3'-phosphate
  modified_base 16: mod_base = OTHER; note = 2'-O-methyluridine-3'-phosphate
  modified_base 17: mod_base = OTHER; note = 2'-O-methyluridine-3'-phosphate
  modified_base 18: mod_base = OTHER; note = 2'-O-methyladenosine-3'-phosphate
  modified_base 19: mod_base = OTHER; note = 2'-O-methyluridine-3'-phosphorothioate
  modified_base 20: mod_base = OTHER; note = 2'-O-methyluridine-3'-phosphorothioate
  modified_base 21: mod_base = OTHER; note = 2'-O-methyladenosine-3'-phosphate
gttgggtaaatatgcttatta

SEQ ID NO: 2327 - RNA, 21 nt, synthetic construct
  source 1..21: mol_type = other RNA
  modified_base 1: mod_base = OTHER; note = 2'-O-methylcytidine-3'-phosphorothioate
  modified_base 2: mod_base = OTHER; note = 2'-O-methyladenosine-3'-phosphorothioate
  modified_base 3: mod_base = OTHER; note = 2'-O-methylguanosine-3'-phosphate
  modified_base 4: mod_base = OTHER; note = 2'-O-methylguanosine-3'-phosphate
  modified_base 5: mod_base = OTHER; note = 2'-O-methylguanosine-3'-phosphate
  modified_base 6: mod_base = OTHER; note = 2'-O-methyluridine-3'-phosphate
  modified_base 7: mod_base = OTHER; note = 2'-fluorouridine-3'-phosphate
  modified_base 8: mod_base = OTHER; note = 2'-O-methylguanosine-3'-phosphate
  modified_base 9: mod_base = OTHER; note = 2'-fluorouridine-3'-phosphate
  modified_base 10: mod_base = OTHER; note = 2'-fluorocytidine-3'-phosphate
  modified_base 11: mod_base = OTHER; note = 2'-fluorouridine-3'-phosphate
  modified_base 12: mod_base = OTHER; note = 2'-O-methyluridine-3'-phosphate
  modified_base 13: mod_base = OTHER; note = 2'-O-methyluridine-3'-phosphate
  modified_base 14: mod_base = OTHER; note = 2'-O-methylguanosine-3'-phosphate
  modified_base 15: mod_base = OTHER; note = 2'-O-methyladenosine-3'-phosphate
  modified_base 16: mod_base = OTHER; note = 2'-O-methylguanosine-3'-phosphate
  modified_base 17: mod_base = OTHER; note = 2'-O-methyluridine-3'-phosphate
  modified_base 18: mod_base = OTHER; note = 2'-O-methylcytidine-3'-phosphate
  modified_base 19: mod_base = OTHER; note = 2'-O-methyluridine-3'-phosphorothioate
  modified_base 20: mod_base = OTHER; note = 2'-O-methylguanosine-3'-phosphorothioate
  modified_base 21: mod_base = OTHER; note = 2'-O-methyladenosine-3'-phosphate
cagggttgtctttgagtctga

SEQ ID NO: 2328 - RNA, 21 nt, synthetic construct
  source 1..21: mol_type = other RNA
  modified_base 1: mod_base = OTHER; note = 2'-O-methylguanosine-3'-phosphorothioate
  modified_base 2: mod_base = OTHER; note = 2'-O-methylcytidine-3'-phosphorothioate
  modified_base 3: mod_base = OTHER; note = 2'-O-methyluridine-3'-phosphate
  modified_base 4: mod_base = OTHER; note = 2'-O-methyladenosine-3'-phosphate
  modified_base 5: mod_base = OTHER; note = 2'-O-methyladenosine-3'-phosphate
  modified_base 6: mod_base = OTHER; note = 2'-O-methyladenosine-3'-phosphate
  modified_base 7: mod_base = OTHER; note = 2'-fluoroadenosine-3'-phosphate
  modified_base 8: mod_base = OTHER; note = 2'-O-methyluridine-3'-phosphate
  modified_base 9: mod_base = OTHER; note = 2'-fluorocytidine-3'-phosphate
  modified_base 10: mod_base = OTHER; note = 2'-fluorocytidine-3'-phosphate
  modified_base 11: mod_base = OTHER; note = 2'-fluoroadenosine-3'-phosphate
  modified_base 12: mod_base = OTHER; note = 2'-O-methyladenosine-3'-phosphate
  modified_base 13: mod_base = OTHER; note = 2'-O-methylcytidine-3'-phosphate
  modified_base 14: mod_base = OTHER; note = 2'-O-methyluridine-3'-phosphate
  modified_base 15: mod_base = OTHER; note = 2'-O-methylguanosine-3'-phosphate
  modified_base 16: mod_base = OTHER; note = 2'-O-methylcytidine-3'-phosphate
  modified_base 17: mod_base = OTHER; note = 2'-O-methyladenosine-3'-phosphate
  modified_base 18: mod_base = OTHER; note = 2'-O-methyladenosine-3'-phosphate
  modified_base 19: mod_base = OTHER; note = 2'-O-methyluridine-3'-phosphorothioate
  modified_base 20: mod_base = OTHER; note = 2'-O-methyluridine-3'-phosphorothioate
  modified_base 21: mod_base = OTHER; note = 2'-O-methyladenosine-3'-phosphate
gctaaaatccaactgcaatta

SEQ ID NO: 2329 - RNA, 21 nt, synthetic construct
  source 1..21: mol_type = other RNA
  modified_base 1: mod_base = OTHER; note = 2'-O-methylcytidine-3'-phosphorothioate
  modified_base 2: mod_base = OTHER; note = 2'-O-methyladenosine-3'-phosphorothioate
  modified_base 3: mod_base = OTHER; note = 2'-O-methylguanosine-3'-phosphate
  modified_base 4: mod_base = OTHER; note = 2'-O-methylguanosine-3'-phosphate
  modified_base 5: mod_base = OTHER; note = 2'-O-methyladenosine-3'-phosphate
  modified_base 6: mod_base = OTHER; note = 2'-O-methylcytidine-3'-phosphate
  modified_base 7: mod_base = OTHER; note = 2'-fluorouridine-3'-phosphate
  modified_base 8: mod_base = OTHER; note = 2'-O-methylguanosine-3'-phosphate
  modified_base 9: mod_base = OTHER; note = 2'-fluoroadenosine-3'-phosphate
  modified_base 10: mod_base = OTHER; note = 2'-fluoroadenosine-3'-phosphate
  modified_base 11: mod_base = OTHER; note = 2'-fluoroguanosine-3'-phosphate
  modified_base 12: mod_base = OTHER; note = 2'-O-methyluridine-3'-phosphate
  modified_base 13: mod_base = OTHER; note = 2'-O-methylguanosine-3'-phosphate
  modified_base 14: mod_base = OTHER; note = 2'-O-methyluridine-3'-phosphate
  modified_base 15: mod_base = OTHER; note = 2'-O-methylguanosine-3'-phosphate
  modified_base 16: mod_base = OTHER; note = 2'-O-methyluridine-3'-phosphate
  modified_base 17: mod_base = OTHER; note = 2'-O-methyladenosine-3'-phosphate
  modified_base 18: mod_base = OTHER; note = 2'-O-methyluridine-3'-phosphate
  modified_base 19: mod_base = OTHER; note = 2'-O-methylguanosine-3'-phosphorothioate
  modified_base 20: mod_base = OTHER; note = 2'-O-methyluridine-3'-phosphorothioate
  modified_base 21: mod_base = OTHER; note = 2'-O-methyladenosine-3'-phosphate
caggactgaagtgtgtatgta

SEQ ID NO: 2330 - RNA, 21 nt, synthetic construct
  source 1..21: mol_type = other RNA
  modified_base 1: mod_base = OTHER; note = 2'-O-methylguanosine-3'-phosphorothioate
  modified_base 2: mod_base = OTHER; note = 2'-O-methyladenosine-3'-phosphorothioate
  modified_base 3: mod_base = OTHER; note = 2'-O-methylguanosine-3'-phosphate
  modified_base 4: mod_base = OTHER; note = 2'-O-methyluridine-3'-phosphate
  modified_base 5: mod_base = OTHER; note = 2'-O-methyladenosine-3'-phosphate
  modified_base 6: mod_base = OTHER; note = 2'-O-methylcytidine-3'-phosphate
  modified_base 7: mod_base = OTHER; note = 2'-fluorocytidine-3'-phosphate
  modified_base 8: mod_base = OTHER; note = 2'-O-methyladenosine-3'-phosphate
  modified_base 9: mod_base = OTHER; note = 2'-fluoroadenosine-3'-phosphate
  modified_base 10: mod_base = OTHER; note = 2'-fluorouridine-3'-phosphate
  modified_base 11: mod_base = OTHER; note = 2'-fluorouridine-3'-phosphate
  modified_base 12: mod_base = OTHER; note = 2'-O-methylguanosine-3'-phosphate
  modified_base 13: mod_base = OTHER; note = 2'-O-methylcytidine-3'-phosphate
  modified_base 14: mod_base = OTHER; note = 2'-O-methylcytidine-3'-phosphate
  modified_base 15: mod_base = OTHER; note = 2'-O-methyluridine-3'-phosphate
  modified_base 16: mod_base = OTHER; note = 2'-O-methyluridine-3'-phosphate
  modified_base 17: mod_base = OTHER; note = 2'-O-methyladenosine-3'-phosphate
  modified_base 18: mod_base = OTHER; note = 2'-O-methyluridine-3'-phosphate
  modified_base 19: mod_base = OTHER; note = 2'-O-methyluridine-3'-phosphorothioate
  modified_base 20: mod_base = OTHER; note = 2'-O-methyladenosine-3'-phosphorothioate
  modified_base 21: mod_base = OTHER; note = 2'-O-methyladenosine-3'-phosphate
gagtaccaattgccttattaa

SEQ ID NO: 2331 - RNA, 21 nt, synthetic construct
  source 1..21: mol_type = other RNA
  modified_base 1: mod_base = OTHER; note = 2'-O-methyladenosine-3'-phosphorothioate
  modified_base 2: mod_base = OTHER; note = 2'-O-methyladenosine-3'-phosphorothioate
  modified_base 3: mod_base = OTHER; note = 2'-O-methylguanosine-3'-phosphate
  modified_base 4: mod_base = OTHER; note = 2'-O-methyluridine-3'-phosphate
  modified_base 5: mod_base = OTHER; note = 2'-O-methylguanosine-3'-phosphate
  modified_base 6: mod_base = OTHER; note = 2'-O-methylcytidine-3'-phosphate
  modified_base 7: mod_base = OTHER; note = 2'-fluorocytidine-3'-phosphate
  modified_base 8: mod_base = OTHER; note = 2'-O-methyluridine-3'-phosphate
  modified_base 9: mod_base = OTHER; note = 2'-fluoroadenosine-3'-phosphate
  modified_base 10: mod_base = OTHER; note = 2'-fluorouridine-3'-phosphate
  modified_base 11: mod_base = OTHER; note = 2'-fluoroguanosine-3'-phosphate
  modified_base 12: mod_base = OTHER; note = 2'-O-methyluridine-3'-phosphate
  modified_base 13: mod_base = OTHER; note = 2'-O-methylguanosine-3'-phosphate
  modified_base 14: mod_base = OTHER; note = 2'-O-methyladenosine-3'-phosphate
  modified_base 15: mod_base = OTHER; note = 2'-O-methyladenosine-3'-phosphate
  modified_base 16: mod_base = OTHER; note = 2'-O-methylguanosine-3'-phosphate
  modified_base 17: mod_base = OTHER; note = 2'-O-methyluridine-3'-phosphate
  modified_base 18: mod_base = OTHER; note = 2'-O-methylguanosine-3'-phosphate
  modified_base 19: mod_base = OTHER; note = 2'-O-methyladenosine-3'-phosphorothioate
  modified_base 20: mod_base = OTHER; note = 2'-O-methyluridine-3'-phosphorothioate
  modified_base 21: mod_base = OTHER; note = 2'-O-methyladenosine-3'-phosphate
aagtgcctatgtgaagtgata

SEQ ID NO: 2332 - RNA, 21 nt, synthetic construct
  source 1..21: mol_type = other RNA
  modified_base 1: mod_base = OTHER; note = 2'-O-methyluridine-3'-phosphorothioate
  modified_base 2: mod_base = OTHER; note = 2'-O-methyladenosine-3'-phosphorothioate
  modified_base 3: mod_base = OTHER; note = 2'-O-methyladenosine-3'-phosphate
  modified_base 4: mod_base = OTHER; note = 2'-O-methylcytidine-3'-phosphate
  modified_base 5: mod_base = OTHER; note = 2'-O-methyladenosine-3'-phosphate
  modified_base 6: mod_base = OTHER; note = 2'-O-methyladenosine-3'-phosphate
  modified_base 7: mod_base = OTHER; note = 2'-fluorouridine-3'-phosphate
  modified_base 8: mod_base = OTHER; note = 2'-O-methyladenosine-3'-phosphate
  modified_base 9: mod_base = OTHER; note = 2'-fluoroadenosine-3'-phosphate
  modified_base 10: mod_base = OTHER; note = 2'-fluorouridine-3'-phosphate
  modified_base 11: mod_base = OTHER; note = 2'-fluoroadenosine-3'-phosphate
  modified_base 12: mod_base = OTHER; note = 2'-O-methylguanosine-3'-phosphate
  modified_base 13: mod_base = OTHER; note = 2'-O-methyladenosine-3'-phosphate
  modified_base 14: mod_base = OTHER; note = 2'-O-methyladenosine-3'-phosphate
  modified_base 15: mod_base = OTHER; note = 2'-O-methylcytidine-3'-phosphate
  modified_base 16: mod_base = OTHER; note = 2'-O-methyluridine-3'-phosphate
  modified_base 17: mod_base = OTHER; note = 2'-O-methylguanosine-3'-phosphate
  modified_base 18: mod_base = OTHER; note = 2'-O-methylcytidine-3'-phosphate
  modified_base 19: mod_base = OTHER; note = 2'-O-methylcytidine-3'-phosphorothioate
  modified_base 20: mod_base = OTHER; note = 2'-O-methyladenosine-3'-phosphorothioate
  modified_base 21: mod_base = OTHER; note = 2'-O-methyladenosine-3'-phosphate
taacaataatagaactgccaa

SEQ ID NO: 2333 - RNA, 21 nt, synthetic construct
  source 1..21: mol_type = other RNA
  modified_base 1: mod_base = OTHER; note = 2'-O-methylguanosine-3'-phosphorothioate
  modified_base 2: mod_base = OTHER; note = 2'-O-methylcytidine-3'-phosphorothioate
  modified_base 3: mod_base = OTHER; note = 2'-O-methyluridine-3'-phosphate
  modified_base 4: mod_base = OTHER; note = 2'-O-methylguanosine-3'-phosphate
  modified_base 5: mod_base = OTHER; note = 2'-O-methyluridine-3'-phosphate
  modified_base 6: mod_base = OTHER; note = 2'-O-methyluridine-3'-phosphate
  modified_base 7: mod_base = OTHER; note = 2'-fluorocytidine-3'-phosphate
  modified_base 8: mod_base = OTHER; note = 2'-O-methylcytidine-3'-phosphate
  modified_base 9: mod_base = OTHER; note = 2'-fluoroadenosine-3'-phosphate
  modified_base 10: mod_base = OTHER; note = 2'-fluorouridine-3'-phosphate
  modified_base 11: mod_base = OTHER; note = 2'-fluoroadenosine-3'-phosphate
  modified_base 12: mod_base = OTHER; note = 2'-O-methylcytidine-3'-phosphate
  modified_base 13: mod_base = OTHER; note = 2'-O-methylcytidine-3'-phosphate
  modified_base 14: mod_base = OTHER; note = 2'-O-methyladenosine-3'-phosphate
  modified_base 15: mod_base = OTHER; note = 2'-O-methyluridine-3'-phosphate
  modified_base 16: mod_base = OTHER; note = 2'-O-methyluridine-3'-phosphate
  modified_base 17: mod_base = OTHER; note = 2'-O-methylguanosine-3'-phosphate
  modified_base 18: mod_base = OTHER; note = 2'-O-methylcytidine-3'-phosphate
  modified_base 19: mod_base = OTHER; note = 2'-O-methyluridine-3'-phosphorothioate
  modified_base 20: mod_base = OTHER; note = 2'-O-methyluridine-3'-phosphorothioate
  modified_base 21: mod_base = OTHER; note = 2'-O-methyladenosine-3'-phosphate
gctgttccataccattgctta

SEQ ID NO: 2334 - RNA, 21 nt, synthetic construct
  source 1..21: mol_type = other RNA
  modified_base 1: mod_base = OTHER; note = 2'-O-methyluridine-3'-phosphorothioate
  modified_base 2: mod_base = OTHER; note = 2'-O-methyladenosine-3'-phosphorothioate
  modified_base 3: mod_base = OTHER; note = 2'-O-methylguanosine-3'-phosphate
  modified_base 4: mod_base = OTHER; note = 2'-O-methyladenosine-3'-phosphate
  modified_base 5: mod_base = OTHER; note = 2'-O-methylcytidine-3'-phosphate
  modified_base 6: mod_base = OTHER; note = 2'-O-methyluridine-3'-phosphate
  modified_base 7: mod_base = OTHER; note = 2'-fluoroguanosine-3'-phosphate
  modified_base 8: mod_base = OTHER; note = 2'-O-methylguanosine-3'-phosphate
  modified_base 9: mod_base = OTHER; note = 2'-fluoroadenosine-3'-phosphate
  modified_base 10: mod_base = OTHER; note = 2'-fluoroguanosine-3'-phosphate
  modified_base 11: mod_base = OTHER; note = 2'-fluoroadenosine-3'-phosphate
  modified_base 12: mod_base = OTHER; note = 2'-O-methyladenosine-3'-phosphate
  modified_base 13: mod_base = OTHER; note = 2'-O-methylguanosine-3'-phosphate
  modified_base 14: mod_base = OTHER; note = 2'-O-methyladenosine-3'-phosphate
  modified_base 15: mod_base = OTHER; note = 2'-O-methyluridine-3'-phosphate
  modified_base 16: mod_base = OTHER; note = 2'-O-methyluridine-3'-phosphate
  modified_base 17: mod_base = OTHER; note = 2'-O-methyladenosine-3'-phosphate
  modified_base 18: mod_base = OTHER; note = 2'-O-methyluridine-3'-phosphate
  modified_base 19: mod_base = OTHER; note = 2'-O-methyluridine-3'-phosphorothioate
  modified_base 20: mod_base = OTHER; note = 2'-O-methylcytidine-3'-phosphorothioate
  modified_base 21: mod_base = OTHER; note = 2'-O-methyladenosine-3'-phosphate
tagactggagaagattattca

SEQ ID NO: 2335 - RNA, 21 nt, synthetic construct
  source 1..21: mol_type = other RNA
  modified_base 1: mod_base = OTHER; note = 2'-O-methyluridine-3'-phosphorothioate
  modified_base 2: mod_base = OTHER; note = 2'-O-methyluridine-3'-phosphorothioate
  modified_base 3: mod_base = OTHER; note = 2'-O-methylcytidine-3'-phosphate
  modified_base 4: mod_base = OTHER; note = 2'-O-methylcytidine-3'-phosphate
  modified_base 5: mod_base = OTHER; note = 2'-O-methyladenosine-3'-phosphate
  modified_base 6: mod_base = OTHER; note = 2'-O-methyladenosine-3'-phosphate
  modified_base 7: mod_base = OTHER; note = 2'-fluorocytidine-3'-phosphate
  modified_base 8: mod_base = OTHER; note = 2'-O-methyladenosine-3'-phosphate
  modified_base 9: mod_base = OTHER; note = 2'-fluoroguanosine-3'-phosphate
  modified_base 10: mod_base = OTHER; note = 2'-fluorocytidine-3'-phosphate
  modified_base 11: mod_base = OTHER; note = 2'-fluoroadenosine-3'-phosphate
  modified_base 12: mod_base = OTHER; note = 2'-O-methyluridine-3'-phosphate
  modified_base 13: mod_base = OTHER; note = 2'-O-methylcytidine-3'-phosphate
  modified_base 14: mod_base = OTHER; note = 2'-O-methyladenosine-3'-phosphate
  modified_base 15: mod_base = OTHER; note = 2'-O-methylcytidine-3'-phosphate
  modified_base 16: mod_base = OTHER; note = 2'-O-methylcytidine-3'-phosphate
  modified_base 17: mod_base = OTHER; note = 2'-O-methyladenosine-3'-phosphate
  modified_base 18: mod_base = OTHER; note = 2'-O-methyladenosine-3'-phosphate
  modified_base 19: mod_base = OTHER; note = 2'-O-methyladenosine-3'-phosphorothioate
  modified_base 20: mod_base = OTHER; note = 2'-O-methyluridine-3'-phosphorothioate
  modified_base 21: mod_base = OTHER; note = 2'-O-methyladenosine-3'-phosphate
ttccaacagcatcaccaaata

SEQ ID NO: 2336 - RNA, 21 nt, synthetic construct
  source 1..21: mol_type = other RNA
  modified_base 1: mod_base = OTHER; note = 2'-O-methyluridine-3'-phosphorothioate
  modified_base 2: mod_base = OTHER; note = 2'-O-methyladenosine-3'-phosphorothioate
  modified_base 3: mod_base = OTHER; note = 2'-O-methyladenosine-3'-phosphate
  modified_base 4: mod_base = OTHER; note = 2'-O-methyluridine-3'-phosphate
  modified_base 5: mod_base = OTHER; note = 2'-O-methyluridine-3'-phosphate
  modified_base 6: mod_base = OTHER; note = 2'-O-methylguanosine-3'-phosphate
  modified_base 7: mod_base = OTHER; note = 2'-fluoroguanosine-3'-phosphate
  modified_base 8: mod_base = OTHER; note = 2'-O-methyluridine-3'-phosphate
  modified_base 9: mod_base = OTHER; note = 2'-fluoroadenosine-3'-phosphate
  modified_base 10: mod_base = OTHER; note = 2'-fluorocytidine-3'-phosphate
  modified_base 11: mod_base = OTHER; note = 2'-fluoroadenosine-3'-phosphate
  modified_base 12: mod_base = OTHER; note = 2'-O-methylguanosine-3'-phosphate
  modified_base 13: mod_base = OTHER; note = 2'-O-methyladenosine-3'-phosphate
  modified_base 14: mod_base = OTHER; note = 2'-O-methyluridine-3'-phosphate
  modified_base 15: mod_base = OTHER; note = 2'-O-methyluridine-3'-phosphate
  modified_base 16: mod_base = OTHER; note = 2'-O-methylcytidine-3'-phosphate
  modified_base 17: mod_base = OTHER; note = 2'-O-methyluridine-3'-phosphate
  modified_base 18: mod_base = OTHER; note = 2'-O-methylguanosine-3'-phosphate
  modified_base 19: mod_base = OTHER; note = 2'-O-methyluridine-3'-phosphorothioate
  modified_base 20: mod_base = OTHER; note = 2'-O-methyluridine-3'-phosphorothioate
  modified_base 21: mod_base = OTHER; note = 2'-O-methyladenosine-3'-phosphate
taattggtacagattctgtta

SEQ ID NO: 2337 - RNA, 21 nt, synthetic construct
  source 1..21: mol_type = other RNA
  modified_base 1: mod_base = OTHER; note = 2'-O-methylguanosine-3'-phosphorothioate
  modified_base 2: mod_base = OTHER; note = 2'-O-methyladenosine-3'-phosphorothioate
  modified_base 3: mod_base = OTHER; note = 2'-O-methylguanosine-3'-phosphate
  modified_base 4: mod_base = OTHER; note = 2'-O-methyladenosine-3'-phosphate
  modified_base 5: mod_base = OTHER; note = 2'-O-methyladenosine-3'-phosphate
  modified_base 6: mod_base = OTHER; note = 2'-O-methyladenosine-3'-phosphate
  modified_base 7: mod_base = OTHER; note = 2'-fluorocytidine-3'-phosphate
  modified_base 8: mod_base = OTHER; note = 2'-O-methyladenosine-3'-phosphate
  modified_base 9: mod_base = OTHER; note = 2'-fluorouridine-3'-phosphate
  modified_base 10: mod_base = OTHER; note = 2'-fluorouridine-3'-phosphate
  modified_base 11: mod_base = OTHER; note = 2'-fluoroadenosine-3'-phosphate
  modified_base 12: mod_base = OTHER; note = 2'-O-methyluridine-3'-phosphate
  modified_base 13: mod_base = OTHER; note = 2'-O-methyluridine-3'-phosphate
  modified_base 14: mod_base = OTHER; note = 2'-O-methyluridine-3'-phosphate
  modified_base 15: mod_base = OTHER; note = 2'-O-methylguanosine-3'-phosphate
  modified_base 16: mod_base = OTHER; note = 2'-O-methyluridine-3'-phosphate
  modified_base 17: mod_base = OTHER; note = 2'-O-methyluridine-3'-phosphate
  modified_base 18: mod_base = OTHER; note = 2'-O-methylguanosine-3'-phosphate
  modified_base 19: mod_base = OTHER; note = 2'-O-methyluridine-3'-phosphorothioate
  modified_base 20: mod_base = OTHER; note = 2'-O-methylcytidine-3'-phosphorothioate
  modified_base 21: mod_base = OTHER; note = 2'-O-methyladenosine-3'-phosphate
gagaaacattatttgttgtca

SEQ ID NO: 2338 - RNA, 21 nt, synthetic construct
  source 1..21: mol_type = other RNA
  modified_base 1: mod_base = OTHER; note = 2'-O-methylcytidine-3'-phosphorothioate
  modified_base 2: mod_base = OTHER; note = 2'-O-methylguanosine-3'-phosphorothioate
  modified_base 3: mod_base = OTHER; note = 2'-O-methylcytidine-3'-phosphate
  modified_base 4: mod_base = OTHER; note = 2'-O-methyluridine-3'-phosphate
  modified_base 5: mod_base = OTHER; note = 2'-O-methylcytidine-3'-phosphate
  modified_base 6: mod_base = OTHER; note = 2'-O-methyluridine-3'-phosphate
  modified_base 7: mod_base = OTHER; note = 2'-fluorocytidine-3'-phosphate
  modified_base 8: mod_base = OTHER; note = 2'-O-methyladenosine-3'-phosphate
  modified_base 9: mod_base = OTHER; note = 2'-fluoroadenosine-3'-phosphate
  modified_base 10: mod_base = OTHER; note = 2'-fluorouridine-3'-phosphate
  modified_base 11: mod_base = OTHER; note = 2'-fluorouridine-3'-phosphate
  modified_base 12: mod_base = OTHER; note = 2'-O-methylguanosine-3'-phosphate
  modified_base 13: mod_base = OTHER; note = 2'-O-methylcytidine-3'-phosphate
  modified_base 14: mod_base = OTHER; note = 2'-O-methyluridine-3'-phosphate
  modified_base 15: mod_base = OTHER; note = 2'-O-methyladenosine-3'-phosphate
  modified_base 16: mod_base = OTHER; note = 2'-O-methylguanosine-3'-phosphate
  modified_base 17: mod_base = OTHER; note = 2'-O-methyluridine-3'-phosphate
  modified_base 18: mod_base = OTHER; note = 2'-O-methylguanosine-3'-phosphate
  modified_base 19: mod_base = OTHER; note = 2'-O-methylguanosine-3'-phosphorothioate
  modified_base 20: mod_base = OTHER; note = 2'-O-methyluridine-3'-phosphorothioate
  modified_base 21: mod_base = OTHER; note = 2'-O-methyladenosine-3'-phosphate
cgctctcaattgctagtggta

SEQ ID NO: 2339 - RNA, 21 nt, synthetic construct
  source 1..21: mol_type = other RNA
  modified_base 1: mod_base = OTHER; note = 2'-O-methylcytidine-3'-phosphorothioate
  modified_base 2: mod_base = OTHER; note = 2'-O-methylguanosine-3'-phosphorothioate
  modified_base 3: mod_base = OTHER; note = 2'-O-methylguanosine-3'-phosphate
  modified_base 4: mod_base = OTHER; note = 2'-O-methyluridine-3'-phosphate
  modified_base 5: mod_base = OTHER; note = 2'-O-methyladenosine-3'-phosphate
  modified_base 6: mod_base = OTHER; note = 2'-O-methyluridine-3'-phosphate
  modified_base 7: mod_base = OTHER; note = 2'-fluorocytidine-3'-phosphate
  modified_base 8: mod_base = OTHER; note = 2'-O-methyladenosine-3'-phosphate
  modified_base 9: mod_base = OTHER; note = 2'-fluoroguanosine-3'-phosphate
  modified_base 10: mod_base = OTHER; note = 2'-fluoroadenosine-3'-phosphate
  modified_base 11: mod_base = OTHER; note = 2'-fluoroadenosine-3'-phosphate
  modified_base 12: mod_base = OTHER; note = 2'-O-methyladenosine-3'-phosphate
  modified_base 13: mod_base = OTHER; note = 2'-O-methylcytidine-3'-phosphate
  modified_base 14: mod_base = OTHER; note = 2'-O-methyladenosine-3'-phosphate
  modified_base 15: mod_base = OTHER; note = 2'-O-methylguanosine-3'-phosphate
  modified_base 16: mod_base = OTHER; note = 2'-O-methylcytidine-3'-phosphate
  modified_base 17: mod_base = OTHER; note = 2'-O-methyladenosine-3'-phosphate
  modified_base 18: mod_base = OTHER; note = 2'-O-methyladenosine-3'-phosphate
  modified_base 19: mod_base = OTHER; note = 2'-O-methyladenosine-3'-phosphorothioate
  modified_base 20: mod_base = OTHER; note = 2'-O-methyluridine-3'-phosphorothioate
  modified_base 21: mod_base = OTHER; note = 2'-O-methyladenosine-3'-phosphate
cggtatcagaaacagcaaata

SEQ ID NO: 2340 - RNA, 21 nt, synthetic construct
  source 1..21: mol_type = other RNA
  modified_base 1: mod_base = OTHER; note = 2'-O-methylcytidine-3'-phosphorothioate
  modified_base 2: mod_base = OTHER; note = 2'-O-methylcytidine-3'-phosphorothioate
  modified_base 3: mod_base = OTHER; note = 2'-O-methylcytidine-3'-phosphate
  modified_base 4: mod_base = OTHER; note = 2'-O-methyladenosine-3'-phosphate
  modified_base 5: mod_base = OTHER; note = 2'-O-methylguanosine-3'-phosphate
  modified_base 6: mod_base = OTHER; note = 2'-O-methyladenosine-3'-phosphate
  modified_base 7: mod_base = OTHER; note = 2'-fluorocytidine-3'-phosphate
  modified_base 8: mod_base = OTHER; note = 2'-O-methyladenosine-3'-phosphate
  modified_base 9: mod_base = OTHER; note = 2'-fluorouridine-3'-phosphate
  modified_base 10: mod_base = OTHER; note = 2'-fluoroadenosine-3'-phosphate
  modified_base 11: mod_base = OTHER; note = 2'-fluoroadenosine-3'-phosphate
  modified_base 12: mod_base = OTHER; note = 2'-O-methyluridine-3'-phosphate
  modified_base 13: mod_base = OTHER; note = 2'-O-methyluridine-3'-phosphate
  modified_base 14: mod_base = OTHER; note = 2'-O-methyluridine-3'-phosphate
  modified_base 15: mod_base = OTHER; note = 2'-O-methyluridine-3'-phosphate
  modified_base 16: mod_base = OTHER; note = 2'-O-methyladenosine-3'-phosphate
  modified_base 17: mod_base = OTHER; note = 2'-O-methyluridine-3'-phosphate
  modified_base 18: mod_base = OTHER; note = 2'-O-methyladenosine-3'-phosphate
  modified_base 19: mod_base = OTHER; note = 2'-O-methyluridine-3'-phosphorothioate
  modified_base 20: mod_base = OTHER; note = 2'-O-methyluridine-3'-phosphorothioate
  modified_base 21: mod_base = OTHER; note = 2'-O-methyladenosine-3'-phosphate
cccagacataattttatatta

SEQ ID NO: 2341 - RNA, 21 nt, synthetic construct
  source 1..21: mol_type = other RNA
  modified_base 1: mod_base = OTHER; note = 2'-O-methyluridine-3'-phosphorothioate
  modified_base 2: mod_base = OTHER; note = 2'-O-methyladenosine-3'-phosphorothioate
  modified_base 3: mod_base = OTHER; note = 2'-O-methylguanosine-3'-phosphate
  modified_base 4: mod_base = OTHER; note = 2'-O-methyluridine-3'-phosphate
  modified_base 5: mod_base = OTHER; note = 2'-O-methyladenosine-3'-phosphate
  modified_base 6: mod_base = OTHER; note = 2'-O-methylcytidine-3'-phosphate
  modified_base 7: mod_base = OTHER; note = 2'-fluoroadenosine-3'-phosphate
  modified_base 8: mod_base = OTHER; note = 2'-O-methyluridine-3'-phosphate
  modified_base 9: mod_base = OTHER; note = 2'-fluorouridine-3'-phosphate
  modified_base 10: mod_base = OTHER; note = 2'-fluorouridine-3'-phosphate
  modified_base 11: mod_base = OTHER; note = 2'-fluorouridine-3'-phosphate
  modified_base 12: mod_base = OTHER; note = 2'-O-methylguanosine-3'-phosphate
  modified_base 13: mod_base = OTHER; note = 2'-O-methyladenosine-3'-phosphate
  modified_base 14: mod_base = OTHER; note = 2'-O-methylguanosine-3'-phosphate
  modified_base 15: mod_base = OTHER; note = 2'-O-methylguanosine-3'-phosphate
  modified_base 16: mod_base = OTHER; note = 2'-O-methyluridine-3'-phosphate
  modified_base 17: mod_base = OTHER; note = 2'-O-methyladenosine-3'-phosphate
  modified_base 18: mod_base = OTHER; note = 2'-O-methyluridine-3'-phosphate
  modified_base 19: mod_base = OTHER; note = 2'-O-methyluridine-3'-phosphorothioate
  modified_base 20: mod_base = OTHER; note = 2'-O-methyluridine-3'-phosphorothioate
  modified_base 21: mod_base = OTHER; note = 2'-O-methyladenosine-3'-phosphate
tagtacattttgaggtattta

SEQ ID NO: 2342 - RNA, 21 nt, synthetic construct
  source 1..21: mol_type = other RNA
  modified_base 1: mod_base = OTHER; note = 2'-O-methyladenosine-3'-phosphorothioate
  modified_base 2: mod_base = OTHER; note = 2'-O-methyladenosine-3'-phosphorothioate
  modified_base 3: mod_base = OTHER; note = 2'-O-methyladenosine-3'-phosphate
  modified_base 4: mod_base = OTHER; note = 2'-O-methyluridine-3'-phosphate
  modified_base 5: mod_base = OTHER; note = 2'-O-methylguanosine-3'-phosphate
  modified_base 6: mod_base = OTHER; note = 2'-O-methylcytidine-3'-phosphate
  modified_base 7: mod_base = OTHER; note = 2'-fluorouridine-3'-phosphate
  modified_base 8: mod_base = OTHER; note = 2'-O-methyladenosine-3'-phosphate
  modified_base 9: mod_base = OTHER; note = 2'-fluorouridine-3'-phosphate
  modified_base 10: mod_base = OTHER; note = 2'-fluorouridine-3'-phosphate
  modified_base 11: mod_base = OTHER; note = 2'-fluoroguanosine-3'-phosphate
  modified_base 12: mod_base = OTHER; note = 2'-O-methyladenosine-3'-phosphate
  modified_base 13: mod_base = OTHER; note = 2'-O-methyluridine-3'-phosphate
  modified_base 14: mod_base = OTHER; note = 2'-O-methyladenosine-3'-phosphate
  modified_base 15: mod_base = OTHER; note = 2'-O-methyladenosine-3'-phosphate
  modified_base 16: mod_base = OTHER; note = 2'-O-methylcytidine-3'-phosphate
  modified_base 17: mod_base = OTHER; note = 2'-O-methyladenosine-3'-phosphate
  modified_base 18: mod_base = OTHER; note = 2'-O-methylguanosine-3'-phosphate
  modified_base 19: mod_base = OTHER; note = 2'-O-methyluridine-3'-phosphorothioate
  modified_base 20: mod_base = OTHER; note = 2'-O-methyladenosine-3'-phosphorothioate
  modified_base 21: mod_base = OTHER; note = 2'-O-methyladenosine-3'-phosphate
aaatgctattgataacagtaa

SEQ ID NO: 2343 - RNA, 21 nt, synthetic construct
  source 1..21: mol_type = other RNA
  modified_base 1: mod_base = OTHER; note = 2'-O-methyluridine-3'-phosphorothioate
  modified_base 2: mod_base = OTHER; note = 2'-O-methyladenosine-3'-phosphorothioate
  modified_base 3: mod_base = OTHER; note = 2'-O-methylguanosine-3'-phosphate
  modified_base 4: mod_base = OTHER; note = 2'-O-methylcytidine-3'-phosphate
  modified_base 5: mod_base = OTHER; note = 2'-O-methyluridine-3'-phosphate
  modified_base 6: mod_base = OTHER; note = 2'-O-methylguanosine-3'-phosphate
  modified_base 7: mod_base = OTHER; note = 2'-fluoroadenosine-3'-phosphate
  modified_base 8: mod_base = OTHER; note = 2'-O-methyladenosine-3'-phosphate
  modified_base 9: mod_base = OTHER; note = 2'-fluorouridine-3'-phosphate
  modified_base 10: mod_base = OTHER; note = 2'-fluorouridine-3'-phosphate
  modified_base 11: mod_base = OTHER; note = 2'-fluorouridine-3'-phosphate
  modified_base 12: mod_base = OTHER; note = 2'-O-methylguanosine-3'-phosphate
  modified_base 13: mod_base = OTHER; note = 2'-O-methylguanosine-3'-phosphate
  modified_base 14: mod_base = OTHER; note = 2'-O-methylguanosine-3'-phosphate
  modified_base 15: mod_base = OTHER; note = 2'-O-methyladenosine-3'-phosphate
  modified_base 16: mod_base = OTHER; note = 2'-O-methylcytidine-3'-phosphate
  modified_base 17: mod_base = OTHER; note = 2'-O-methyluridine-3'-phosphate
  modified_base 18: mod_base = OTHER; note = 2'-O-methyladenosine-3'-phosphate
  modified_base 19: mod_base = OTHER; note = 2'-O-methyluridine-3'-phosphorothioate
  modified_base 20: mod_base = OTHER; note = 2'-O-methylguanosine-3'-phosphorothioate
  modified_base 21: mod_base = OTHER; note = 2'-O-methyladenosine-3'-phosphate
tagctgaatttgggactatga

SEQ ID NO: 2344 - RNA, 21 nt, synthetic construct
  source 1..21: mol_type = other RNA
  modified_base 1: mod_base = OTHER; note = 2'-O-methyladenosine-3'-phosphorothioate
  modified_base 2: mod_base = OTHER; note = 2'-O-methyluridine-3'-phosphorothioate
  modified_base 3: mod_base = OTHER; note = 2'-O-methyluridine-3'-phosphate
  modified_base 4: mod_base = OTHER; note = 2'-O-methylguanosine-3'-phosphate
  modified_base 5: mod_base = OTHER; note = 2'-O-methyluridine-3'-phosphate
  modified_base 6: mod_base = OTHER; note = 2'-O-methylguanosine-3'-phosphate
  modified_base 7: mod_base = OTHER; note = 2'-fluoroguanosine-3'-phosphate
  modified_base 8: mod_base = OTHER; note = 2'-O-methyluridine-3'-phosphate
  modified_base 9: mod_base = OTHER; note = 2'-fluorouridine-3'-phosphate
  modified_base 10: mod_base = OTHER; note = 2'-fluorouridine-3'-phosphate
  modified_base 11: mod_base = OTHER; note = 2'-fluorouridine-3'-phosphate
  modified_base 12: mod_base = OTHER; note = 2'-O-methylcytidine-3'-phosphate
  modified_base 13: mod_base = OTHER; note = 2'-O-methyladenosine-3'-phosphate
  modified_base 14: mod_base = OTHER; note = 2'-O-methyladenosine-3'-phosphate
  modified_base 15: mod_base = OTHER; note = 2'-O-methyladenosine-3'-phosphate
  modified_base 16: mod_base = OTHER; note = 2'-O-methylguanosine-3'-phosphate
  modified_base 17: mod_base = OTHER; note = 2'-O-methyladenosine-3'-phosphate
  modified_base 18: mod_base = OTHER; note = 2'-O-methyluridine-3'-phosphate
  modified_base 19: mod_base = OTHER; note = 2'-O-methyladenosine-3'-phosphorothioate
  modified_base 20: mod_base = OTHER; note = 2'-O-methyluridine-3'-phosphorothioate
  modified_base 21: mod_base = OTHER; note = 2'-O-methyladenosine-3'-phosphate
attgtggttttcaaagatata

SEQ ID NO: 2345 - RNA, 21 nt, synthetic construct
  source 1..21: mol_type = other RNA
  modified_base 1: mod_base = OTHER; note = 2'-O-methylcytidine-3'-phosphorothioate
  modified_base 2: mod_base = OTHER; note = 2'-O-methylcytidine-3'-phosphorothioate
  modified_base 3: mod_base = OTHER; note = 2'-O-methyluridine-3'-phosphate
  modified_base 4: mod_base = OTHER; note = 2'-O-methylguanosine-3'-phosphate
  modified_base 5: mod_base = OTHER; note = 2'-O-methylguanosine-3'-phosphate
  modified_base 6: mod_base = OTHER; note = 2'-O-methyluridine-3'-phosphate
  modified_base 7: mod_base = OTHER; note = 2'-fluorouridine-3'-phosphate
  modified_base 8: mod_base = OTHER; note = 2'-O-methylguanosine-3'-phosphate
  modified_base 9: mod_base = OTHER; note = 2'-fluorocytidine-3'-phosphate
  modified_base 10: mod_base = OTHER; note = 2'-fluoroadenosine-3'-phosphate
  modified_base 11: mod_base = OTHER; note = 2'-fluoroguanosine-3'-phosphate
  modified_base 12: mod_base = OTHER; note = 2'-O-methyluridine-3'-phosphate
  modified_base 13: mod_base = OTHER; note = 2'-O-methyladenosine-3'-phosphate
  modified_base 14: mod_base = OTHER; note = 2'-O-methyluridine-3'-phosphate
  modified_base 15: mod_base = OTHER; note = 2'-O-methylcytidine-3'-phosphate
  modified_base 16: mod_base = OTHER; note = 2'-O-methyluridine-3'-phosphate
  modified_base 17: mod_base = OTHER; note = 2'-O-methylguanosine-3'-phosphate
  modified_base 18: mod_base = OTHER; note = 2'-O-methyladenosine-3'-phosphate
  modified_base 19: mod_base = OTHER; note = 2'-O-methyladenosine-3'-phosphorothioate
  modified_base 20: mod_base = OTHER; note = 2'-O-methyladenosine-3'-phosphorothioate
  modified_base 21: mod_base = OTHER; note = 2'-O-methyladenosine-3'-phosphate
cctggttgcagtatctgaaaa

SEQ ID NO: 2346 - RNA, 21 nt, synthetic construct
  source 1..21: mol_type = other RNA
  modified_base 1: mod_base = OTHER; note = 2'-O-methyluridine-3'-phosphorothioate
  modified_base 2: mod_base = OTHER; note = 2'-O-methyladenosine-3'-phosphorothioate
  modified_base 3: mod_base = OTHER; note = 2'-O-methylguanosine-3'-phosphate
  modified_base 4: mod_base = OTHER; note = 2'-O-methyladenosine-3'-phosphate
  modified_base 5: mod_base = OTHER; note = 2'-O-methyladenosine-3'-phosphate
  modified_base 6: mod_base = OTHER; note = 2'-O-methyluridine-3'-phosphate
  modified_base 7: mod_base = OTHER; note = 2'-fluoroguanosine-3'-phosphate
  modified_base 8: mod_base = OTHER; note = 2'-O-methylguanosine-3'-phosphate
  modified_base 9: mod_base = OTHER; note = 2'-fluorouridine-3'-phosphate
  modified_base 10: mod_base = OTHER; note = 2'-fluorouridine-3'-phosphate
  modified_base 11: mod_base = OTHER; note = 2'-fluoroguanosine-3'-phosphate
  modified_base 12: mod_base = OTHER; note = 2'-O-methyluridine-3'-phosphate
  modified_base 13: mod_base = OTHER; note = 2'-O-methyluridine-3'-phosphate
  modified_base 14: mod_base = OTHER; note = 2'-O-methylguanosine-3'-phosphate
  modified_base 15: mod_base = OTHER; note = 2'-O-methyladenosine-3'-phosphate
  modified_base 16: mod_base = OTHER; note = 2'-O-methylguanosine-3'-phosphate
  modified_base 17: mod_base = OTHER; note = 2'-O-methylcytidine-3'-phosphate
  modified_base 18: mod_base = OTHER; note = 2'-O-methyluridine-3'-phosphate
  modified_base 19: mod_base = OTHER; note = 2'-O-methyladenosine-3'-phosphorothioate
  modified_base 20: mod_base = OTHER; note = 2'-O-methyladenosine-3'-phosphorothioate
  modified_base 21: mod_base = OTHER; note = 2'-O-methyladenosine-3'-phosphate
tagaatggttgttgagctaaa

SEQ ID NO: 2347 - RNA, 21 nt, synthetic construct
  source 1..21: mol_type = other RNA
  modified_base 1: mod_base = OTHER; note = 2'-O-methylcytidine-3'-phosphorothioate
  modified_base 2: mod_base = OTHER; note = 2'-O-methyluridine-3'-phosphorothioate
  modified_base 3: mod_base = OTHER; note = 2'-O-methylguanosine-3'-phosphate
  modified_base 4: mod_base = OTHER; note = 2'-O-methylguanosine-3'-phosphate
  modified_base 5: mod_base = OTHER; note = 2'-O-methylcytidine-3'-phosphate
  modified_base 6: mod_base = OTHER; note = 2'-O-methylcytidine-3'-phosphate
  modified_base 7: mod_base = OTHER; note = 2'-fluoroadenosine-3'-phosphate
  modified_base 8: mod_base = OTHER; note = 2'-O-methyluridine-3'-phosphate
  modified_base 9: mod_base = OTHER; note = 2'-fluorocytidine-3'-phosphate
  modified_base 10: mod_base = OTHER; note = 2'-fluoroadenosine-3'-phosphate
  modified_base 11: mod_base = OTHER; note = 2'-fluorouridine-3'-phosphate
  modified_base 12: mod_base = OTHER; note = 2'-O-methyluridine-3'-phosphate
  modified_base 13: mod_base = OTHER; note = 2'-O-methyladenosine-3'-phosphate
  modified_base 14: mod_base = OTHER; note = 2'-O-methyluridine-3'-phosphate
  modified_base 15: mod_base = OTHER; note = 2'-O-methyluridine-3'-phosphate
  modified_base 16: mod_base = OTHER; note = 2'-O-methyladenosine-3'-phosphate
  modified_base 17: mod_base = OTHER; note = 2'-O-methylcytidine-3'-phosphate
  modified_base 18: mod_base = OTHER; note = 2'-O-methyluridine-3'-phosphate
  modified_base 19: mod_base = OTHER; note = 2'-O-methylguanosine-3'-phosphorothioate
  modified_base 20: mod_base = OTHER; note = 2'-O-methyluridine-3'-phosphorothioate
  modified_base 21: mod_base = OTHER; note = 2'-O-methyladenosine-3'-phosphate
ctggccatcattattactgta

SEQ ID NO: 2348 - RNA, 21 nt, synthetic construct
  source 1..21: mol_type = other RNA
  modified_base 1: mod_base = OTHER; note = 2'-O-methyluridine-3'-phosphorothioate
  modified_base 2: mod_base = OTHER; note = 2'-O-methyluridine-3'-phosphorothioate
  modified_base 3: mod_base = OTHER; note = 2'-O-methylguanosine-3'-phosphate
  modified_base 4: mod_base = OTHER; note = 2'-O-methyladenosine-3'-phosphate
  modified_base 5: mod_base = OTHER; note = 2'-O-methylcytidine-3'-phosphate
  modified_base 6: mod_base = OTHER; note = 2'-O-methyladenosine-3'-phosphate
  modified_base 7: mod_base = OTHER; note = 2'-fluoroguanosine-3'-phosphate
  modified_base 8: mod_base = OTHER; note = 2'-O-methyladenosine-3'-phosphate
  modified_base 9: mod_base = OTHER; note = 2'-fluorouridine-3'-phosphate
  modified_base 10: mod_base = OTHER; note = 2'-fluoroadenosine-3'-phosphate
  modified_base 11: mod_base = OTHER; note = 2'-fluoroadenosine-3'-phosphate
  modified_base 12: mod_base = OTHER; note = 2'-O-methyladenosine-3'-phosphate
  modified_base 13: mod_base = OTHER; note = 2'-O-methyladenosine-3'-phosphate
  modified_base 14: mod_base = OTHER; note = 2'-O-methyluridine-3'-phosphate
  modified_base 15: mod_base = OTHER; note = 2'-O-methyladenosine-3'-phosphate
  modified_base 16: mod_base = OTHER; note = 2'-O-methylcytidine-3'-phosphate
  modified_base 17: mod_base = OTHER; note = 2'-O-methylguanosine-3'-phosphate
  modified_base 18: mod_base = OTHER; note = 2'-O-methyladenosine-3'-phosphate
  modified_base 19: mod_base = OTHER; note = 2'-O-methyladenosine-3'-phosphorothioate
  modified_base 20: mod_base = OTHER; note = 2'-O-methylguanosine-3'-phosphorothioate
  modified_base 21: mod_base = OTHER; note = 2'-O-methyladenosine-3'-phosphate
ttgacagataaaatacgaaga

SEQ ID NO: 2349 - RNA, 21 nt, synthetic construct
  source 1..21: mol_type = other RNA
  modified_base 1: mod_base = OTHER; note = 2'-O-methyluridine-3'-phosphorothioate
  modified_base 2: mod_base = OTHER; note = 2'-O-methylcytidine-3'-phosphorothioate
  modified_base 3: mod_base = OTHER; note = 2'-O-methyladenosine-3'-phosphate
  modified_base 4: mod_base = OTHER; note = 2'-O-methylcytidine-3'-phosphate
  modified_base 5: mod_base = OTHER; note = 2'-O-methyladenosine-3'-phosphate
  modified_base 6: mod_base = OTHER; note = 2'-O-methyladenosine-3'-phosphate
  modified_base 7: mod_base = OTHER; note = 2'-fluoroadenosine-3'-phosphate
  modified_base 8: mod_base = OTHER; note = 2'-O-methylcytidine-3'-phosphate
  modified_base 9: mod_base = OTHER; note = 2'-fluoroadenosine-3'-phosphate
  modified_base 10: mod_base = OTHER; note = 2'-fluorocytidine-3'-phosphate
  modified_base 11: mod_base = OTHER; note = 2'-fluoroadenosine-3'-phosphate
  modified_base 12: mod_base = OTHER; note = 2'-O-methyluridine-3'-phosphate
  modified_base 13: mod_base = OTHER; note = 2'-O-methylcytidine-3'-phosphate
  modified_base 14: mod_base = OTHER; note = 2'-O-methyladenosine-3'-phosphate
  modified_base 15: mod_base = OTHER; note = 2'-O-methyluridine-3'-phosphate
  modified_base 16: mod_base = OTHER; note = 2'-O-methyluridine-3'-phosphate
  modified_base 17: mod_base = OTHER; note = 2'-O-methyladenosine-3'-phosphate
  modified_base 18: mod_base = OTHER; note = 2'-O-methylcytidine-3'-phosphate
  modified_base 19: mod_base = OTHER; note = 2'-O-methyladenosine-3'-phosphorothioate
  modified_base 20: mod_base = OTHER; note = 2'-O-methyladenosine-3'-phosphorothioate
  modified_base 21: mod_base = OTHER; note = 2'-O-methyladenosine-3'-phosphate
tcacaaacacatcattacaaa

SEQ ID NO: 2350 - RNA, 21 nt, synthetic construct
  source 1..21: mol_type = other RNA
  modified_base 1: mod_base = OTHER; note = 2'-O-methylcytidine-3'-phosphorothioate
  modified_base 2: mod_base = OTHER; note = 2'-O-methylcytidine-3'-phosphorothioate
  modified_base 3: mod_base = OTHER; note = 2'-O-methyladenosine-3'-phosphate
  modified_base 4: mod_base = OTHER; note = 2'-O-methyluridine-3'-phosphate
  modified_base 5: mod_base = OTHER; note = 2'-O-methylguanosine-3'-phosphate
  modified_base 6: mod_base = OTHER; note = 2'-O-methyladenosine-3'-phosphate
  modified_base 7: mod_base = OTHER; note = 2'-fluorouridine-3'-phosphate
  modified_base 8: mod_base = OTHER; note = 2'-O-methyluridine-3'-phosphate
  modified_base 9: mod_base = OTHER; note = 2'-fluoroguanosine-3'-phosphate
  modified_base 10: mod_base = OTHER; note = 2'-fluorouridine-3'-phosphate
  modified_base 11: mod_base = OTHER; note = 2'-fluoroadenosine-3'-phosphate
  modified_base 12: mod_base = OTHER; note = 2'-O-methyluridine-3'-phosphate
  modified_base 13: mod_base = OTHER; note = 2'-O-methylguanosine-3'-phosphate
  modified_base 14: mod_base = OTHER; note = 2'-O-methyladenosine-3'-phosphate
  modified_base 15: mod_base = OTHER; note = 2'-O-methyladenosine-3'-phosphate
  modified_base 16: mod_base = OTHER; note = 2'-O-methyladenosine-3'-phosphate
  modified_base 17: mod_base = OTHER; note = 2'-O-methyladenosine-3'-phosphate
  modified_base 18: mod_base = OTHER; note = 2'-O-methyluridine-3'-phosphate
  modified_base 19: mod_base = OTHER; note = 2'-O-methyladenosine-3'-phosphorothioate
  modified_base 20: mod_base = OTHER; note = 2'-O-methylguanosine-3'-phosphorothioate
  modified_base 21: mod_base = OTHER; note = 2'-O-methyladenosine-3'-phosphate
ccatgattgtatgaaaataga

SEQ ID NO: 2351 - RNA, 21 nt, synthetic construct
  source 1..21: mol_type = other RNA
  modified_base 1: mod_base = OTHER; note = 2'-O-methylcytidine-3'-phosphorothioate
  modified_base 2: mod_base = OTHER; note = 2'-O-methyladenosine-3'-phosphorothioate
  modified_base 3: mod_base = OTHER; note = 2'-O-methylcytidine-3'-phosphate
  modified_base 4: mod_base = OTHER; note = 2'-O-methyladenosine-3'-phosphate
  modified_base 5: mod_base = OTHER; note = 2'-O-methylguanosine-3'-phosphate
  modified_base 6: mod_base = OTHER; note = 2'-O-methyladenosine-3'-phosphate
  modified_base 7: mod_base = OTHER; note = 2'-fluoroguanosine-3'-phosphate
  modified_base 8: mod_base = OTHER; note = 2'-O-methyluridine-3'-phosphate
  modified_base 9: mod_base = OTHER; note = 2'-fluoroadenosine-3'-phosphate
  modified_base 10: mod_base = OTHER; note = 2'-fluoroadenosine-3'-phosphate
  modified_base 11: mod_base = OTHER; note = 2'-fluorouridine-3'-phosphate
  modified_base 12: mod_base = OTHER; note = 2'-O-methylguanosine-3'-phosphate
  modified_base 13: mod_base = OTHER; note = 2'-O-methyladenosine-3'-phosphate
  modified_base 14: mod_base = OTHER; note = 2'-O-methyladenosine-3'-phosphate
  modified_base 15: mod_base = OTHER; note = 2'-O-methyluridine-3'-phosphate
  modified_base 16: mod_base = OTHER; note = 2'-O-methyladenosine-3'-phosphate
  modified_base 17: mod_base = OTHER; note = 2'-O-methyluridine-3'-phosphate
  modified_base 18: mod_base = OTHER; note = 2'-O-methyluridine-3'-phosphate
  modified_base 19: mod_base = OTHER; note = 2'-O-methyluridine-3'-phosphorothioate
  modified_base 20: mod_base = OTHER; note = 2'-O-methyladenosine-3'-phosphorothioate
  modified_base 21: mod_base = OTHER; note = 2'-O-methyladenosine-3'-phosphate
cacagagtaatgaatatttaa

SEQ ID NO: 2352 - RNA, 21 nt, synthetic construct
  source 1..21: mol_type = other RNA
  modified_base 1: mod_base = OTHER; note = 2'-O-methyladenosine-3'-phosphorothioate
  modified_base 2: mod_base = OTHER; note = 2'-O-methylguanosine-3'-phosphorothioate
  modified_base 3: mod_base = OTHER; note = 2'-O-methylcytidine-3'-phosphate
  modified_base 4: mod_base = OTHER; note = 2'-O-methyluridine-3'-phosphate
  modified_base 5: mod_base = OTHER; note = 2'-O-methylguanosine-3'-phosphate
  modified_base 6: mod_base = OTHER; note = 2'-O-methylcytidine-3'-phosphate
  modified_base 7: mod_base = OTHER; note = 2'-fluorouridine-3'-phosphate
  modified_base 8: mod_base = OTHER; note = 2'-O-methyluridine-3'-phosphate
  modified_base 9: mod_base = OTHER; note = 2'-fluoroadenosine-3'-phosphate
  modified_base 10: mod_base = OTHER; note = 2'-fluoroguanosine-3'-phosphate
  modified_base 11: mod_base = OTHER; note = 2'-fluorouridine-3'-phosphate
  modified_base 12: mod_base = OTHER; note = 2'-O-methylguanosine-3'-phosphate
  modified_base 13: mod_base = OTHER; note = 2'-O-methylguanosine-3'-phosphate
  modified_base 14: mod_base = OTHER; note = 2'-O-methyladenosine-3'-phosphate
  modified_base 15: mod_base = OTHER; note = 2'-O-methyladenosine-3'-phosphate
  modified_base 16: mod_base = OTHER; note = 2'-O-methylguanosine-3'-phosphate
  modified_base 17: mod_base = OTHER; note = 2'-O-methyladenosine-3'-phosphate
  modified_base 18: mod_base = OTHER; note = 2'-O-methyluridine-3'-phosphate
  modified_base 19: mod_base = OTHER; note = 2'-O-methylguanosine-3'-phosphorothioate
  modified_base 20: mod_base = OTHER; note = 2'-O-methyluridine-3'-phosphorothioate
  modified_base 21: mod_base = OTHER; note = 2'-O-methyladenosine-3'-phosphate
agctgcttagtggaagatgta

SEQ ID NO: 2353 - RNA, 21 nt, synthetic construct
  source 1..21: mol_type = other RNA
  modified_base 1: mod_base = OTHER; note = 2'-O-methyluridine-3'-phosphorothioate
  modified_base 2: mod_base = OTHER; note = 2'-O-methyladenosine-3'-phosphorothioate
  modified_base 3: mod_base = OTHER; note = 2'-O-methylguanosine-3'-phosphate
  modified_base 4: mod_base = OTHER; note = 2'-O-methylcytidine-3'-phosphate
  modified_base 5: mod_base = OTHER; note = 2'-O-methyluridine-3'-phosphate
  modified_base 6: mod_base = OTHER; note = 2'-O-methylcytidine-3'-phosphate
  modified_base 7: mod_base = OTHER; note = 2'-fluorouridine-3'-phosphate
  modified_base 8: mod_base = OTHER; note = 2'-O-methylguanosine-3'-phosphate
  modified_base 9: mod_base = OTHER; note = 2'-fluorouridine-3'-phosphate
  modified_base 10: mod_base = OTHER; note = 2'-fluoroguanosine-3'-phosphate
  modified_base 11: mod_base = OTHER; note = 2'-fluorouridine-3'-phosphate
  modified_base 12: mod_base = OTHER; note = 2'-O-methylguanosine-3'-phosphate
  modified_base 13: mod_base = OTHER; note = 2'-O-methylcytidine-3'-phosphate
  modified_base 14: mod_base = OTHER; note = 2'-O-methyluridine-3'-phosphate
  modified_base 15: mod_base = OTHER; note = 2'-O-methylguanosine-3'-phosphate
  modified_base 16: mod_base = OTHER; note = 2'-O-methyladenosine-3'-phosphate
  modified_base 17: mod_base = OTHER; note = 2'-O-methyluridine-3'-phosphate
  modified_base 18: mod_base = OTHER; note = 2'-O-methyladenosine-3'-phosphate
  modified_base 19: mod_base = OTHER; note = 2'-O-methylcytidine-3'-phosphorothioate
  modified_base 20: mod_base = OTHER; note = 2'-O-methylcytidine-3'-phosphorothioate
  modified_base 21: mod_base = OTHER; note = 2'-O-methyladenosine-3'-phosphate
tagctctgtgtgctgatacca

SEQ ID NO: 2354 - RNA, 21 nt, synthetic construct
  source 1..21: mol_type = other RNA
  modified_base 1: mod_base = OTHER; note = 2'-O-methylcytidine-3'-phosphorothioate
  modified_base 2: mod_base = OTHER; note = 2'-O-methyladenosine-3'-phosphorothioate
  modified_base 3: mod_base = OTHER; note = 2'-O-methyluridine-3'-phosphate
  modified_base 4: mod_base = OTHER; note = 2'-O-methyluridine-3'-phosphate
  modified_base 5: mod_base = OTHER; note = 2'-O-methylcytidine-3'-phosphate
  modified_base 6: mod_base = OTHER; note = 2'-O-methylguanosine-3'-phosphate
  modified_base 7: mod_base = OTHER; note = 2'-fluoroadenosine-3'-phosphate
  modified_base 8: mod_base = OTHER; note = 2'-O-methylguanosine-3'-phosphate
  modified_base 9: mod_base = OTHER; note = 2'-fluoroadenosine-3'-phosphate
  modified_base 10: mod_base = OTHER; note = 2'-fluoroguanosine-3'-phosphate
  modified_base 11: mod_base = OTHER; note = 2'-fluoroadenosine-3'-phosphate
  modified_base 12: mod_base = OTHER; note = 2'-O-methyladenosine-3'-phosphate
  modified_base 13: mod_base = OTHER; note = 2'-O-methyluridine-3'-phosphate
  modified_base 14: mod_base = OTHER; note = 2'-O-methyladenosine-3'-phosphate
  modified_base 15: mod_base = OTHER; note = 2'-O-methyluridine-3'-phosphate
  modified_base 16: mod_base = OTHER; note = 2'-O-methylguanosine-3'-phosphate
  modified_base 17: mod_base = OTHER; note = 2'-O-methyladenosine-3'-phosphate
  modified_base 18: mod_base = OTHER; note = 2'-O-methylguanosine-3'-phosphate
  modified_base 19: mod_base = OTHER; note = 2'-O-methylcytidine-3'-phosphorothioate
  modified_base 20: mod_base = OTHER; note = 2'-O-methyluridine-3'-phosphorothioate
  modified_base 21: mod_base = OTHER; note = 2'-O-methyladenosine-3'-phosphate
cattcgagagaatatgagcta

SEQ ID NO: 2355 - RNA, 21 nt, synthetic construct
  source 1..21: mol_type = other RNA
  modified_base 1: mod_base = OTHER; note = 2'-O-methyladenosine-3'-phosphorothioate
  modified_base 2: mod_base = OTHER; note = 2'-O-methyluridine-3'-phosphorothioate
  modified_base 3: mod_base = OTHER; note = 2'-O-methylguanosine-3'-phosphate
  modified_base 4: mod_base = OTHER; note = 2'-O-methylcytidine-3'-phosphate
  modified_base 5: mod_base = OTHER; note = 2'-O-methyladenosine-3'-phosphate
  modified_base 6: mod_base = OTHER; note = 2'-O-methyluridine-3'-phosphate
  modified_base 7: mod_base = OTHER; note = 2'-fluorouridine-3'-phosphate
  modified_base 8: mod_base = OTHER; note = 2'-O-methyluridine-3'-phosphate
  modified_base 9: mod_base = OTHER; note = 2'-fluorouridine-3'-phosphate
  modified_base 10: mod_base = OTHER; note = 2'-fluorocytidine-3'-phosphate
  modified_base 11: mod_base = OTHER; note = 2'-fluorouridine-3'-phosphate
  modified_base 12: mod_base = OTHER; note = 2'-O-methylguanosine-3'-phosphate
  modified_base 13: mod_base = OTHER; note = 2'-O-methyladenosine-3'-phosphate
  modified_base 14: mod_base = OTHER; note = 2'-O-methyladenosine-3'-phosphate
  modified_base 15: mod_base = OTHER; note = 2'-O-methyladenosine-3'-phosphate
  modified_base 16: mod_base = OTHER; note = 2'-O-methyladenosine-3'-phosphate
  modified_base 17: mod_base = OTHER; note = 2'-O-methyluridine-3'-phosphate
  modified_base 18: mod_base = OTHER; note = 2'-O-methylguanosine-3'-phosphate
  modified_base 19: mod_base = OTHER; note = 2'-O-methyluridine-3'-phosphorothioate
  modified_base 20: mod_base = OTHER; note = 2'-O-methyladenosine-3'-phosphorothioate
  modified_base 21: mod_base = OTHER; note = 2'-O-methyladenosine-3'-phosphate
atgcattttctgaaaatgtaa

SEQ ID NO: 2356 - RNA, 21 nt, synthetic construct
  source 1..21: mol_type = other RNA
  modified_base 1: mod_base = OTHER; note = 2'-O-methylguanosine-3'-phosphorothioate
  modified_base 2: mod_base = OTHER; note = 2'-O-methyluridine-3'-phosphorothioate
  modified_base 3: mod_base = OTHER; note = 2'-O-methyluridine-3'-phosphate
  modified_base 4: mod_base = OTHER; note = 2'-O-methyluridine-3'-phosphate
  modified_base 5: mod_base = OTHER; note = 2'-O-methylcytidine-3'-phosphate
  modified_base 6: mod_base = OTHER; note = 2'-O-methylguanosine-3'-phosphate
  modified_base 7: mod_base = OTHER; note = 2'-fluoroadenosine-3'-phosphate
  modified_base 8: mod_base = OTHER; note = 2'-O-methylcytidine-3'-phosphate
  modified_base 9: mod_base = OTHER; note = 2'-fluorocytidine-3'-phosphate
  modified_base 10: mod_base = OTHER; note = 2'-fluoroadenosine-3'-phosphate
  modified_base 11: mod_base = OTHER; note = 2'-fluoroadenosine-3'-phosphate
  modified_base 12: mod_base = OTHER; note = 2'-O-methylguanosine-3'-phosphate
  modified_base 13: mod_base = OTHER; note = 2'-O-methyluridine-3'-phosphate
  modified_base 14: mod_base = OTHER; note = 2'-O-methyladenosine-3'-phosphate
  modified_base 15: mod_base = OTHER; note = 2'-O-methyluridine-3'-phosphate
  modified_base 16: mod_base = OTHER; note = 2'-O-methylcytidine-3'-phosphate
  modified_base 17: mod_base = OTHER; note = 2'-O-methylcytidine-3'-phosphate
  modified_base 18: mod_base = OTHER; note = 2'-O-methylcytidine-3'-phosphate
  modified_base 19: mod_base = OTHER; note = 2'-O-methyladenosine-3'-phosphorothioate
  modified_base 20: mod_base = OTHER; note = 2'-O-methyladenosine-3'-phosphorothioate
  modified_base 21: mod_base = OTHER; note = 2'-O-methyladenosine-3'-phosphate
gtttcgaccaagtatcccaaa

SEQ ID NO: 2357 - RNA, 21 nt, synthetic construct
  source 1..21: mol_type = other RNA
  modified_base 1: mod_base = OTHER; note = 2'-O-methyluridine-3'-phosphorothioate
  modified_base 2: mod_base = OTHER; note = 2'-O-methylcytidine-3'-phosphorothioate
  modified_base 3: mod_base = OTHER; note = 2'-O-methyluridine-3'-phosphate
  modified_base 4: mod_base = OTHER; note = 2'-O-methyluridine-3'-phosphate
  modified_base 5: mod_base = OTHER; note = 2'-O-methylguanosine-3'-phosphate
  modified_base 6: mod_base = OTHER; note = 2'-O-methylcytidine-3'-phosphate
  modified_base 7: mod_base = OTHER; note = 2'-fluorouridine-3'-phosphate
  modified_base 8: mod_base = OTHER; note = 2'-O-methyluridine-3'-phosphate
  modified_base 9: mod_base = OTHER; note = 2'-fluoroguanosine-3'-phosphate
  modified_base 10: mod_base = OTHER; note = 2'-fluorocytidine-3'-phosphate
  modified_base 11: mod_base = OTHER; note = 2'-fluorocytidine-3'-phosphate
  modified_base 12: mod_base = OTHER; note = 2'-O-methyladenosine-3'-phosphate
  modified_base 13: mod_base = OTHER; note = 2'-O-methylcytidine-3'-phosphate
  modified_base 14: mod_base = OTHER; note = 2'-O-methyladenosine-3'-phosphate
  modified_base 15: mod_base = OTHER; note = 2'-O-methyladenosine-3'-phosphate
  modified_base 16: mod_base = OTHER; note = 2'-O-methyluridine-3'-phosphate
  modified_base 17: mod_base = OTHER; note = 2'-O-methyladenosine-3'-phosphate
  modified_base 18: mod_base = OTHER; note = 2'-O-methyluridine-3'-phosphate
  modified_base 19: mod_base = OTHER; note = 2'-O-methylcytidine-3'-phosphorothioate
  modified_base 20: mod_base = OTHER; note = 2'-O-methylguanosine-3'-phosphorothioate
  modified_base 21: mod_base = OTHER; note = 2'-O-methyladenosine-3'-phosphate
tcttgcttgccacaatatcga

SEQ ID NO: 2358 - RNA, 21 nt, synthetic construct
  source 1..21: mol_type = other RNA
  modified_base 1: mod_base = OTHER; note = 2'-O-methylguanosine-3'-phosphorothioate
  modified_base 2: mod_base = OTHER; note = 2'-O-methylguanosine-3'-phosphorothioate
  modified_base 3: mod_base = OTHER; note = 2'-O-methylguanosine-3'-phosphate
  modified_base 4: mod_base = OTHER; note = 2'-O-methyluridine-3'-phosphate
  modified_base 5: mod_base = OTHER; note = 2'-O-methyladenosine-3'-phosphate
  modified_base 6: mod_base = OTHER; note = 2'-O-methylcytidine-3'-phosphate
  modified_base 7: mod_base = OTHER; note = 2'-fluoroadenosine-3'-phosphate
  modified_base 8: mod_base = OTHER; note = 2'-O-methyladenosine-3'-phosphate
  modified_base 9: mod_base = OTHER; note = 2'-fluoroguanosine-3'-phosphate
  modified_base 10: mod_base = OTHER; note = 2'-fluoroadenosine-3'-phosphate
  modified_base 11: mod_base = OTHER; note = 2'-fluoroguanosine-3'-phosphate
  modified_base 12: mod_base = OTHER; note = 2'-O-methylguanosine-3'-phosphate
  modified_base 13: mod_base = OTHER; note = 2'-O-methylguanosine-3'-phosphate
  modified_base 14: mod_base = OTHER; note = 2'-O-methyladenosine-3'-phosphate
  modified_base 15: mod_base = OTHER; note = 2'-O-methyladenosine-3'-phosphate
  modified_base 16: mod_base = OTHER; note = 2'-O-methyluridine-3'-phosphate
  modified_base 17: mod_base = OTHER; note = 2'-O-methyladenosine-3'-phosphate
  modified_base 18: mod_base = OTHER; note = 2'-O-methylcytidine-3'-phosphate
  modified_base 19: mod_base = OTHER; note = 2'-O-methyladenosine-3'-phosphorothioate
  modified_base 20: mod_base = OTHER; note = 2'-O-methyladenosine-3'-phosphorothioate
  modified_base 21: mod_base = OTHER; note = 2'-O-methyladenosine-3'-phosphate
gggtacaagagggaatacaaa

SEQ ID NO: 2359 - RNA, 21 nt, synthetic construct
  source 1..21: mol_type = other RNA
  modified_base 1: mod_base = OTHER; note = 2'-O-methylguanosine-3'-phosphorothioate
  modified_base 2: mod_base = OTHER; note = 2'-O-methylguanosine-3'-phosphorothioate
  modified_base 3: mod_base = OTHER; note = 2'-O-methyluridine-3'-phosphate
  modified_base 4: mod_base = OTHER; note = 2'-O-methylguanosine-3'-phosphate
  modified_base 5: mod_base = OTHER; note = 2'-O-methyladenosine-3'-phosphate
  modified_base 6: mod_base = OTHER; note = 2'-O-methyluridine-3'-phosphate
  modified_base 7: mod_base = OTHER; note = 2'-fluorocytidine-3'-phosphate
  modified_base 8: mod_base = OTHER; note = 2'-O-methyladenosine-3'-phosphate
  modified_base 9: mod_base = OTHER; note = 2'-fluoroadenosine-3'-phosphate
  modified_base 10: mod_base = OTHER; note = 2'-fluoroadenosine-3'-phosphate
  modified_base 11: mod_base = OTHER; note = 2'-fluorouridine-3'-phosphate
  modified_base 12: mod_base = OTHER; note = 2'-O-methylcytidine-3'-phosphate
  modified_base 13: mod_base = OTHER; note = 2'-O-methylcytidine-3'-phosphate
  modified_base 14: mod_base = OTHER; note = 2'-O-methyluridine-3'-phosphate
  modified_base 15: mod_base = OTHER; note = 2'-O-methylguanosine-3'-phosphate
  modified_base 16: mod_base = OTHER; note = 2'-O-methyluridine-3'-phosphate
  modified_base 17: mod_base = OTHER; note = 2'-O-methylguanosine-3'-phosphate
  modified_base 18: mod_base = OTHER; note = 2'-O-methyluridine-3'-phosphate
  modified_base 19: mod_base = OTHER; note = 2'-O-methylcytidine-3'-phosphorothioate
  modified_base 20: mod_base = OTHER; note = 2'-O-methyluridine-3'-phosphorothioate
  modified_base 21: mod_base = OTHER; note = 2'-O-methyladenosine-3'-phosphate
ggtgatcaaatcctgtgtcta

SEQ ID NO: 2360 - RNA, 21 nt, synthetic construct
  source 1..21: mol_type = other RNA
  modified_base 1: mod_base = OTHER; note = 2'-O-methylcytidine-3'-phosphorothioate
  modified_base 2: mod_base = OTHER; note = 2'-O-methyladenosine-3'-phosphorothioate
  modified_base 3: mod_base = OTHER; note = 2'-O-methylguanosine-3'-phosphate
  modified_base 4: mod_base = OTHER; note = 2'-O-methyluridine-3'-phosphate
  modified_base 5: mod_base = OTHER; note = 2'-O-methylguanosine-3'-phosphate
  modified_base 6: mod_base = OTHER; note = 2'-O-methylguanosine-3'-phosphate
  modified_base 7: mod_base = OTHER; note = 2'-fluoroguanosine-3'-phosphate
  modified_base 8: mod_base = OTHER; note = 2'-O-methyluridine-3'-phosphate
  modified_base 9: mod_base = OTHER; note = 2'-fluorouridine-3'-phosphate
  modified_base 10: mod_base = OTHER; note = 2'-fluorouridine-3'-phosphate
  modified_base 11: mod_base = OTHER; note = 2'-fluorocytidine-3'-phosphate
  modified_base 12: mod_base = OTHER; note = 2'-O-methyluridine-3'-phosphate
  modified_base 13: mod_base = OTHER; note = 2'-O-methyladenosine-3'-phosphate
  modified_base 14: mod_base = OTHER; note = 2'-O-methylguanosine-3'-phosphate
  modified_base 15: mod_base = OTHER; note = 2'-O-methylguanosine-3'-phosphate
  modified_base 16: mod_base = OTHER; note = 2'-O-methyladenosine-3'-phosphate
  modified_base 17: mod_base = OTHER; note = 2'-O-methyluridine-3'-phosphate
  modified_base 18: mod_base = OTHER; note = 2'-O-methyladenosine-3'-phosphate
  modified_base 19: mod_base = OTHER; note = 2'-O-methylguanosine-3'-phosphorothioate
  modified_base 20: mod_base = OTHER; note = 2'-O-methylguanosine-3'-phosphorothioate
  modified_base 21: mod_base = OTHER; note = 2'-O-methyladenosine-3'-phosphate
cagtgggtttctaggatagga

SEQ ID NO: 2361 - RNA, 21 nt, synthetic construct
  source 1..21: mol_type = other RNA
  modified_base 1: mod_base = OTHER; note = 2'-O-methyladenosine-3'-phosphorothioate
  modified_base 2: mod_base = OTHER; note = 2'-O-methyladenosine-3'-phosphorothioate
  modified_base 3: mod_base = OTHER; note = 2'-O-methylcytidine-3'-phosphate
  modified_base 4: mod_base = OTHER; note = 2'-O-methyluridine-3'-phosphate
  modified_base 5: mod_base = OTHER; note = 2'-O-methyladenosine-3'-phosphate
  modified_base 6: mod_base = OTHER; note = 2'-O-methyladenosine-3'-phosphate
  modified_base 7: mod_base = OTHER; note = 2'-fluoroguanosine-3'-phosphate
  modified_base 8: mod_base = OTHER; note = 2'-O-methyluridine-3'-phosphate
  modified_base 9: mod_base = OTHER; note = 2'-fluoroadenosine-3'-phosphate
  modified_base 10: mod_base = OTHER; note = 2'-fluorouridine-3'-phosphate
  modified_base 11: mod_base = OTHER; note = 2'-fluorouridine-3'-phosphate
  modified_base 12: mod_base = OTHER; note = 2'-O-methyluridine-3'-phosphate
  modified_base 13: mod_base = OTHER; note = 2'-O-methyluridine-3'-phosphate
  modified_base 14: mod_base = OTHER; note = 2'-O-methyluridine-3'-phosphate
  modified_base 15: mod_base = OTHER; note = 2'-O-methyladenosine-3'-phosphate
  modified_base 16: mod_base = OTHER; note = 2'-O-methyladenosine-3'-phosphate
  modified_base 17: mod_base = OTHER; note = 2'-O-methylguanosine-3'-phosphate
  modified_base 18: mod_base = OTHER; note = 2'-O-methylguanosine-3'-phosphate
  modified_base 19: mod_base = OTHER; note = 2'-O-methyladenosine-3'-phosphorothioate
  modified_base 20: mod_base = OTHER; note = 2'-O-methylcytidine-3'-phosphorothioate
  modified_base 21: mod_base = OTHER; note = 2'-O-methyladenosine-3'-phosphate
aactaagtatttttaaggaca

SEQ ID NO: 2362 - RNA, 21 nt, synthetic construct
  source 1..21: mol_type = other RNA
  modified_base 1: mod_base = OTHER; note = 2'-O-methylcytidine-3'-phosphorothioate
  modified_base 2: mod_base = OTHER; note = 2'-O-methyladenosine-3'-phosphorothioate
  modified_base 3: mod_base = OTHER; note = 2'-O-methyluridine-3'-phosphate
  modified_base 4: mod_base = OTHER; note = 2'-O-methyladenosine-3'-phosphate
  modified_base 5: mod_base = OTHER; note = 2'-O-methyladenosine-3'-phosphate
  modified_base 6: mod_base = OTHER; note = 2'-O-methyluridine-3'-phosphate
  modified_base 7: mod_base = OTHER; note = 2'-fluoroguanosine-3'-phosphate
  modified_base 8: mod_base = OTHER; note = 2'-O-methyluridine-3'-phosphate
  modified_base 9: mod_base = OTHER; note = 2'-fluoroguanosine-3'-phosphate
  modified_base 10: mod_base = OTHER; note = 2'-fluoroadenosine-3'-phosphate
  modified_base 11: mod_base = OTHER; note = 2'-fluorouridine-3'-phosphate
  modified_base 12: mod_base = OTHER; note = 2'-O-methyluridine-3'-phosphate
  modified_base 13: mod_base = OTHER; note = 2'-O-methylguanosine-3'-phosphate
  modified_base 14: mod_base = OTHER; note = 2'-O-methyluridine-3'-phosphate
  modified_base 15: mod_base = OTHER; note = 2'-O-methyluridine-3'-phosphate
  modified_base 16: mod_base = OTHER; note = 2'-O-methyladenosine-3'-phosphate
  modified_base 17: mod_base = OTHER; note = 2'-O-methyladenosine-3'-phosphate
  modified_base 18: mod_base = OTHER; note = 2'-O-methyladenosine-3'-phosphate
  modified_base 19: mod_base = OTHER; note = 2'-O-methyluridine-3'-phosphorothioate
  modified_base 20: mod_base = OTHER; note = 2'-O-methyluridine-3'-phosphorothioate
  modified_base 21: mod_base = OTHER; note = 2'-O-methyladenosine-3'-phosphate
cataatgtgattgttaaatta

SEQ ID NO: 2363 - RNA, 21 nt, synthetic construct
  source 1..21: mol_type = other RNA
  modified_base 1: mod_base = OTHER; note = 2'-O-methylguanosine-3'-phosphorothioate
  modified_base 2: mod_base = OTHER; note = 2'-O-methyladenosine-3'-phosphorothioate
  modified_base 3: mod_base = OTHER; note = 2'-O-methylguanosine-3'-phosphate
  modified_base 4: mod_base = OTHER; note = 2'-O-methyladenosine-3'-phosphate
  modified_base 5: mod_base = OTHER; note = 2'-O-methyladenosine-3'-phosphate
  modified_base 6: mod_base = OTHER; note = 2'-O-methylguanosine-3'-phosphate
  modified_base 7: mod_base = OTHER; note = 2'-fluoroadenosine-3'-phosphate
  modified_base 8: mod_base = OTHER; note = 2'-O-methyladenosine-3'-phosphate
  modified_base 9: mod_base = OTHER; note = 2'-fluorouridine-3'-phosphate
  modified_base 10: mod_base = OTHER; note = 2'-fluorouridine-3'-phosphate
  modified_base 11: mod_base = OTHER; note = 2'-fluoroadenosine-3'-phosphate
  modified_base 12: mod_base = OTHER; note = 2'-O-methyladenosine-3'-phosphate
  modified_base 13: mod_base = OTHER; note = 2'-O-methylguanosine-3'-phosphate
  modified_base 14: mod_base = OTHER; note = 2'-O-methyladenosine-3'-phosphate
  modified_base 15: mod_base = OTHER; note = 2'-O-methyladenosine-3'-phosphate
  modified_base 16: mod_base = OTHER; note = 2'-O-methyladenosine-3'-phosphate
  modified_base 17: mod_base = OTHER; note = 2'-O-methyladenosine-3'-phosphate
  modified_base 18: mod_base = OTHER; note = 2'-O-methylcytidine-3'-phosphate
  modified_base 19: mod_base = OTHER; note = 2'-O-methyluridine-3'-phosphorothioate
  modified_base 20: mod_base = OTHER; note = 2'-O-methylcytidine-3'-phosphorothioate
  modified_base 21: mod_base = OTHER; note = 2'-O-methyladenosine-3'-phosphate
gagaagaattaagaaaactca

SEQ ID NO: 2364 - RNA, 21 nt, synthetic construct
  source 1..21: mol_type = other RNA
  modified_base 1: mod_base = OTHER; note = 2'-O-methylguanosine-3'-phosphorothioate
  modified_base 2: mod_base = OTHER; note = 2'-O-methyladenosine-3'-phosphorothioate
  modified_base 3: mod_base = OTHER; note = 2'-O-methyladenosine-3'-phosphate
  modified_base 4: mod_base = OTHER; note = 2'-O-methylguanosine-3'-phosphate
  modified_base 5: mod_base = OTHER; note = 2'-O-methyladenosine-3'-phosphate
  modified_base 6: mod_base = OTHER; note = 2'-O-methylguanosine-3'-phosphate
  modified_base 7: mod_base = OTHER; note = 2'-fluoroadenosine-3'-phosphate
  modified_base 8: mod_base = OTHER; note = 2'-O-methyladenosine-3'-phosphate
  modified_base 9: mod_base = OTHER; note = 2'-fluoroadenosine-3'-phosphate
  modified_base 10: mod_base = OTHER; note = 2'-fluorouridine-3'-phosphate
  modified_base 11: mod_base = OTHER; note = 2'-fluorouridine-3'-phosphate
  modified_base 12: mod_base = OTHER; note = 2'-O-methylguanosine-3'-phosphate
  modified_base 13: mod_base = OTHER; note = 2'-O-methyladenosine-3'-phosphate
  modified_base 14: mod_base = OTHER; note = 2'-O-methyluridine-3'-phosphate
  modified_base 15: mod_base = OTHER; note = 2'-O-methyluridine-3'-phosphate
  modified_base 16: mod_base = OTHER; note = 2'-O-methylguanosine-3'-phosphate
  modified_base 17: mod_base = OTHER; note = 2'-O-methyluridine-3'-phosphate
  modified_base 18: mod_base = OTHER; note = 2'-O-methyluridine-3'-phosphate
  modified_base 19: mod_base = OTHER; note = 2'-O-methyluridine-3'-phosphorothioate
  modified_base 20: mod_base = OTHER; note = 2'-O-methyladenosine-3'-phosphorothioate
  modified_base 21: mod_base = OTHER; note = 2'-O-methyladenosine-3'-phosphate
gaagagaaattgattgtttaa

SEQ ID NO: 2365 - RNA, 21 nt, synthetic construct
  source 1..21: mol_type = other RNA
  modified_base 1: mod_base = OTHER; note = 2'-O-methyladenosine-3'-phosphorothioate
  modified_base 2: mod_base = OTHER; note = 2'-O-methylguanosine-3'-phosphorothioate
  modified_base 3: mod_base = OTHER; note = 2'-O-methyluridine-3'-phosphate
  modified_base 4: mod_base = OTHER; note = 2'-O-methylguanosine-3'-phosphate
  modified_base 5: mod_base = OTHER; note = 2'-O-methyluridine-3'-phosphate
  modified_base 6: mod_base = OTHER; note = 2'-O-methylguanosine-3'-phosphate
  modified_base 7: mod_base = OTHER; note = 2'-fluoroadenosine-3'-phosphate
  modified_base 8: mod_base = OTHER; note = 2'-O-methyladenosine-3'-phosphate
  modified_base 9: mod_base = OTHER; note = 2'-fluoroadenosine-3'-phosphate
  modified_base 10: mod_base = OTHER; note = 2'-fluorocytidine-3'-phosphate
  modified_base 11: mod_base = OTHER; note = 2'-fluorouridine-3'-phosphate
  modified_base 12: mod_base = OTHER; note = 2'-O-methyluridine-3'-phosphate
  modified_base 13: mod_base = OTHER; note = 2'-O-methylguanosine-3'-phosphate
  modified_base 14: mod_base = OTHER; note = 2'-O-methyluridine-3'-phosphate
  modified_base 15: mod_base = OTHER; note = 2'-O-methylguanosine-3'-phosphate
  modified_base 16: mod_base = OTHER; note = 2'-O-methylcytidine-3'-phosphate
  modified_base 17: mod_base = OTHER; note = 2'-O-methylcytidine-3'-phosphate
  modified_base 18: mod_base = OTHER; note = 2'-O-methyladenosine-3'-phosphate
  modified_base 19: mod_base = OTHER; note = 2'-O-methyluridine-3'-phosphorothioate
  modified_base 20: mod_base = OTHER; note = 2'-O-methyladenosine-3'-phosphorothioate
  modified_base 21: mod_base = OTHER; note = 2'-O-methyladenosine-3'-phosphate
agtgtgaaacttgtgccataa

SEQ ID NO: 2366 - RNA, 21 nt, synthetic construct
  source 1..21: mol_type = other RNA
  modified_base 1: mod_base = OTHER; note = 2'-O-methylcytidine-3'-phosphorothioate
  modified_base 2: mod_base = OTHER; note = 2'-O-methyluridine-3'-phosphorothioate
  modified_base 3: mod_base = OTHER; note = 2'-O-methylguanosine-3'-phosphate
  modified_base 4: mod_base = OTHER; note = 2'-O-methyladenosine-3'-phosphate
  modified_base 5: mod_base = OTHER; note = 2'-O-methylguanosine-3'-phosphate
  modified_base 6: mod_base = OTHER; note = 2'-O-methyladenosine-3'-phosphate
  modified_base 7: mod_base = OTHER; note = 2'-fluorocytidine-3'-phosphate
  modified_base 8: mod_base = OTHER; note = 2'-O-methyladenosine-3'-phosphate
  modified_base 9: mod_base = OTHER; note = 2'-fluorocytidine-3'-phosphate
  modified_base 10: mod_base = OTHER; note = 2'-fluorouridine-3'-phosphate
  modified_base 11: mod_base = OTHER; note = 2'-fluoroguanosine-3'-phosphate
  modified_base 12: mod_base = OTHER; note = 2'-O-methyladenosine-3'-phosphate
  modified_base 13: mod_base = OTHER; note = 2'-O-methylguanosine-3'-phosphate
  modified_base 14: mod_base = OTHER; note = 2'-O-methyladenosine-3'-phosphate
  modified_base 15: mod_base = OTHER; note = 2'-O-methyladenosine-3'-phosphate
  modified_base 16: mod_base = OTHER; note = 2'-O-methyladenosine-3'-phosphate
  modified_base 17: mod_base = OTHER; note = 2'-O-methyluridine-3'-phosphate
  modified_base 18: mod_base = OTHER; note = 2'-O-methylguanosine-3'-phosphate
  modified_base 19: mod_base = OTHER; note = 2'-O-methyluridine-3'-phosphorothioate
  modified_base 20: mod_base = OTHER; note = 2'-O-methylcytidine-3'-phosphorothioate
  modified_base 21: mod_base = OTHER; note = 2'-O-methyladenosine-3'-phosphate
ctgagacactgagaaatgtca

SEQ ID NO: 2367 - RNA, 21 nt, synthetic construct
  source 1..21: mol_type = other RNA
  modified_base 1: mod_base = OTHER; note = 2'-O-methyluridine-3'-phosphorothioate
  modified_base 2: mod_base = OTHER; note = 2'-O-methylguanosine-3'-phosphorothioate
  modified_base 3: mod_base = OTHER; note = 2'-O-methylguanosine-3'-phosphate
  modified_base 4: mod_base = OTHER; note = 2'-O-methylcytidine-3'-phosphate
  modified_base 5: mod_base = OTHER; note = 2'-O-methyluridine-3'-phosphate
  modified_base 6: mod_base = OTHER; note = 2'-O-methyluridine-3'-phosphate
  modified_base 7: mod_base = OTHER; note = 2'-fluoroadenosine-3'-phosphate
  modified_base 8: mod_base = OTHER; note = 2'-O-methyluridine-3'-phosphate
  modified_base 9: mod_base = OTHER; note = 2'-fluoroadenosine-3'-phosphate
  modified_base 10: mod_base = OTHER; note = 2'-fluorouridine-3'-phosphate
  modified_base 11: mod_base = OTHER; note = 2'-fluoroguanosine-3'-phosphate
  modified_base 12: mod_base = OTHER; note = 2'-O-methyluridine-3'-phosphate
  modified_base 13: mod_base = OTHER; note = 2'-O-methylguanosine-3'-phosphate
  modified_base 14: mod_base = OTHER; note = 2'-O-methyluridine-3'-phosphate
  modified_base 15: mod_base = OTHER; note = 2'-O-methyluridine-3'-phosphate
  modified_base 16: mod_base = OTHER; note = 2'-O-methyluridine-3'-phosphate
  modified_base 17: mod_base = OTHER; note = 2'-O-methyladenosine-3'-phosphate
  modified_base 18: mod_base = OTHER; note = 2'-O-methyladenosine-3'-phosphate
  modified_base 19: mod_base = OTHER; note = 2'-O-methyladenosine-3'-phosphorothioate
  modified_base 20: mod_base = OTHER; note = 2'-O-methylguanosine-3'-phosphorothioate
  modified_base 21: mod_base = OTHER; note = 2'-O-methyladenosine-3'-phosphate
tggcttatatgtgtttaaaga

SEQ ID NO: 2368 - RNA, 21 nt, synthetic construct
  source 1..21: mol_type = other RNA
  modified_base 1: mod_base = OTHER; note = 2'-O-methyluridine-3'-phosphorothioate
  modified_base 2: mod_base = OTHER; note = 2'-O-methylguanosine-3'-phosphorothioate
  modified_base 3: mod_base = OTHER; note = 2'-O-methylcytidine-3'-phosphate
  modified_base 4: mod_base = OTHER; note = 2'-O-methyladenosine-3'-phosphate
  modified_base 5: mod_base = OTHER; note = 2'-O-methyluridine-3'-phosphate
  modified_base 6: mod_base = OTHER; note = 2'-O-methyluridine-3'-phosphate
  modified_base 7: mod_base = OTHER; note = 2'-fluorouridine-3'-phosphate
  modified_base 8: mod_base = OTHER; note = 2'-O-methyluridine-3'-phosphate
  modified_base 9: mod_base = OTHER; note = 2'-fluoroguanosine-3'-phosphate
  modified_base 10: mod_base = OTHER; note = 2'-fluoroadenosine-3'-phosphate
  modified_base 11: mod_base = OTHER; note = 2'-fluorocytidine-3'-phosphate
  modified_base 12: mod_base = OTHER; note = 2'-O-methyladenosine-3'-phosphate
  modified_base 13: mod_base = OTHER; note = 2'-O-methyluridine-3'-phosphate
  modified_base 14: mod_base = OTHER; note = 2'-O-methyluridine-3'-phosphate
  modified_base 15: mod_base = OTHER; note = 2'-O-methylguanosine-3'-phosphate
  modified_base 16: mod_base = OTHER; note = 2'-O-methylcytidine-3'-phosphate
  modified_base 17: mod_base = OTHER; note = 2'-O-methyladenosine-3'-phosphate
  modified_base 18: mod_base = OTHER; note = 2'-O-methyladenosine-3'-phosphate
  modified_base 19: mod_base = OTHER; note = 2'-O-methyladenosine-3'-phosphorothioate
  modified_base 20: mod_base = OTHER; note = 2'-O-methyladenosine-3'-phosphorothioate
  modified_base 21: mod_base = OTHER; note = 2'-O-methyladenosine-3'-phosphate
tgcattttgacattgcaaaaa

SEQ ID NO: 2369 - RNA, 21 nt, synthetic construct
  source 1..21: mol_type = other RNA
  modified_base 1: mod_base = OTHER; note = 2'-O-methyluridine-3'-phosphorothioate
  modified_base 2: mod_base = OTHER; note = 2'-O-methyluridine-3'-phosphorothioate
  modified_base 3: mod_base = OTHER; note = 2'-O-methyladenosine-3'-phosphate
  modified_base 4: mod_base = OTHER; note = 2'-O-methylguanosine-3'-phosphate
  modified_base 5: mod_base = OTHER; note = 2'-O-methylguanosine-3'-phosphate
  modified_base 6: mod_base = OTHER; note = 2'-O-methyluridine-3'-phosphate
  modified_base 7: mod_base = OTHER; note = 2'-fluorouridine-3'-phosphate
  modified_base 8: mod_base = OTHER; note = 2'-O-methyladenosine-3'-phosphate
  modified_base 9: mod_base = OTHER; note = 2'-fluoroguanosine-3'-phosphate
  modified_base 10: mod_base = OTHER; note = 2'-fluoroadenosine-3'-phosphate
  modified_base 11: mod_base = OTHER; note = 2'-fluoroadenosine-3'-phosphate
  modified_base 12: mod_base = OTHER; note = 2'-O-methylguanosine-3'-phosphate
  modified_base 13: mod_base = OTHER; note = 2'-O-methyluridine-3'-phosphate
  modified_base 14: mod_base = OTHER; note = 2'-O-methyluridine-3'-phosphate
  modified_base 15: mod_base = OTHER; note = 2'-O-methylcytidine-3'-phosphate
  modified_base 16: mod_base = OTHER; note = 2'-O-methylcytidine-3'-phosphate
  modified_base 17: mod_base = OTHER; note = 2'-O-methyladenosine-3'-phosphate
  modified_base 18: mod_base = OTHER; note = 2'-O-methylguanosine-3'-phosphate
  modified_base 19: mod_base = OTHER; note = 2'-O-methyladenosine-3'-phosphorothioate
  modified_base 20: mod_base = OTHER; note = 2'-O-methyladenosine-3'-phosphorothioate
  modified_base 21: mod_base = OTHER; note = 2'-O-methyladenosine-3'-phosphate
ttaggttagaagttccagaaa

SEQ ID NO: 2370 - RNA, 21 nt, synthetic construct
  source 1..21: mol_type = other RNA
  modified_base 1: mod_base = OTHER; note = 2'-O-methyluridine-3'-phosphorothioate
  modified_base 2: mod_base = OTHER; note = 2'-O-methylguanosine-3'-phosphorothioate
  modified_base 3: mod_base = OTHER; note = 2'-O-methylcytidine-3'-phosphate
  modified_base 4: mod_base = OTHER; note = 2'-O-methylguanosine-3'-phosphate
  modified_base 5: mod_base = OTHER; note = 2'-O-methyladenosine-3'-phosphate
  modified_base 6: mod_base = OTHER; note = 2'-O-methylcytidine-3'-phosphate
  modified_base 7: mod_base = OTHER; note = 2'-fluoroadenosine-3'-phosphate
  modified_base 8: mod_base = OTHER; note = 2'-O-methyluridine-3'-phosphate
  modified_base 9: mod_base = OTHER; note = 2'-fluoroguanosine-3'-phosphate
  modified_base 10: mod_base = OTHER; note = 2'-fluoroadenosine-3'-phosphate
  modified_base 11: mod_base = OTHER; note = 2'-fluoroadenosine-3'-phosphate
  modified_base 12: mod_base = OTHER; note = 2'-O-methyladenosine-3'-phosphate
  modified_base 13: mod_base = OTHER; note = 2'-O-methyladenosine-3'-phosphate
  modified_base 14: mod_base = OTHER; note = 2'-O-methylcytidine-3'-phosphate
  modified_base 15: mod_base = OTHER; note = 2'-O-methyladenosine-3'-phosphate
  modified_base 16: mod_base = OTHER; note = 2'-O-methyluridine-3'-phosphate
  modified_base 17: mod_base = OTHER; note = 2'-O-methylcytidine-3'-phosphate
  modified_base 18: mod_base = OTHER; note = 2'-O-methylcytidine-3'-phosphate
  modified_base 19: mod_base = OTHER; note = 2'-O-methyluridine-3'-phosphorothioate
  modified_base 20: mod_base = OTHER; note = 2'-O-methyluridine-3'-phosphorothioate
  modified_base 21: mod_base = OTHER; note = 2'-O-methyladenosine-3'-phosphate
tgcgacatgaaaacatcctta

SEQ ID NO: 2371 - RNA, 21 nt, synthetic construct
  source 1..21: mol_type = other RNA
  modified_base 1: mod_base = OTHER; note = 2'-O-methylguanosine-3'-phosphorothioate
  modified_base 2: mod_base = OTHER; note = 2'-O-methyladenosine-3'-phosphorothioate
  modified_base 3: mod_base = OTHER; note = 2'-O-methylguanosine-3'-phosphate
  modified_base 4: mod_base = OTHER; note = 2'-O-methyladenosine-3'-phosphate
  modified_base 5: mod_base = OTHER; note = 2'-O-methylguanosine-3'-phosphate
  modified_base 6: mod_base = OTHER; note = 2'-O-methylguanosine-3'-phosphate
  modified_base 7: mod_base = OTHER; note = 2'-fluoroadenosine-3'-phosphate
  modified_base 8: mod_base = OTHER; note = 2'-O-methyluridine-3'-phosphate
  modified_base 9: mod_base = OTHER; note = 2'-fluorouridine-3'-phosphate
  modified_base 10: mod_base = OTHER; note = 2'-fluorouridine-3'-phosphate
  modified_base 11: mod_base = OTHER; note = 2'-fluorouridine-3'-phosphate
  modified_base 12: mod_base = OTHER; note = 2'-O-methyluridine-3'-phosphate
  modified_base 13: mod_base = OTHER; note = 2'-O-methyluridine-3'-phosphate
  modified_base 14: mod_base = OTHER; note = 2'-O-methyladenosine-3'-phosphate
  modified_base 15: mod_base = OTHER; note = 2'-O-methylcytidine-3'-phosphate
  modified_base 16: mod_base = OTHER; note = 2'-O-methylcytidine-3'-phosphate
  modified_base 17: mod_base = OTHER; note = 2'-O-methyladenosine-3'-phosphate
  modified_base 18: mod_base = OTHER; note = 2'-O-methyluridine-3'-phosphate
  modified_base 19: mod_base = OTHER; note = 2'-O-methylcytidine-3'-phosphorothioate
  modified_base 20: mod_base = OTHER; note = 2'-O-methyluridine-3'-phosphorothioate
  modified_base 21: mod_base = OTHER; note = 2'-O-methyladenosine-3'-phosphate
gagaggattttttaccatcta

SEQ ID NO: 2372 - RNA, 21 nt, synthetic construct
  source 1..21: mol_type = other RNA
  modified_base 1: mod_base = OTHER; note = 2'-O-methylguanosine-3'-phosphorothioate
  modified_base 2: mod_base = OTHER; note = 2'-O-methyladenosine-3'-phosphorothioate
  modified_base 3: mod_base = OTHER; note = 2'-O-methyladenosine-3'-phosphate
  modified_base 4: mod_base = OTHER; note = 2'-O-methylguanosine-3'-phosphate
  modified_base 5: mod_base = OTHER; note = 2'-O-methylguanosine-3'-phosphate
  modified_base 6: mod_base = OTHER; note = 2'-O-methyluridine-3'-phosphate
  modified_base 7: mod_base = OTHER; note = 2'-fluoroguanosine-3'-phosphate
  modified_base 8: mod_base = OTHER; note = 2'-O-methyladenosine-3'-phosphate
  modified_base 9: mod_base = OTHER; note = 2'-fluoroadenosine-3'-phosphate
  modified_base 10: mod_base = OTHER; note = 2'-fluoroguanosine-3'-phosphate
  modified_base 11: mod_base = OTHER; note = 2'-fluoroadenosine-3'-phosphate
  modified_base 12: mod_base = OTHER; note = 2'-O-methylguanosine-3'-phosphate
  modified_base 13: mod_base = OTHER; note = 2'-O-methyladenosine-3'-phosphate
  modified_base 14: mod_base = OTHER; note = 2'-O-methyladenosine-3'-phosphate
  modified_base 15: mod_base = OTHER; note = 2'-O-methyluridine-3'-phosphate
  modified_base 16: mod_base = OTHER; note = 2'-O-methyluridine-3'-phosphate
  modified_base 17: mod_base = OTHER; note = 2'-O-methyluridine-3'-phosphate
  modified_base 18: mod_base = OTHER; note = 2'-O-methylcytidine-3'-phosphate
  modified_base 19: mod_base = OTHER; note = 2'-O-methyladenosine-3'-phosphorothioate
  modified_base 20: mod_base = OTHER; note = 2'-O-methyladenosine-3'-phosphorothioate
  modified_base 21: mod_base = OTHER; note = 2'-O-methyladenosine-3'-phosphate
gaaggtgaagagaatttcaaa

SEQ ID NO: 2373 - RNA, 21 nt, synthetic construct
  source 1..21: mol_type = other RNA
  modified_base 1: mod_base = OTHER; note = 2'-O-methyluridine-3'-phosphorothioate
  modified_base 2: mod_base = OTHER; note = 2'-O-methylguanosine-3'-phosphorothioate
  modified_base 3: mod_base = OTHER; note = 2'-O-methylguanosine-3'-phosphate
  modified_base 4: mod_base = OTHER; note = 2'-O-methyluridine-3'-phosphate
  modified_base 5: mod_base = OTHER; note = 2'-O-methyladenosine-3'-phosphate
  modified_base 6: mod_base = OTHER; note = 2'-O-methyluridine-3'-phosphate
  modified_base 7: mod_base = OTHER; note = 2'-fluorocytidine-3'-phosphate
  modified_base 8: mod_base = OTHER; note = 2'-O-methyluridine-3'-phosphate
  modified_base 9: mod_base = OTHER; note = 2'-fluoroguanosine-3'-phosphate
  modified_base 10: mod_base = OTHER; note = 2'-fluoroadenosine-3'-phosphate
  modified_base 11: mod_base = OTHER; note = 2'-fluoroadenosine-3'-phosphate
  modified_base 12: mod_base = OTHER; note = 2'-O-methyluridine-3'-phosphate
  modified_base 13: mod_base = OTHER; note = 2'-O-methyladenosine-3'-phosphate
  modified_base 14: mod_base = OTHER; note = 2'-O-methyluridine-3'-phosphate
  modified_base 15: mod_base = OTHER; note = 2'-O-methylcytidine-3'-phosphate
  modified_base 16: mod_base = OTHER; note = 2'-O-methyladenosine-3'-phosphate
  modified_base 17: mod_base = OTHER; note = 2'-O-methyluridine-3'-phosphate
  modified_base 18: mod_base = OTHER; note = 2'-O-methylguanosine-3'-phosphate
  modified_base 19: mod_base = OTHER; note = 2'-O-methyladenosine-3'-phosphorothioate
  modified_base 20: mod_base = OTHER; note = 2'-O-methyladenosine-3'-phosphorothioate
  modified_base 21: mod_base = OTHER; note = 2'-O-methyladenosine-3'-phosphate
tggtatctgaatatcatgaaa

SEQ ID NO: 2374 - RNA, 21 nt, synthetic construct
  source 1..21: mol_type = other RNA
  modified_base 1: mod_base = OTHER; note = 2'-O-methyluridine-3'-phosphorothioate
  modified_base 2: mod_base = OTHER; note = 2'-O-methylguanosine-3'-phosphorothioate
  modified_base 3: mod_base = OTHER; note = 2'-O-methyluridine-3'-phosphate
  modified_base 4: mod_base = OTHER; note = 2'-O-methyluridine-3'-phosphate
  modified_base 5: mod_base = OTHER; note = 2'-O-methylguanosine-3'-phosphate
  modified_base 6: mod_base = OTHER; note = 2'-O-methylguanosine-3'-phosphate
  modified_base 7: mod_base = OTHER; note = 2'-fluorouridine-3'-phosphate
  modified_base 8: mod_base = OTHER; note = 2'-O-methyluridine-3'-phosphate
  modified_base 9: mod_base = OTHER; note = 2'-fluorouridine-3'-phosphate
  modified_base 10: mod_base = OTHER; note = 2'-fluoroadenosine-3'-phosphate
  modified_base 11: mod_base = OTHER; note = 2'-fluoroadenosine-3'-phosphate
  modified_base 12: mod_base = OTHER; note = 2'-O-methyluridine-3'-phosphate
  modified_base 13: mod_base = OTHER; note = 2'-O-methyluridine-3'-phosphate
  modified_base 14: mod_base = OTHER; note = 2'-O-methyluridine-3'-phosphate
  modified_base 15: mod_base = OTHER; note = 2'-O-methyluridine-3'-phosphate
  modified_base 16: mod_base = OTHER; note = 2'-O-methyluridine-3'-phosphate
  modified_base 17: mod_base = OTHER; note = 2'-O-methylcytidine-3'-phosphate
  modified_base 18: mod_base = OTHER; note = 2'-O-methyladenosine-3'-phosphate
  modified_base 19: mod_base = OTHER; note = 2'-O-methyladenosine-3'-phosphorothioate
  modified_base 20: mod_base = OTHER; note = 2'-O-methylcytidine-3'-phosphorothioate
  modified_base 21: mod_base = OTHER; note = 2'-O-methyladenosine-3'-phosphate
tgttggtttaatttttcaaca

SEQ ID NO: 2375 - RNA, 21 nt, synthetic construct
  source 1..21: mol_type = other RNA
  modified_base 1: mod_base = OTHER; note = 2'-O-methyluridine-3'-phosphorothioate
  modified_base 2: mod_base = OTHER; note = 2'-O-methyladenosine-3'-phosphorothioate
  modified_base 3: mod_base = OTHER; note = 2'-O-methylguanosine-3'-phosphate
  modified_base 4: mod_base = OTHER; note = 2'-O-methyluridine-3'-phosphate
  modified_base 5: mod_base = OTHER; note = 2'-O-methyluridine-3'-phosphate
  modified_base 6: mod_base = OTHER; note = 2'-O-methylguanosine-3'-phosphate
  modified_base 7: mod_base = OTHER; note = 2'-fluorouridine-3'-phosphate
  modified_base 8: mod_base = OTHER; note = 2'-O-methyladenosine-3'-phosphate
  modified_base 9: mod_base = OTHER; note = 2'-fluoroadenosine-3'-phosphate
  modified_base 10: mod_base = OTHER; note = 2'-fluorouridine-3'-phosphate
  modified_base 11: mod_base = OTHER; note = 2'-fluorouridine-3'-phosphate
  modified_base 12: mod_base = OTHER; note = 2'-O-methyluridine-3'-phosphate
  modified_base 13: mod_base = OTHER; note = 2'-O-methyladenosine-3'-phosphate
  modified_base 14: mod_base = OTHER; note = 2'-O-methyladenosine-3'-phosphate
  modified_base 15: mod_base = OTHER; note = 2'-O-methyladenosine-3'-phosphate
  modified_base 16: mod_base = OTHER; note = 2'-O-methyluridine-3'-phosphate
  modified_base 17: mod_base = OTHER; note = 2'-O-methylguanosine-3'-phosphate
  modified_base 18: mod_base = OTHER; note = 2'-O-methyluridine-3'-phosphate
  modified_base 19: mod_base = OTHER; note = 2'-O-methylguanosine-3'-phosphorothioate
  modified_base 20: mod_base = OTHER; note = 2'-O-methylguanosine-3'-phosphorothioate
  modified_base 21: mod_base = OTHER; note = 2'-O-methyladenosine-3'-phosphate
tagttgtaatttaaatgtgga

SEQ ID NO: 2376 - RNA, 21 nt, synthetic construct
  source 1..21: mol_type = other RNA
  modified_base 1: mod_base = OTHER; note = 2'-O-methylguanosine-3'-phosphorothioate
  modified_base 2: mod_base = OTHER; note = 2'-O-methyluridine-3'-phosphorothioate
  modified_base 3: mod_base = OTHER; note = 2'-O-methylguanosine-3'-phosphate
  modified_base 4: mod_base = OTHER; note = 2'-O-methyladenosine-3'-phosphate
  modified_base 5: mod_base = OTHER; note = 2'-O-methyladenosine-3'-phosphate
  modified_base 6: mod_base = OTHER; note = 2'-O-methyluridine-3'-phosphate
  modified_base 7: mod_base = OTHER; note = 2'-fluoroguanosine-3'-phosphate
  modified_base 8: mod_base = OTHER; note = 2'-O-methyluridine-3'-phosphate
  modified_base 9: mod_base = OTHER; note = 2'-fluorouridine-3'-phosphate
  modified_base 10: mod_base = OTHER; note = 2'-fluorouridine-3'-phosphate
  modified_base 11: mod_base = OTHER; note = 2'-fluorouridine-3'-phosphate
  modified_base 12: mod_base = OTHER; note = 2'-O-methyluridine-3'-phosphate
  modified_base 13: mod_base = OTHER; note = 2'-O-methylguanosine-3'-phosphate
  modified_base 14: mod_base = OTHER; note = 2'-O-methylcytidine-3'-phosphate
  modified_base 15: mod_base = OTHER; note = 2'-O-methylcytidine-3'-phosphate
  modified_base 16: mod_base = OTHER; note = 2'-O-methyladenosine-3'-phosphate
  modified_base 17: mod_base = OTHER; note = 2'-O-methyluridine-3'-phosphate
  modified_base 18: mod_base = OTHER; note = 2'-O-methyluridine-3'-phosphate
  modified_base 19: mod_base = OTHER; note = 2'-O-methyluridine-3'-phosphorothioate
  modified_base 20: mod_base = OTHER; note = 2'-O-methyluridine-3'-phosphorothioate
  modified_base 21: mod_base = OTHER; note = 2'-O-methyladenosine-3'-phosphate
gtgaatgtttttgccatttta

SEQ ID NO: 2377 - RNA, 21 nt, synthetic construct
  source 1..21: mol_type = other RNA
  modified_base 1: mod_base = OTHER; note = 2'-O-methylcytidine-3'-phosphorothioate
  modified_base 2: mod_base = OTHER; note = 2'-O-methyladenosine-3'-phosphorothioate
  modified_base 3: mod_base = OTHER; note = 2'-O-methylguanosine-3'-phosphate
  modified_base 4: mod_base = OTHER; note = 2'-O-methyladenosine-3'-phosphate
  modified_base 5: mod_base = OTHER; note = 2'-O-methylguanosine-3'-phosphate
  modified_base 6: mod_base = OTHER; note = 2'-O-methyladenosine-3'-phosphate
  modified_base 7: mod_base = OTHER; note = 2'-fluorouridine-3'-phosphate
  modified_base 8: mod_base = OTHER; note = 2'-O-methylguanosine-3'-phosphate
  modified_base 9: mod_base = OTHER; note = 2'-fluoroadenosine-3'-phosphate
  modified_base 10: mod_base = OTHER; note = 2'-fluorouridine-3'-phosphate
  modified_base 11: mod_base = OTHER; note = 2'-fluorouridine-3'-phosphate
  modified_base 12: mod_base = OTHER; note = 2'-O-methyluridine-3'-phosphate
  modified_base 13: mod_base = OTHER; note = 2'-O-methyluridine-3'-phosphate
  modified_base 14: mod_base = OTHER; note = 2'-O-methyluridine-3'-phosphate
  modified_base 15: mod_base = OTHER; note = 2'-O-methylcytidine-3'-phosphate
  modified_base 16: mod_base = OTHER; note = 2'-O-methyluridine-3'-phosphate
  modified_base 17: mod_base = OTHER; note = 2'-O-methyluridine-3'-phosphate
  modified_base 18: mod_base = OTHER; note = 2'-O-methyluridine-3'-phosphate
  modified_base 19: mod_base = OTHER; note = 2'-O-methyluridine-3'-phosphorothioate
  modified_base 20: mod_base = OTHER; note = 2'-O-methyladenosine-3'-phosphorothioate
  modified_base 21: mod_base = OTHER; note = 2'-O-methyladenosine-3'-phosphate
cagagatgatttttcttttaa

SEQ ID NO: 2378 - RNA, 21 nt, synthetic construct
  source 1..21: mol_type = other RNA
  modified_base 1: mod_base = OTHER; note = 2'-O-methyladenosine-3'-phosphorothioate
  modified_base 2: mod_base = OTHER; note = 2'-O-methylguanosine-3'-phosphorothioate
  modified_base 3: mod_base = OTHER; note = 2'-O-methyladenosine-3'-phosphate
  modified_base 4: mod_base = OTHER; note = 2'-O-methyladenosine-3'-phosphate
  modified_base 5: mod_base = OTHER; note = 2'-O-methyladenosine-3'-phosphate
  modified_base 6: mod_base = OTHER; note = 2'-O-methyladenosine-3'-phosphate
  modified_base 7: mod_base = OTHER; note = 2'-fluorouridine-3'-phosphate
  modified_base 8: mod_base = OTHER; note = 2'-O-methyluridine-3'-phosphate
  modified_base 9: mod_base = OTHER; note = 2'-fluoroadenosine-3'-phosphate
  modified_base 10: mod_base = OTHER; note = 2'-fluoroguanosine-3'-phosphate
  modified_base 11: mod_base = OTHER; note = 2'-fluoroadenosine-3'-phosphate
  modified_base 12: mod_base = OTHER; note = 2'-O-methyluridine-3'-phosphate
  modified_base 13: mod_base = OTHER; note = 2'-O-methyluridine-3'-phosphate
  modified_base 14: mod_base = OTHER; note = 2'-O-methylcytidine-3'-phosphate
  modified_base 15: mod_base = OTHER; note = 2'-O-methyladenosine-3'-phosphate
  modified_base 16: mod_base = OTHER; note = 2'-O-methylguanosine-3'-phosphate
  modified_base 17: mod_base = OTHER; note = 2'-O-methyladenosine-3'-phosphate
  modified_base 18: mod_base = OTHER; note = 2'-O-methyluridine-3'-phosphate
  modified_base 19: mod_base = OTHER; note = 2'-O-methylcytidine-3'-phosphorothioate
  modified_base 20: mod_base = OTHER; note = 2'-O-methyluridine-3'-phosphorothioate
  modified_base 21: mod_base = OTHER; note = 2'-O-methyladenosine-3'-phosphate
agaaaattagattcagatcta

SEQ ID NO: 2379 - RNA, 21 nt, synthetic construct
  source 1..21: mol_type = other RNA
  modified_base 1: mod_base = OTHER; note = 2'-O-methyladenosine-3'-phosphorothioate
  modified_base 2: mod_base = OTHER; note = 2'-O-methylcytidine-3'-phosphorothioate
  modified_base 3: mod_base = OTHER; note = 2'-O-methyluridine-3'-phosphate
  modified_base 4: mod_base = OTHER; note = 2'-O-methylguanosine-3'-phosphate
  modified_base 5: mod_base = OTHER; note = 2'-O-methylguanosine-3'-phosphate
  modified_base 6: mod_base = OTHER; note = 2'-O-methyladenosine-3'-phosphate
  modified_base 7: mod_base = OTHER; note = 2'-fluoroadenosine-3'-phosphate
  modified_base 8: mod_base = OTHER; note = 2'-O-methyladenosine-3'-phosphate
  modified_base 9: mod_base = OTHER; note = 2'-fluoroadenosine-3'-phosphate
  modified_base 10: mod_base = OTHER; note = 2'-fluorouridine-3'-phosphate
  modified_base 11: mod_base = OTHER; note = 2'-fluorouridine-3'-phosphate
  modified_base 12: mod_base = OTHER; note = 2'-O-methyladenosine-3'-phosphate
  modified_base 13: mod_base = OTHER; note = 2'-O-methyladenosine-3'-phosphate
  modified_base 14: mod_base = OTHER; note = 2'-O-methylguanosine-3'-phosphate
  modified_base 15: mod_base = OTHER; note = 2'-O-methyladenosine-3'-phosphate
  modified_base 16: mod_base = OTHER; note = 2'-O-methyladenosine-3'-phosphate
  modified_base 17: mod_base = OTHER; note = 2'-O-methyladenosine-3'-phosphate
  modified_base 18: mod_base = OTHER; note = 2'-O-methylguanosine-3'-phosphate
  modified_base 19: mod_base = OTHER; note = 2'-O-methyluridine-3'-phosphorothioate
  modified_base 20: mod_base = OTHER; note = 2'-O-methyladenosine-3'-phosphorothioate
  modified_base 21: mod_base = OTHER; note = 2'-O-methyladenosine-3'-phosphate
actggaaaattaagaaagtaa

SEQ ID NO: 2380 - RNA, 21 nt, synthetic construct
  source 1..21: mol_type = other RNA
  modified_base 1: mod_base = OTHER; note = 2'-O-methyluridine-3'-phosphorothioate
  modified_base 2: mod_base = OTHER; note = 2'-O-methyladenosine-3'-phosphorothioate
  modified_base 3: mod_base = OTHER; note = 2'-O-methyladenosine-3'-phosphate
  modified_base 4: mod_base = OTHER; note = 2'-O-methyladenosine-3'-phosphate
  modified_base 5: mod_base = OTHER; note = 2'-O-methylguanosine-3'-phosphate
  modified_base 6: mod_base = OTHER; note = 2'-O-methyluridine-3'-phosphate
  modified_base 7: mod_base = OTHER; note = 2'-fluoroguanosine-3'-phosphate
  modified_base 8: mod_base = OTHER; note = 2'-O-methylguanosine-3'-phosphate
  modified_base 9: mod_base = OTHER; note = 2'-fluoroguanosine-3'-phosphate
  modified_base 10: mod_base = OTHER; note = 2'-fluoroadenosine-3'-phosphate
  modified_base 11: mod_base = OTHER; note = 2'-fluoroadenosine-3'-phosphate
  modified_base 12: mod_base = OTHER; note = 2'-O-methyladenosine-3'-phosphate
  modified_base 13: mod_base = OTHER; note = 2'-O-methylguanosine-3'-phosphate
  modified_base 14: mod_base = OTHER; note = 2'-O-methyladenosine-3'-phosphate
  modified_base 15: mod_base = OTHER; note = 2'-O-methyluridine-3'-phosphate
  modified_base 16: mod_base = OTHER; note = 2'-O-methyladenosine-3'-phosphate
  modified_base 17: mod_base = OTHER; note = 2'-O-methyladenosine-3'-phosphate
  modified_base 18: mod_base = OTHER; note = 2'-O-methyluridine-3'-phosphate
  modified_base 19: mod_base = OTHER; note = 2'-O-methyladenosine-3'-phosphorothioate
  modified_base 20: mod_base = OTHER; note = 2'-O-methyladenosine-3'-phosphorothioate
  modified_base 21: mod_base = OTHER; note = 2'-O-methyladenosine-3'-phosphate
taaagtgggaaagataataaa

SEQ ID NO: 2381 - RNA, 21 nt, synthetic construct
  source 1..21: mol_type = other RNA
  modified_base 1: mod_base = OTHER; note = 2'-O-methylcytidine-3'-phosphorothioate
  modified_base 2: mod_base = OTHER; note = 2'-O-methyluridine-3'-phosphorothioate
  modified_base 3: mod_base = OTHER; note = 2'-O-methyladenosine-3'-phosphate
  modified_base 4: mod_base = OTHER; note = 2'-O-methylguanosine-3'-phosphate
  modified_base 5: mod_base = OTHER; note = 2'-O-methylguanosine-3'-phosphate
  modified_base 6: mod_base = OTHER; note = 2'-O-methylcytidine-3'-phosphate
  modified_base 7: mod_base = OTHER; note = 2'-fluorouridine-3'-phosphate
  modified_base 8: mod_base = OTHER; note = 2'-O-methyladenosine-3'-phosphate
  modified_base 9: mod_base = OTHER; note = 2'-fluoroadenosine-3'-phosphate
  modified_base 10: mod_base = OTHER; note = 2'-fluoroguanosine-3'-phosphate
  modified_base 11: mod_base = OTHER; note = 2'-fluoroadenosine-3'-phosphate
  modified_base 12: mod_base = OTHER; note = 2'-O-methyladenosine-3'-phosphate
  modified_base 13: mod_base = OTHER; note = 2'-O-methyladenosine-3'-phosphate
  modified_base 14: mod_base = OTHER; note = 2'-O-methylguanosine-3'-phosphate
  modified_base 15: mod_base = OTHER; note = 2'-O-methyladenosine-3'-phosphate
  modified_base 16: mod_base = OTHER; note = 2'-O-methylguanosine-3'-phosphate
  modified_base 17: mod_base = OTHER; note = 2'-O-methyluridine-3'-phosphate
  modified_base 18: mod_base = OTHER; note = 2'-O-methyluridine-3'-phosphate
  modified_base 19: mod_base = OTHER; note = 2'-O-methylguanosine-3'-phosphorothioate
  modified_base 20: mod_base = OTHER; note = 2'-O-methyluridine-3'-phosphorothioate
  modified_base 21: mod_base = OTHER; note = 2'-O-methyladenosine-3'-phosphate
ctaggctaagaaagagttgta

SEQ ID NO: 2382 - RNA, 21 nt, synthetic construct
  source 1..21: mol_type = other RNA
  modified_base 1: mod_base = OTHER; note = 2'-O-methylguanosine-3'-phosphorothioate
  modified_base 2: mod_base = OTHER; note = 2'-O-methylcytidine-3'-phosphorothioate
  modified_base 3: mod_base = OTHER; note = 2'-O-methyluridine-3'-phosphate
  modified_base 4: mod_base = OTHER; note = 2'-O-methylguanosine-3'-phosphate
  modified_base 5: mod_base = OTHER; note = 2'-O-methyladenosine-3'-phosphate
  modified_base 6: mod_base = OTHER; note = 2'-O-methyluridine-3'-phosphate
  modified_base 7: mod_base = OTHER; note = 2'-fluoroadenosine-3'-phosphate
  modified_base 8: mod_base = OTHER; note = 2'-O-methyladenosine-3'-phosphate
  modified_base 9: mod_base = OTHER; note = 2'-fluoroadenosine-3'-phosphate
  modified_base 10: mod_base = OTHER; note = 2'-fluoroadenosine-3'-phosphate
  modified_base 11: mod_base = OTHER; note = 2'-fluorouridine-3'-phosphate
  modified_base 12: mod_base = OTHER; note = 2'-O-methyluridine-3'-phosphate
  modified_base 13: mod_base = OTHER; note = 2'-O-methyladenosine-3'-phosphate
  modified_base 14: mod_base = OTHER; note = 2'-O-methyladenosine-3'-phosphate
  modified_base 15: mod_base = OTHER; note = 2'-O-methyluridine-3'-phosphate
  modified_base 16: mod_base = OTHER; note = 2'-O-methylguanosine-3'-phosphate
  modified_base 17: mod_base = OTHER; note = 2'-O-methylguanosine-3'-phosphate
  modified_base 18: mod_base = OTHER; note = 2'-O-methyladenosine-3'-phosphate
  modified_base 19: mod_base = OTHER; note = 2'-O-methyluridine-3'-phosphorothioate
  modified_base 20: mod_base = OTHER; note = 2'-O-methyladenosine-3'-phosphorothioate
  modified_base 21: mod_base = OTHER; note = 2'-O-methyladenosine-3'-phosphate
gctgataaaattaatggataa

SEQ ID NO: 2383 - RNA, 21 nt, synthetic construct
  source 1..21: mol_type = other RNA
  modified_base 1: mod_base = OTHER; note = 2'-O-methylcytidine-3'-phosphorothioate
  modified_base 2: mod_base = OTHER; note = 2'-O-methylcytidine-3'-phosphorothioate
  modified_base 3: mod_base = OTHER; note = 2'-O-methyluridine-3'-phosphate
  modified_base 4: mod_base = OTHER; note = 2'-O-methylguanosine-3'-phosphate
  modified_base 5: mod_base = OTHER; note = 2'-O-methyluridine-3'-phosphate
  modified_base 6: mod_base = OTHER; note = 2'-O-methyladenosine-3'-phosphate
  modified_base 7: mod_base = OTHER; note = 2'-fluorouridine-3'-phosphate
  modified_base 8: mod_base = OTHER; note = 2'-O-methyluridine-3'-phosphate
  modified_base 9: mod_base = OTHER; note = 2'-fluorouridine-3'-phosphate
  modified_base 10: mod_base = OTHER; note = 2'-fluorocytidine-3'-phosphate
  modified_base 11: mod_base = OTHER; note = 2'-fluorouridine-3'-phosphate
  modified_base 12: mod_base = OTHER; note = 2'-O-methyluridine-3'-phosphate
  modified_base 13: mod_base = OTHER; note = 2'-O-methyluridine-3'-phosphate
  modified_base 14: mod_base = OTHER; note = 2'-O-methyladenosine-3'-phosphate
  modified_base 15: mod_base = OTHER; note = 2'-O-methylguanosine-3'-phosphate
  modified_base 16: mod_base = OTHER; note = 2'-O-methyluridine-3'-phosphate
  modified_base 17: mod_base = OTHER; note = 2'-O-methyluridine-3'-phosphate
  modified_base 18: mod_base = OTHER; note = 2'-O-methylguanosine-3'-phosphate
  modified_base 19: mod_base = OTHER; note = 2'-O-methyluridine-3'-phosphorothioate
  modified_base 20: mod_base = OTHER; note = 2'-O-methylcytidine-3'-phosphorothioate
  modified_base 21: mod_base = OTHER; note = 2'-O-methyladenosine-3'-phosphate
cctgtatttctttagttgtca

SEQ ID NO: 2384 - RNA, 21 nt, synthetic construct
  source 1..21: mol_type = other RNA
  modified_base 1: mod_base = OTHER; note = 2'-O-methyluridine-3'-phosphorothioate
  modified_base 2: mod_base = OTHER; note = 2'-O-methyluridine-3'-phosphorothioate
  modified_base 3: mod_base = OTHER; note = 2'-O-methyluridine-3'-phosphate
  modified_base 4: mod_base = OTHER; note = 2'-O-methylguanosine-3'-phosphate
  modified_base 5: mod_base = OTHER; note = 2'-O-methyluridine-3'-phosphate
  modified_base 6: mod_base = OTHER; note = 2'-O-methyluridine-3'-phosphate
  modified_base 7: mod_base = OTHER; note = 2'-fluorouridine-3'-phosphate
  modified_base 8: mod_base = OTHER; note = 2'-O-methyluridine-3'-phosphate
  modified_base 9: mod_base = OTHER; note = 2'-fluoroguanosine-3'-phosphate
  modified_base 10: mod_base = OTHER; note = 2'-fluorocytidine-3'-phosphate
  modified_base 11: mod_base = OTHER; note = 2'-fluorouridine-3'-phosphate
  modified_base 12: mod_base = OTHER; note = 2'-O-methyluridine-3'-phosphate
  modified_base 13: mod_base = OTHER; note = 2'-O-methyluridine-3'-phosphate
  modified_base 14: mod_base = OTHER; note = 2'-O-methyluridine-3'-phosphate
  modified_base 15: mod_base = OTHER; note = 2'-O-methylguanosine-3'-phosphate
  modified_base 16: mod_base = OTHER; note = 2'-O-methyladenosine-3'-phosphate
  modified_base 17: mod_base = OTHER; note = 2'-O-methylcytidine-3'-phosphate
  modified_base 18: mod_base = OTHER; note = 2'-O-methyladenosine-3'-phosphate
  modified_base 19: mod_base = OTHER; note = 2'-O-methyladenosine-3'-phosphorothioate
  modified_base 20: mod_base = OTHER; note = 2'-O-methyladenosine-3'-phosphorothioate
  modified_base 21: mod_base = OTHER; note = 2'-O-methyladenosine-3'-phosphate
tttgttttgcttttgacaaaa

SEQ ID NO: 2385 - RNA, 21 nt, synthetic construct
  source 1..21: mol_type = other RNA
  modified_base 1: mod_base = OTHER; note = 2'-O-methyluridine-3'-phosphorothioate
  modified_base 2: mod_base = OTHER; note = 2'-O-methylguanosine-3'-phosphorothioate
  modified_base 3: mod_base = OTHER; note = 2'-O-methylguanosine-3'-phosphate
  modified_base 4: mod_base = OTHER; note = 2'-O-methylcytidine-3'-phosphate
  modified_base 5: mod_base = OTHER; note = 2'-O-methyluridine-3'-phosphate
  modified_base 6: mod_base = OTHER; note = 2'-O-methylguanosine-3'-phosphate
  modified_base 7: mod_base = OTHER; note = 2'-fluorouridine-3'-phosphate
  modified_base 8: mod_base = OTHER; note = 2'-O-methylguanosine-3'-phosphate
  modified_base 9: mod_base = OTHER; note = 2'-fluoroadenosine-3'-phosphate
  modified_base 10: mod_base = OTHER; note = 2'-fluoroadenosine-3'-phosphate
  modified_base 11: mod_base = OTHER; note = 2'-fluoroadenosine-3'-phosphate
  modified_base 12: mod_base = OTHER; note = 2'-O-methyladenosine-3'-phosphate
  modified_base 13: mod_base = OTHER; note = 2'-O-methyluridine-3'-phosphate
  modified_base 14: mod_base = OTHER; note = 2'-O-methyladenosine-3'-phosphate
  modified_base 15: mod_base = OTHER; note = 2'-O-methyluridine-3'-phosphate
  modified_base 16: mod_base = OTHER; note = 2'-O-methyluridine-3'-phosphate
  modified_base 17: mod_base = OTHER; note = 2'-O-methylcytidine-3'-phosphate
  modified_base 18: mod_base = OTHER; note = 2'-O-methyluridine-3'-phosphate
  modified_base 19: mod_base = OTHER; note = 2'-O-methylcytidine-3'-phosphorothioate
  modified_base 20: mod_base = OTHER; note = 2'-O-methylcytidine-3'-phosphorothioate
  modified_base 21: mod_base = OTHER; note = 2'-O-methyladenosine-3'-phosphate
tggctgtgaaaatattctcca

SEQ ID NO: 2386 - RNA, 21 nt, synthetic construct
  source 1..21: mol_type = other RNA
  modified_base 1: mod_base = OTHER; note = 2'-O-methyladenosine-3'-phosphorothioate
  modified_base 2: mod_base = OTHER; note = 2'-O-methylcytidine-3'-phosphorothioate
  modified_base 3: mod_base = OTHER; note = 2'-O-methyluridine-3'-phosphate
  modified_base 4: mod_base = OTHER; note = 2'-O-methyladenosine-3'-phosphate
  modified_base 5: mod_base = OTHER; note = 2'-O-methyluridine-3'-phosphate
  modified_base 6: mod_base = OTHER; note = 2'-O-methyluridine-3'-phosphate
  modified_base 7: mod_base = OTHER; note = 2'-fluorouridine-3'-phosphate
  modified_base 8: mod_base = OTHER; note = 2'-O-methyluridine-3'-phosphate
  modified_base 9: mod_base = OTHER; note = 2'-fluoroadenosine-3'-phosphate
  modified_base 10: mod_base = OTHER; note = 2'-fluoroguanosine-3'-phosphate
  modified_base 11: mod_base = OTHER; note = 2'-fluoroguanosine-3'-phosphate
  modified_base 12: mod_base = OTHER; note = 2'-O-methylcytidine-3'-phosphate
  modified_base 13: mod_base = OTHER; note = 2'-O-methyladenosine-3'-phosphate
  modified_base 14: mod_base = OTHER; note = 2'-O-methyluridine-3'-phosphate
  modified_base 15: mod_base = OTHER; note = 2'-O-methyladenosine-3'-phosphate
  modified_base 16: mod_base = OTHER; note = 2'-O-methylguanosine-3'-phosphate
  modified_base 17: mod_base = OTHER; note = 2'-O-methylcytidine-3'-phosphate
  modified_base 18: mod_base = OTHER; note = 2'-O-methyladenosine-3'-phosphate
  modified_base 19: mod_base = OTHER; note = 2'-O-methylcytidine-3'-phosphorothioate
  modified_base 20: mod_base = OTHER; note = 2'-O-methyluridine-3'-phosphorothioate
  modified_base 21: mod_base = OTHER; note = 2'-O-methyladenosine-3'-phosphate
actattttaggcatagcacta

SEQ ID NO: 2387 - RNA, 21 nt, synthetic construct
  source 1..21: mol_type = other RNA
  modified_base 1: mod_base = OTHER; note = 2'-O-methyluridine-3'-phosphorothioate
  modified_base 2: mod_base = OTHER; note = 2'-O-methyluridine-3'-phosphorothioate
  modified_base 3: mod_base = OTHER; note = 2'-O-methyluridine-3'-phosphate
  modified_base 4: mod_base = OTHER; note = 2'-O-methylcytidine-3'-phosphate
  modified_base 5: mod_base = OTHER; note = 2'-O-methyladenosine-3'-phosphate
  modified_base 6: mod_base = OTHER; note = 2'-O-methylguanosine-3'-phosphate
  modified_base 7: mod_base = OTHER; note = 2'-fluorouridine-3'-phosphate
  modified_base 8: mod_base = OTHER; note = 2'-O-methyladenosine-3'-phosphate
  modified_base 9: mod_base = OTHER; note = 2'-fluorocytidine-3'-phosphate
  modified_base 10: mod_base = OTHER; note = 2'-fluorouridine-3'-phosphate
  modified_base 11: mod_base = OTHER; note = 2'-fluoroguanosine-3'-phosphate
  modified_base 12: mod_base = OTHER; note = 2'-O-methyluridine-3'-phosphate
  modified_base 13: mod_base = OTHER; note = 2'-O-methyladenosine-3'-phosphate
  modified_base 14: mod_base = OTHER; note = 2'-O-methyluridine-3'-phosphate
  modified_base 15: mod_base = OTHER; note = 2'-O-methyladenosine-3'-phosphate
  modified_base 16: mod_base = OTHER; note = 2'-O-methyladenosine-3'-phosphate
  modified_base 17: mod_base = OTHER; note = 2'-O-methyladenosine-3'-phosphate
  modified_base 18: mod_base = OTHER; note = 2'-O-methylguanosine-3'-phosphate
  modified_base 19: mod_base = OTHER; note = 2'-O-methyluridine-3'-phosphorothioate
  modified_base 20: mod_base = OTHER; note = 2'-O-methylguanosine-3'-phosphorothioate
  modified_base 21: mod_base = OTHER; note = 2'-O-methyladenosine-3'-phosphate
tttcagtactgtataaagtga

SEQ ID NO: 2388 - RNA, 21 nt, synthetic construct
  source 1..21: mol_type = other RNA
  modified_base 1: mod_base = OTHER; note = 2'-O-methylguanosine-3'-phosphorothioate
  modified_base 2: mod_base = OTHER; note = 2'-O-methyluridine-3'-phosphorothioate
  modified_base 3: mod_base = OTHER; note = 2'-O-methylguanosine-3'-phosphate
  modified_base 4: mod_base = OTHER; note = 2'-O-methyladenosine-3'-phosphate
  modified_base 5: mod_base = OTHER; note = 2'-O-methyluridine-3'-phosphate
  modified_base 6: mod_base = OTHER; note = 2'-O-methylguanosine-3'-phosphate
  modified_base 7: mod_base = OTHER; note = 2'-fluorocytidine-3'-phosphate
  modified_base 8: mod_base = OTHER; note = 2'-O-methyladenosine-3'-phosphate
  modified_base 9: mod_base = OTHER; note = 2'-fluoroadenosine-3'-phosphate
  modified_base 10: mod_base = OTHER; note = 2'-fluorouridine-3'-phosphate
  modified_base 11: mod_base = OTHER; note = 2'-fluorocytidine-3'-phosphate
  modified_base 12: mod_base = OTHER; note = 2'-O-methyluridine-3'-phosphate
  modified_base 13: mod_base = OTHER; note = 2'-O-methyladenosine-3'-phosphate
  modified_base 14: mod_base = OTHER; note = 2'-O-methyluridine-3'-phosphate
  modified_base 15: mod_base = OTHER; note = 2'-O-methylguanosine-3'-phosphate
  modified_base 16: mod_base = OTHER; note = 2'-O-methyluridine-3'-phosphate
  modified_base 17: mod_base = OTHER; note = 2'-O-methyluridine-3'-phosphate
  modified_base 18: mod_base = OTHER; note = 2'-O-methyluridine-3'-phosphate
  modified_base 19: mod_base = OTHER; note = 2'-O-methylcytidine-3'-phosphorothioate
  modified_base 20: mod_base = OTHER; note = 2'-O-methylcytidine-3'-phosphorothioate
  modified_base 21: mod_base = OTHER; note = 2'-O-methyladenosine-3'-phosphate
gtgatgcaatctatgtttcca

SEQ ID NO: 2389 - RNA, 21 nt, synthetic construct
  source 1..21: mol_type = other RNA
  modified_base 1: mod_base = OTHER; note = 2'-O-methyluridine-3'-phosphorothioate
  modified_base 2: mod_base = OTHER; note = 2'-O-methylguanosine-3'-phosphorothioate
  modified_base 3: mod_base = OTHER; note = 2'-O-methyluridine-3'-phosphate
  modified_base 4: mod_base = OTHER; note = 2'-O-methyluridine-3'-phosphate
  modified_base 5: mod_base = OTHER; note = 2'-O-methyluridine-3'-phosphate
  modified_base 6: mod_base = OTHER; note = 2'-O-methylguanosine-3'-phosphate
  modified_base 7: mod_base = OTHER; note = 2'-fluoroguanosine-3'-phosphate
  modified_base 8: mod_base = OTHER; note = 2'-O-methylcytidine-3'-phosphate
  modified_base 9: mod_base = OTHER; note = 2'-fluoroadenosine-3'-phosphate
  modified_base 10: mod_base = OTHER; note = 2'-fluoroguanosine-3'-phosphate
  modified_base 11: mod_base = OTHER; note = 2'-fluoroadenosine-3'-phosphate
  modified_base 12: mod_base = OTHER; note = 2'-O-methyluridine-3'-phosphate
  modified_base 13: mod_base = OTHER; note = 2'-O-methylcytidine-3'-phosphate
  modified_base 14: mod_base = OTHER; note = 2'-O-methyluridine-3'-phosphate
  modified_base 15: mod_base = OTHER; note = 2'-O-methylcytidine-3'-phosphate
  modified_base 16: mod_base = OTHER; note = 2'-O-methyladenosine-3'-phosphate
  modified_base 17: mod_base = OTHER; note = 2'-O-methyluridine-3'-phosphate
  modified_base 18: mod_base = OTHER; note = 2'-O-methylcytidine-3'-phosphate
  modified_base 19: mod_base = OTHER; note = 2'-O-methyladenosine-3'-phosphorothioate
  modified_base 20: mod_base = OTHER; note = 2'-O-methyladenosine-3'-phosphorothioate
  modified_base 21: mod_base = OTHER; note = 2'-O-methyladenosine-3'-phosphate
tgtttggcagatctcatcaaa

SEQ ID NO: 2390 - RNA, 21 nt, synthetic construct
  source 1..21: mol_type = other RNA
  modified_base 1: mod_base = OTHER; note = 2'-O-methyladenosine-3'-phosphorothioate
  modified_base 2: mod_base = OTHER; note = 2'-O-methyladenosine-3'-phosphorothioate
  modified_base 3: mod_base = OTHER; note = 2'-O-methylguanosine-3'-phosphate
  modified_base 4: mod_base = OTHER; note = 2'-O-methylguanosine-3'-phosphate
  modified_base 5: mod_base = OTHER; note = 2'-O-methyluridine-3'-phosphate
  modified_base 6: mod_base = OTHER; note = 2'-O-methyluridine-3'-phosphate
  modified_base 7: mod_base = OTHER; note = 2'-fluoroguanosine-3'-phosphate
  modified_base 8: mod_base = OTHER; note = 2'-O-methyluridine-3'-phosphate
  modified_base 9: mod_base = OTHER; note = 2'-fluorouridine-3'-phosphate
  modified_base 10: mod_base = OTHER; note = 2'-fluorouridine-3'-phosphate
  modified_base 11: mod_base = OTHER; note = 2'-fluoroguanosine-3'-phosphate
  modified_base 12: mod_base = OTHER; note = 2'-O-methyluridine-3'-phosphate
  modified_base 13: mod_base = OTHER; note = 2'-O-methylguanosine-3'-phosphate
  modified_base 14: mod_base = OTHER; note = 2'-O-methyladenosine-3'-phosphate
  modified_base 15: mod_base = OTHER; note = 2'-O-methylcytidine-3'-phosphate
  modified_base 16: mod_base = OTHER; note = 2'-O-methylcytidine-3'-phosphate
  modified_base 17: mod_base = OTHER; note = 2'-O-methyladenosine-3'-phosphate
  modified_base 18: mod_base = OTHER; note = 2'-O-methylguanosine-3'-phosphate
  modified_base 19: mod_base = OTHER; note = 2'-O-methyladenosine-3'-phosphorothioate
  modified_base 20: mod_base = OTHER; note = 2'-O-methyladenosine-3'-phosphorothioate
  modified_base 21: mod_base = OTHER; note = 2'-O-methyladenosine-3'-phosphate
aaggttgtttgtgaccagaaa

SEQ ID NO: 2391 - RNA, 21 nt, synthetic construct
  source 1..21: mol_type = other RNA
  modified_base 1: mod_base = OTHER; note = 2'-O-methylguanosine-3'-phosphorothioate
  modified_base 2: mod_base = OTHER; note = 2'-O-methylguanosine-3'-phosphorothioate
  modified_base 3: mod_base = OTHER; note = 2'-O-methyladenosine-3'-phosphate
  modified_base 4: mod_base = OTHER; note = 2'-O-methyladenosine-3'-phosphate
  modified_base 5: mod_base = OTHER; note = 2'-O-methylguanosine-3'-phosphate
  modified_base 6: mod_base = OTHER; note = 2'-O-methylguanosine-3'-phosphate
  modified_base 7: mod_base = OTHER; note = 2'-fluoroadenosine-3'-phosphate
  modified_base 8: mod_base = OTHER; note = 2'-O-methyladenosine-3'-phosphate
  modified_base 9: mod_base = OTHER; note = 2'-fluoroadenosine-3'-phosphate
  modified_base 10: mod_base = OTHER; note = 2'-fluorouridine-3'-phosphate
  modified_base 11: mod_base = OTHER; note = 2'-fluoroadenosine-3'-phosphate
  modified_base 12: mod_base = OTHER; note = 2'-O-methyluridine-3'-phosphate
  modified_base 13: mod_base = OTHER; note = 2'-O-methyluridine-3'-phosphate
  modified_base 14: mod_base = OTHER; note = 2'-O-methyluridine-3'-phosphate
  modified_base 15: mod_base = OTHER; note = 2'-O-methyluridine-3'-phosphate
  modified_base 16: mod_base = OTHER; note = 2'-O-methylguanosine-3'-phosphate
  modified_base 17: mod_base = OTHER; note = 2'-O-methyladenosine-3'-phosphate
  modified_base 18: mod_base = OTHER; note = 2'-O-methylguanosine-3'-phosphate
  modified_base 19: mod_base = OTHER; note = 2'-O-methyladenosine-3'-phosphorothioate
  modified_base 20: mod_base = OTHER; note = 2'-O-methyladenosine-3'-phosphorothioate
  modified_base 21: mod_base = OTHER; note = 2'-O-methyladenosine-3'-phosphate
ggaaggaaatattttgagaaa

SEQ ID NO: 2392 - RNA, 21 nt, synthetic construct
  source 1..21: mol_type = other RNA
  modified_base 1: mod_base = OTHER; note = 2'-O-methyluridine-3'-phosphorothioate
  modified_base 2: mod_base = OTHER; note = 2'-O-methyluridine-3'-phosphorothioate
  modified_base 3: mod_base = OTHER; note = 2'-O-methyluridine-3'-phosphate
  modified_base 4: mod_base = OTHER; note = 2'-O-methyluridine-3'-phosphate
  modified_base 5: mod_base = OTHER; note = 2'-O-methylguanosine-3'-phosphate
  modified_base 6: mod_base = OTHER; note = 2'-O-methylguanosine-3'-phosphate
  modified_base 7: mod_base = OTHER; note = 2'-fluorouridine-3'-phosphate
  modified_base 8: mod_base = OTHER; note = 2'-O-methyladenosine-3'-phosphate
  modified_base 9: mod_base = OTHER; note = 2'-fluoroguanosine-3'-phosphate
  modified_base 10: mod_base = OTHER; note = 2'-fluorocytidine-3'-phosphate
  modified_base 11: mod_base = OTHER; note = 2'-fluoroguanosine-3'-phosphate
  modified_base 12: mod_base = OTHER; note = 2'-O-methyluridine-3'-phosphate
  modified_base 13: mod_base = OTHER; note = 2'-O-methylguanosine-3'-phosphate
  modified_base 14: mod_base = OTHER; note = 2'-O-methyladenosine-3'-phosphate
  modified_base 15: mod_base = OTHER; note = 2'-O-methylcytidine-3'-phosphate
  modified_base 16: mod_base = OTHER; note = 2'-O-methyluridine-3'-phosphate
  modified_base 17: mod_base = OTHER; note = 2'-O-methylcytidine-3'-phosphate
  modified_base 18: mod_base = OTHER; note = 2'-O-methyluridine-3'-phosphate
  modified_base 19: mod_base = OTHER; note = 2'-O-methyluridine-3'-phosphorothioate
  modified_base 20: mod_base = OTHER; note = 2'-O-methylcytidine-3'-phosphorothioate
  modified_base 21: mod_base = OTHER; note = 2'-O-methyladenosine-3'-phosphate
ttttggtagcgtgactcttca

SEQ ID NO: 2393 - RNA, 21 nt, synthetic construct
  source 1..21: mol_type = other RNA
  modified_base 1: mod_base = OTHER; note = 2'-O-methyluridine-3'-phosphorothioate
  modified_base 2: mod_base = OTHER; note = 2'-O-methylguanosine-3'-phosphorothioate
  modified_base 3: mod_base = OTHER; note = 2'-O-methyladenosine-3'-phosphate
  modified_base 4: mod_base = OTHER; note = 2'-O-methyladenosine-3'-phosphate
  modified_base 5: mod_base = OTHER; note = 2'-O-methylcytidine-3'-phosphate
  modified_base 6: mod_base = OTHER; note = 2'-O-methyladenosine-3'-phosphate
  modified_base 7: mod_base = OTHER; note = 2'-fluoroguanosine-3'-phosphate
  modified_base 8: mod_base = OTHER; note = 2'-O-methylguanosine-3'-phosphate
  modified_base 9: mod_base = OTHER; note = 2'-fluoroadenosine-3'-phosphate
  modified_base 10: mod_base = OTHER; note = 2'-fluoroadenosine-3'-phosphate
  modified_base 11: mod_base = OTHER; note = 2'-fluoroadenosine-3'-phosphate
  modified_base 12: mod_base = OTHER; note = 2'-O-methyladenosine-3'-phosphate
  modified_base 13: mod_base = OTHER; note = 2'-O-methylguanosine-3'-phosphate
  modified_base 14: mod_base = OTHER; note = 2'-O-methyladenosine-3'-phosphate
  modified_base 15: mod_base = OTHER; note = 2'-O-methyluridine-3'-phosphate
  modified_base 16: mod_base = OTHER; note = 2'-O-methylguanosine-3'-phosphate
  modified_base 17: mod_base = OTHER; note = 2'-O-methyluridine-3'-phosphate
  modified_base 18: mod_base = OTHER; note = 2'-O-methyladenosine-3'-phosphate
  modified_base 19: mod_base = OTHER; note = 2'-O-methyladenosine-3'-phosphorothioate
  modified_base 20: mod_base = OTHER; note = 2'-O-methyladenosine-3'-phosphorothioate
  modified_base 21: mod_base = OTHER; note = 2'-O-methyladenosine-3'-phosphate
tgaacaggaaaagatgtaaaa

SEQ ID NO: 2394 - RNA, 21 nt, synthetic construct
  source 1..21: mol_type = other RNA
  modified_base 1: mod_base = OTHER; note = 2'-O-methylguanosine-3'-phosphorothioate
  modified_base 2: mod_base = OTHER; note = 2'-O-methylguanosine-3'-phosphorothioate
  modified_base 3: mod_base = OTHER; note = 2'-O-methylguanosine-3'-phosphate
  modified_base 4: mod_base = OTHER; note = 2'-O-methyladenosine-3'-phosphate
  modified_base 5: mod_base = OTHER; note = 2'-O-methyladenosine-3'-phosphate
  modified_base 6: mod_base = OTHER; note = 2'-O-methylcytidine-3'-phosphate
  modified_base 7: mod_base = OTHER; note = 2'-fluorocytidine-3'-phosphate
  modified_base 8: mod_base = OTHER; note = 2'-O-methyladenosine-3'-phosphate
  modified_base 9: mod_base = OTHER; note = 2'-fluoroadenosine-3'-phosphate
  modified_base 10: mod_base = OTHER; note = 2'-fluoroguanosine-3'-phosphate
  modified_base 11: mod_base = OTHER; note = 2'-fluoroadenosine-3'-phosphate
  modified_base 12: mod_base = OTHER; note = 2'-O-methylguanosine-3'-phosphate
  modified_base 13: mod_base = OTHER; note = 2'-O-methylguanosine-3'-phosphate
  modified_base 14: mod_base = OTHER; note = 2'-O-methyluridine-3'-phosphate
  modified_base 15: mod_base = OTHER; note = 2'-O-methyladenosine-3'-phosphate
  modified_base 16: mod_base = OTHER; note = 2'-O-methyluridine-3'-phosphate
  modified_base 17: mod_base = OTHER; note = 2'-O-methyladenosine-3'-phosphate
  modified_base 18: mod_base = OTHER; note = 2'-O-methyluridine-3'-phosphate
  modified_base 19: mod_base = OTHER; note = 2'-O-methylguanosine-3'-phosphorothioate
  modified_base 20: mod_base = OTHER; note = 2'-O-methylguanosine-3'-phosphorothioate
  modified_base 21: mod_base = OTHER; note = 2'-O-methyladenosine-3'-phosphate
gggaaccaagaggtatatgga

SEQ ID NO: 2395 - RNA, 21 nt, synthetic construct
  source 1..21: mol_type = other RNA
  modified_base 1: mod_base = OTHER; note = 2'-O-methyluridine-3'-phosphorothioate
  modified_base 2: mod_base = OTHER; note = 2'-O-methylguanosine-3'-phosphorothioate
  modified_base 3: mod_base = OTHER; note = 2'-O-methylguanosine-3'-phosphate
  modified_base 4: mod_base = OTHER; note = 2'-O-methylcytidine-3'-phosphate
  modified_base 5: mod_base = OTHER; note = 2'-O-methyladenosine-3'-phosphate
  modified_base 6: mod_base = OTHER; note = 2'-O-methylcytidine-3'-phosphate
  modified_base 7: mod_base = OTHER; note = 2'-fluorouridine-3'-phosphate
  modified_base 8: mod_base = OTHER; note = 2'-O-methyladenosine-3'-phosphate
  modified_base 9: mod_base = OTHER; note = 2'-fluoroguanosine-3'-phosphate
  modified_base 10: mod_base = OTHER; note = 2'-fluoroguanosine-3'-phosphate
  modified_base 11: mod_base = OTHER; note = 2'-fluorouridine-3'-phosphate
  modified_base 12: mod_base = OTHER; note = 2'-O-methylcytidine-3'-phosphate
  modified_base 13: mod_base = OTHER; note = 2'-O-methylcytidine-3'-phosphate
  modified_base 14: mod_base = OTHER; note = 2'-O-methyladenosine-3'-phosphate
  modified_base 15: mod_base = OTHER; note = 2'-O-methyladenosine-3'-phosphate
  modified_base 16: mod_base = OTHER; note = 2'-O-methyladenosine-3'-phosphate
  modified_base 17: mod_base = OTHER; note = 2'-O-methyluridine-3'-phosphate
  modified_base 18: mod_base = OTHER; note = 2'-O-methylcytidine-3'-phosphate
  modified_base 19: mod_base = OTHER; note = 2'-O-methyluridine-3'-phosphorothioate
  modified_base 20: mod_base = OTHER; note = 2'-O-methyluridine-3'-phosphorothioate
  modified_base 21: mod_base = OTHER; note = 2'-O-methyladenosine-3'-phosphate
tggcactaggtccaaatctta

SEQ ID NO: 2396 - RNA, 21 nt, synthetic construct
  source 1..21: mol_type = other RNA
  modified_base 1: mod_base = OTHER; note = 2'-O-methylcytidine-3'-phosphorothioate
  modified_base 2: mod_base = OTHER; note = 2'-O-methyladenosine-3'-phosphorothioate
  modified_base 3: mod_base = OTHER; note = 2'-O-methylcytidine-3'-phosphate
  modified_base 4: mod_base = OTHER; note = 2'-O-methyladenosine-3'-phosphate
  modified_base 5: mod_base = OTHER; note = 2'-O-methylcytidine-3'-phosphate
  modified_base 6: mod_base = OTHER; note = 2'-O-methylcytidine-3'-phosphate
  modified_base 7: mod_base = OTHER; note = 2'-fluorouridine-3'-phosphate
  modified_base 8: mod_base = OTHER; note = 2'-O-methyluridine-3'-phosphate
  modified_base 9: mod_base = OTHER; note = 2'-fluorocytidine-3'-phosphate
  modified_base 10: mod_base = OTHER; note = 2'-fluoroadenosine-3'-phosphate
  modified_base 11: mod_base = OTHER; note = 2'-fluorouridine-3'-phosphate
  modified_base 12: mod_base = OTHER; note = 2'-O-methyladenosine-3'-phosphate
  modified_base 13: mod_base = OTHER; note = 2'-O-methyluridine-3'-phosphate
  modified_base 14: mod_base = OTHER; note = 2'-O-methylguanosine-3'-phosphate
  modified_base 15: mod_base = OTHER; note = 2'-O-methylguanosine-3'-phosphate
  modified_base 16: mod_base = OTHER; note = 2'-O-methyladenosine-3'-phosphate
  modified_base 17: mod_base = OTHER; note = 2'-O-methylguanosine-3'-phosphate
  modified_base 18: mod_base = OTHER; note = 2'-O-methyladenosine-3'-phosphate
  modified_base 19: mod_base = OTHER; note = 2'-O-methyluridine-3'-phosphorothioate
  modified_base 20: mod_base = OTHER; note = 2'-O-methyluridine-3'-phosphorothioate
  modified_base 21: mod_base = OTHER; note = 2'-O-methyladenosine-3'-phosphate
cacaccttcatatggagatta

SEQ ID NO: 2397 - RNA, 21 nt, synthetic construct
  source 1..21: mol_type = other RNA
  modified_base 1: mod_base = OTHER; note = 2'-O-methylcytidine-3'-phosphorothioate
  modified_base 2: mod_base = OTHER; note = 2'-O-methyluridine-3'-phosphorothioate
  modified_base 3: mod_base = OTHER; note = 2'-O-methylguanosine-3'-phosphate
  modified_base 4: mod_base = OTHER; note = 2'-O-methylguanosine-3'-phosphate
  modified_base 5: mod_base = OTHER; note = 2'-O-methyluridine-3'-phosphate
  modified_base 6: mod_base = OTHER; note = 2'-O-methyluridine-3'-phosphate
  modified_base 7: mod_base = OTHER; note = 2'-fluorouridine-3'-phosphate
  modified_base 8: mod_base = OTHER; note = 2'-O-methyladenosine-3'-phosphate
  modified_base 9: mod_base = OTHER; note = 2'-fluorocytidine-3'-phosphate
  modified_base 10: mod_base = OTHER; note = 2'-fluorouridine-3'-phosphate
  modified_base 11: mod_base = OTHER; note = 2'-fluoroguanosine-3'-phosphate
  modified_base 12: mod_base = OTHER; note = 2'-O-methylguanosine-3'-phosphate
  modified_base 13: mod_base = OTHER; note = 2'-O-methylguanosine-3'-phosphate
  modified_base 14: mod_base = OTHER; note = 2'-O-methyladenosine-3'-phosphate
  modified_base 15: mod_base = OTHER; note = 2'-O-methyladenosine-3'-phosphate
  modified_base 16: mod_base = OTHER; note = 2'-O-methyladenosine-3'-phosphate
  modified_base 17: mod_base = OTHER; note = 2'-O-methyluridine-3'-phosphate
  modified_base 18: mod_base = OTHER; note = 2'-O-methyladenosine-3'-phosphate
  modified_base 19: mod_base = OTHER; note = 2'-O-methylguanosine-3'-phosphorothioate
  modified_base 20: mod_base = OTHER; note = 2'-O-methylcytidine-3'-phosphorothioate
  modified_base 21: mod_base = OTHER; note = 2'-O-methyladenosine-3'-phosphate
ctggtttactgggaaatagca

SEQ ID NO: 2398 - RNA, 21 nt, synthetic construct
  source 1..21: mol_type = other RNA
  modified_base 1: mod_base = OTHER; note = 2'-O-methylguanosine-3'-phosphorothioate
  modified_base 2: mod_base = OTHER; note = 2'-O-methylcytidine-3'-phosphorothioate
  modified_base 3: mod_base = OTHER; note = 2'-O-methylcytidine-3'-phosphate
  modified_base 4: mod_base = OTHER; note = 2'-O-methylcytidine-3'-phosphate
  modified_base 5: mod_base = OTHER; note = 2'-O-methyladenosine-3'-phosphate
  modified_base 6: mod_base = OTHER; note = 2'-O-methyladenosine-3'-phosphate
  modified_base 7: mod_base = OTHER; note = 2'-fluoroadenosine-3'-phosphate
  modified_base 8: mod_base = OTHER; note = 2'-O-methylguanosine-3'-phosphate
  modified_base 9: mod_base = OTHER; note = 2'-fluoroguanosine-3'-phosphate
  modified_base 10: mod_base = OTHER; note = 2'-fluoroadenosine-3'-phosphate
  modified_base 11: mod_base = OTHER; note = 2'-fluoroadenosine-3'-phosphate
  modified_base 12: mod_base = OTHER; note = 2'-O-methyluridine-3'-phosphate
  modified_base 13: mod_base = OTHER; note = 2'-O-methylguanosine-3'-phosphate
  modified_base 14: mod_base = OTHER; note = 2'-O-methyluridine-3'-phosphate
  modified_base 15: mod_base = OTHER; note = 2'-O-methyladenosine-3'-phosphate
  modified_base 16: mod_base = OTHER; note = 2'-O-methyluridine-3'-phosphate
  modified_base 17: mod_base = OTHER; note = 2'-O-methyladenosine-3'-phosphate
  modified_base 18: mod_base = OTHER; note = 2'-O-methyluridine-3'-phosphate
  modified_base 19: mod_base = OTHER; note = 2'-O-methyladenosine-3'-phosphorothioate
  modified_base 20: mod_base = OTHER; note = 2'-O-methyladenosine-3'-phosphorothioate
  modified_base 21: mod_base = OTHER; note = 2'-O-methyladenosine-3'-phosphate
gcccaaaggaatgtatataaa

SEQ ID NO: 2399 - RNA, 21 nt, synthetic construct
  source 1..21: mol_type = other RNA
  modified_base 1: mod_base = OTHER; note = 2'-O-methyluridine-3'-phosphorothioate
  modified_base 2: mod_base = OTHER; note = 2'-O-methyluridine-3'-phosphorothioate
  modified_base 3: mod_base = OTHER; note = 2'-O-methyladenosine-3'-phosphate
  modified_base 4: mod_base = OTHER; note = 2'-O-methyladenosine-3'-phosphate
  modified_base 5: mod_base = OTHER; note = 2'-O-methylcytidine-3'-phosphate
  modified_base 6: mod_base = OTHER; note = 2'-O-methyluridine-3'-phosphate
  modified_base 7: mod_base = OTHER; note = 2'-fluoroguanosine-3'-phosphate
  modified_base 8: mod_base = OTHER; note = 2'-O-methylcytidine-3'-phosphate
  modified_base 9: mod_base = OTHER; note = 2'-fluoroadenosine-3'-phosphate
  modified_base 10: mod_base = OTHER; note = 2'-fluoroadenosine-3'-phosphate
  modified_base 11: mod_base = OTHER; note = 2'-fluoroguanosine-3'-phosphate
  modified_base 12: mod_base = OTHER; note = 2'-O-methyladenosine-3'-phosphate
  modified_base 13: mod_base = OTHER; note = 2'-O-methylguanosine-3'-phosphate
  modified_base 14: mod_base = OTHER; note = 2'-O-methyluridine-3'-phosphate
  modified_base 15: mod_base = OTHER; note = 2'-O-methyluridine-3'-phosphate
  modified_base 16: mod_base = OTHER; note = 2'-O-methyluridine-3'-phosphate
  modified_base 17: mod_base = OTHER; note = 2'-O-methyladenosine-3'-phosphate
  modified_base 18: mod_base = OTHER; note = 2'-O-methylcytidine-3'-phosphate
  modified_base 19: mod_base = OTHER; note = 2'-O-methyluridine-3'-phosphorothioate
  modified_base 20: mod_base = OTHER; note = 2'-O-methylguanosine-3'-phosphorothioate
  modified_base 21: mod_base = OTHER; note = 2'-O-methyladenosine-3'-phosphate
ttaactgcaagagtttactga

SEQ ID NO: 2400 - RNA, 21 nt, synthetic construct
  source 1..21: mol_type = other RNA
  modified_base 1: mod_base = OTHER; note = 2'-O-methylguanosine-3'-phosphorothioate
  modified_base 2: mod_base = OTHER; note = 2'-O-methyladenosine-3'-phosphorothioate
  modified_base 3: mod_base = OTHER; note = 2'-O-methyladenosine-3'-phosphate
  modified_base 4: mod_base = OTHER; note = 2'-O-methylcytidine-3'-phosphate
  modified_base 5: mod_base = OTHER; note = 2'-O-methylcytidine-3'-phosphate
  modified_base 6: mod_base = OTHER; note = 2'-O-methyladenosine-3'-phosphate
  modified_base 7: mod_base = OTHER; note = 2'-fluorocytidine-3'-phosphate
  modified_base 8: mod_base = OTHER; note = 2'-O-methyluridine-3'-phosphate
  modified_base 9: mod_base = OTHER; note = 2'-fluorocytidine-3'-phosphate
  modified_base 10: mod_base = OTHER; note = 2'-fluorouridine-3'-phosphate
  modified_base 11: mod_base = OTHER; note = 2'-fluorocytidine-3'-phosphate
  modified_base 12: mod_base = OTHER; note = 2'-O-methyluridine-3'-phosphate
  modified_base 13: mod_base = OTHER; note = 2'-O-methylguanosine-3'-phosphate
  modified_base 14: mod_base = OTHER; note = 2'-O-methyladenosine-3'-phosphate
  modified_base 15: mod_base = OTHER; note = 2'-O-methylguanosine-3'-phosphate
  modified_base 16: mod_base = OTHER; note = 2'-O-methyluridine-3'-phosphate
  modified_base 17: mod_base = OTHER; note = 2'-O-methylguanosine-3'-phosphate
  modified_base 18: mod_base = OTHER; note = 2'-O-methylcytidine-3'-phosphate
  modified_base 19: mod_base = OTHER; note = 2'-O-methyladenosine-3'-phosphorothioate
  modified_base 20: mod_base = OTHER; note = 2'-O-methyladenosine-3'-phosphorothioate
  modified_base 21: mod_base = OTHER; note = 2'-O-methyladenosine-3'-phosphate
gaaccactctctgagtgcaaa

SEQ ID NO: 2401 - RNA, 21 nt, synthetic construct
  source 1..21: mol_type = other RNA
  modified_base 1: mod_base = OTHER; note = 2'-O-methyluridine-3'-phosphorothioate
  modified_base 2: mod_base = OTHER; note = 2'-O-methyluridine-3'-phosphorothioate
  modified_base 3: mod_base = OTHER; note = 2'-O-methyladenosine-3'-phosphate
  modified_base 4: mod_base = OTHER; note = 2'-O-methyluridine-3'-phosphate
  modified_base 5: mod_base = OTHER; note = 2'-O-methylcytidine-3'-phosphate
  modified_base 6: mod_base = OTHER; note = 2'-O-methyluridine-3'-phosphate
  modified_base 7: mod_base = OTHER; note = 2'-fluorouridine-3'-phosphate
  modified_base 8: mod_base = OTHER; note = 2'-O-methyluridine-3'-phosphate
  modified_base 9: mod_base = OTHER; note = 2'-fluorouridine-3'-phosphate
  modified_base 10: mod_base = OTHER; note = 2'-fluorocytidine-3'-phosphate
  modified_base 11: mod_base = OTHER; note = 2'-fluoroadenosine-3'-phosphate
  modified_base 12: mod_base = OTHER; note = 2'-O-methyluridine-3'-phosphate
  modified_base 13: mod_base = OTHER; note = 2'-O-methylcytidine-3'-phosphate
  modified_base 14: mod_base = OTHER; note = 2'-O-methylcytidine-3'-phosphate
  modified_base 15: mod_base = OTHER; note = 2'-O-methyluridine-3'-phosphate
  modified_base 16: mod_base = OTHER; note = 2'-O-methylguanosine-3'-phosphate
  modified_base 17: mod_base = OTHER; note = 2'-O-methylguanosine-3'-phosphate
  modified_base 18: mod_base = OTHER; note = 2'-O-methylcytidine-3'-phosphate
  modified_base 19: mod_base = OTHER; note = 2'-O-methyladenosine-3'-phosphorothioate
  modified_base 20: mod_base = OTHER; note = 2'-O-methyluridine-3'-phosphorothioate
  modified_base 21: mod_base = OTHER; note = 2'-O-methyladenosine-3'-phosphate
ttatcttttcatcctggcata

SEQ ID NO: 2402 - RNA, 21 nt, synthetic construct
  source 1..21: mol_type = other RNA
  modified_base 1: mod_base = OTHER; note = 2'-O-methylguanosine-3'-phosphorothioate
  modified_base 2: mod_base = OTHER; note = 2'-O-methyluridine-3'-phosphorothioate
  modified_base 3: mod_base = OTHER; note = 2'-O-methylguanosine-3'-phosphate
  modified_base 4: mod_base = OTHER; note = 2'-O-methyladenosine-3'-phosphate
  modified_base 5: mod_base = OTHER; note = 2'-O-methylguanosine-3'-phosphate
  modified_base 6: mod_base = OTHER; note = 2'-O-methyluridine-3'-phosphate
  modified_base 7: mod_base = OTHER; note = 2'-fluoroguanosine-3'-phosphate
  modified_base 8: mod_base = OTHER; note = 2'-O-methyluridine-3'-phosphate
  modified_base 9: mod_base = OTHER; note = 2'-fluorouridine-3'-phosphate
  modified_base 10: mod_base = OTHER; note = 2'-fluoroguanosine-3'-phosphate
  modified_base 11: mod_base = OTHER; note = 2'-fluoroguanosine-3'-phosphate
  modified_base 12: mod_base = OTHER; note = 2'-O-methyluridine-3'-phosphate
  modified_base 13: mod_base = OTHER; note = 2'-O-methyladenosine-3'-phosphate
  modified_base 14: mod_base = OTHER; note = 2'-O-methyluridine-3'-phosphate
  modified_base 15: mod_base = OTHER; note = 2'-O-methylguanosine-3'-phosphate
  modified_base 16: mod_base = OTHER; note = 2'-O-methylcytidine-3'-phosphate
  modified_base 17: mod_base = OTHER; note = 2'-O-methylcytidine-3'-phosphate
  modified_base 18: mod_base = OTHER; note = 2'-O-methyladenosine-3'-phosphate
  modified_base 19: mod_base = OTHER; note = 2'-O-methyladenosine-3'-phosphorothioate
  modified_base 20: mod_base = OTHER; note = 2'-O-methylcytidine-3'-phosphorothioate
  modified_base 21: mod_base = OTHER; note = 2'-O-methyladenosine-3'-phosphate
gtgagtgttggtatgccaaca

SEQ ID NO: 2403 - RNA, 21 nt, synthetic construct
  source 1..21: mol_type = other RNA
  modified_base 1: mod_base = OTHER; note = 2'-O-methyladenosine-3'-phosphorothioate
  modified_base 2: mod_base = OTHER; note = 2'-O-methylguanosine-3'-phosphorothioate
  modified_base 3: mod_base = OTHER; note = 2'-O-methyladenosine-3'-phosphate
  modified_base 4: mod_base = OTHER; note = 2'-O-methyladenosine-3'-phosphate
  modified_base 5: mod_base = OTHER; note = 2'-O-methyluridine-3'-phosphate
  modified_base 6: mod_base = OTHER; note = 2'-O-methylguanosine-3'-phosphate
  modified_base 7: mod_base = OTHER; note = 2'-fluorouridine-3'-phosphate
  modified_base 8: mod_base = OTHER; note = 2'-O-methyladenosine-3'-phosphate
  modified_base 9: mod_base = OTHER; note = 2'-fluorouridine-3'-phosphate
  modified_base 10: mod_base = OTHER; note = 2'-fluorouridine-3'-phosphate
  modified_base 11: mod_base = OTHER; note = 2'-fluorouridine-3'-phosphate
  modified_base 12: mod_base = OTHER; note = 2'-O-methylguanosine-3'-phosphate
  modified_base 13: mod_base = OTHER; note = 2'-O-methylguanosine-3'-phosphate
  modified_base 14: mod_base = OTHER; note = 2'-O-methylcytidine-3'-phosphate
  modified_base 15: mod_base = OTHER; note = 2'-O-methyluridine-3'-phosphate
  modified_base 16: mod_base = OTHER; note = 2'-O-methyladenosine-3'-phosphate
  modified_base 17: mod_base = OTHER; note = 2'-O-methyladenosine-3'-phosphate
  modified_base 18: mod_base = OTHER; note = 2'-O-methyladenosine-3'-phosphate
  modified_base 19: mod_base = OTHER; note = 2'-O-methyluridine-3'-phosphorothioate
  modified_base 20: mod_base = OTHER; note = 2'-O-methyladenosine-3'-phosphorothioate
  modified_base 21: mod_base = OTHER; note = 2'-O-methyladenosine-3'-phosphate
agaatgtatttggctaaataa

SEQ ID NO: 2404 - RNA, 21 nt, synthetic construct
  source 1..21: mol_type = other RNA
  modified_base 1: mod_base = OTHER; note = 2'-O-methylguanosine-3'-phosphorothioate
  modified_base 2: mod_base = OTHER; note = 2'-O-methyladenosine-3'-phosphorothioate
  modified_base 3: mod_base = OTHER; note = 2'-O-methyladenosine-3'-phosphate
  modified_base 4: mod_base = OTHER; note = 2'-O-methylcytidine-3'-phosphate
  modified_base 5: mod_base = OTHER; note = 2'-O-methylcytidine-3'-phosphate
  modified_base 6: mod_base = OTHER; note = 2'-O-methylcytidine-3'-phosphate
  modified_base 7: mod_base = OTHER; note = 2'-fluorouridine-3'-phosphate
  modified_base 8: mod_base = OTHER; note = 2'-O-methyluridine-3'-phosphate
  modified_base 9: mod_base = OTHER; note = 2'-fluorouridine-3'-phosphate
  modified_base 10: mod_base = OTHER; note = 2'-fluorouridine-3'-phosphate
  modified_base 11: mod_base = OTHER; note = 2'-fluoroadenosine-3'-phosphate
  modified_base 12: mod_base = OTHER; note = 2'-O-methyluridine-3'-phosphate
  modified_base 13: mod_base = OTHER; note = 2'-O-methyluridine-3'-phosphate
  modified_base 14: mod_base = OTHER; note = 2'-O-methyladenosine-3'-phosphate
  modified_base 15: mod_base = OTHER; note = 2'-O-methyladenosine-3'-phosphate
  modified_base 16: mod_base = OTHER; note = 2'-O-methylguanosine-3'-phosphate
  modified_base 17: mod_base = OTHER; note = 2'-O-methyladenosine-3'-phosphate
  modified_base 18: mod_base = OTHER; note = 2'-O-methylguanosine-3'-phosphate
  modified_base 19: mod_base = OTHER; note = 2'-O-methylguanosine-3'-phosphorothioate
  modified_base 20: mod_base = OTHER; note = 2'-O-methyladenosine-3'-phosphorothioate
  modified_base 21: mod_base = OTHER; note = 2'-O-methyladenosine-3'-phosphate
gaacccttttattaagaggaa

SEQ ID NO: 2405 - RNA, 21 nt, synthetic construct
  source 1..21: mol_type = other RNA
  modified_base 1: mod_base = OTHER; note = 2'-O-methylcytidine-3'-phosphorothioate
  modified_base 2: mod_base = OTHER; note = 2'-O-methyluridine-3'-phosphorothioate
  modified_base 3: mod_base = OTHER; note = 2'-O-methylcytidine-3'-phosphate
  modified_base 4: mod_base = OTHER; note = 2'-O-methylcytidine-3'-phosphate
  modified_base 5: mod_base = OTHER; note = 2'-O-methyluridine-3'-phosphate
  modified_base 6: mod_base = OTHER; note = 2'-O-methylguanosine-3'-phosphate
  modified_base 7: mod_base = OTHER; note = 2'-fluorouridine-3'-phosphate
  modified_base 8: mod_base = OTHER; note = 2'-O-methylcytidine-3'-phosphate
  modified_base 9: mod_base = OTHER; note = 2'-fluorocytidine-3'-phosphate
  modified_base 10: mod_base = OTHER; note = 2'-fluoroadenosine-3'-phosphate
  modified_base 11: mod_base = OTHER; note = 2'-fluorouridine-3'-phosphate
  modified_base 12: mod_base = OTHER; note = 2'-O-methyladenosine-3'-phosphate
  modified_base 13: mod_base = OTHER; note = 2'-O-methylguanosine-3'-phosphate
  modified_base 14: mod_base = OTHER; note = 2'-O-methylcytidine-3'-phosphate
  modified_base 15: mod_base = OTHER; note = 2'-O-methyluridine-3'-phosphate
  modified_base 16: mod_base = OTHER; note = 2'-O-methylguanosine-3'-phosphate
  modified_base 17: mod_base = OTHER; note = 2'-O-methylcytidine-3'-phosphate
  modified_base 18: mod_base = OTHER; note = 2'-O-methylguanosine-3'-phosphate
  modified_base 19: mod_base = OTHER; note = 2'-O-methyladenosine-3'-phosphorothioate
  modified_base 20: mod_base = OTHER; note = 2'-O-methyluridine-3'-phosphorothioate
  modified_base 21: mod_base = OTHER; note = 2'-O-methyladenosine-3'-phosphate
ctcctgtccatagctgcgata

SEQ ID NO: 2406 - RNA, 21 nt, synthetic construct
  source 1..21: mol_type = other RNA
  modified_base 1: mod_base = OTHER; note = 2'-O-methyladenosine-3'-phosphorothioate
  modified_base 2: mod_base = OTHER; note = 2'-O-methylcytidine-3'-phosphorothioate
  modified_base 3: mod_base = OTHER; note = 2'-O-methyluridine-3'-phosphate
  modified_base 4: mod_base = OTHER; note = 2'-O-methylguanosine-3'-phosphate
  modified_base 5: mod_base = OTHER; note = 2'-O-methyladenosine-3'-phosphate
  modified_base 6: mod_base = OTHER; note = 2'-O-methylguanosine-3'-phosphate
  modified_base 7: mod_base = OTHER; note = 2'-fluorouridine-3'-phosphate
  modified_base 8: mod_base = OTHER; note = 2'-O-methyluridine-3'-phosphate
  modified_base 9: mod_base = OTHER; note = 2'-fluoroguanosine-3'-phosphate
  modified_base 10: mod_base = OTHER; note = 2'-fluoroadenosine-3'-phosphate
  modified_base 11: mod_base = OTHER; note = 2'-fluoroadenosine-3'-phosphate
  modified_base 12: mod_base = OTHER; note = 2'-O-methyladenosine-3'-phosphate
  modified_base 13: mod_base = OTHER; note = 2'-O-methyluridine-3'-phosphate
  modified_base 14: mod_base = OTHER; note = 2'-O-methyladenosine-3'-phosphate
  modified_base 15: mod_base = OTHER; note = 2'-O-methyladenosine-3'-phosphate
  modified_base 16: mod_base = OTHER; note = 2'-O-methylguanosine-3'-phosphate
  modified_base 17: mod_base = OTHER; note = 2'-O-methylguanosine-3'-phosphate
  modified_base 18: mod_base = OTHER; note = 2'-O-methyladenosine-3'-phosphate
  modified_base 19: mod_base = OTHER; note = 2'-O-methyladenosine-3'-phosphorothioate
  modified_base 20: mod_base = OTHER; note = 2'-O-methylguanosine-3'-phosphorothioate
  modified_base 21: mod_base = OTHER; note = 2'-O-methyladenosine-3'-phosphate
actgagttgaaataaggaaga

SEQ ID NO: 2407 - RNA, 21 nt, synthetic construct
  source 1..21: mol_type = other RNA
  modified_base 1: mod_base = OTHER; note = 2'-O-methylcytidine-3'-phosphorothioate
  modified_base 2: mod_base = OTHER; note = 2'-O-methyluridine-3'-phosphorothioate
  modified_base 3: mod_base = OTHER; note = 2'-O-methylguanosine-3'-phosphate
  modified_base 4: mod_base = OTHER; note = 2'-O-methylcytidine-3'-phosphate
  modified_base 5: mod_base = OTHER; note = 2'-O-methylcytidine-3'-phosphate
  modified_base 6: mod_base = OTHER; note = 2'-O-methyladenosine-3'-phosphate
  modified_base 7: mod_base = OTHER; note = 2'-fluoroadenosine-3'-phosphate
  modified_base 8: mod_base = OTHER; note = 2'-O-methyladenosine-3'-phosphate
  modified_base 9: mod_base = OTHER; note = 2'-fluorocytidine-3'-phosphate
  modified_base 10: mod_base = OTHER; note = 2'-fluoroadenosine-3'-phosphate
  modified_base 11: mod_base = OTHER; note = 2'-fluoroguanosine-3'-phosphate
  modified_base 12: mod_base = OTHER; note = 2'-O-methyladenosine-3'-phosphate
  modified_base 13: mod_base = OTHER; note = 2'-O-methyladenosine-3'-phosphate
  modified_base 14: mod_base = OTHER; note = 2'-O-methylguanosine-3'-phosphate
  modified_base 15: mod_base = OTHER; note = 2'-O-methylguanosine-3'-phosphate
  modified_base 16: mod_base = OTHER; note = 2'-O-methyladenosine-3'-phosphate
  modified_base 17: mod_base = OTHER; note = 2'-O-methylguanosine-3'-phosphate
  modified_base 18: mod_base = OTHER; note = 2'-O-methylcytidine-3'-phosphate
  modified_base 19: mod_base = OTHER; note = 2'-O-methyladenosine-3'-phosphorothioate
  modified_base 20: mod_base = OTHER; note = 2'-O-methyluridine-3'-phosphorothioate
  modified_base 21: mod_base = OTHER; note = 2'-O-methyladenosine-3'-phosphate
ctgccaaacagaaggagcata

SEQ ID NO: 2408 - RNA, 21 nt, synthetic construct
  source 1..21: mol_type = other RNA
  modified_base 1: mod_base = OTHER; note = 2'-O-methylguanosine-3'-phosphorothioate
  modified_base 2: mod_base = OTHER; note = 2'-O-methylguanosine-3'-phosphorothioate
  modified_base 3: mod_base = OTHER; note = 2'-O-methylcytidine-3'-phosphate
  modified_base 4: mod_base = OTHER; note = 2'-O-methyladenosine-3'-phosphate
  modified_base 5: mod_base = OTHER; note = 2'-O-methyladenosine-3'-phosphate
  modified_base 6: mod_base = OTHER; note = 2'-O-methyladenosine-3'-phosphate
  modified_base 7: mod_base = OTHER; note = 2'-fluoroguanosine-3'-phosphate
  modified_base 8: mod_base = OTHER; note = 2'-O-methyluridine-3'-phosphate
  modified_base 9: mod_base = OTHER; note = 2'-fluorouridine-3'-phosphate
  modified_base 10: mod_base = OTHER; note = 2'-fluoroguanosine-3'-phosphate
  modified_base 11: mod_base = OTHER; note = 2'-fluorouridine-3'-phosphate
  modified_base 12: mod_base = OTHER; note = 2'-O-methylguanosine-3'-phosphate
  modified_base 13: mod_base = OTHER; note = 2'-O-methyladenosine-3'-phosphate
  modified_base 14: mod_base = OTHER; note = 2'-O-methyladenosine-3'-phosphate
  modified_base 15: mod_base = OTHER; note = 2'-O-methylguanosine-3'-phosphate
  modified_base 16: mod_base = OTHER; note = 2'-O-methylcytidine-3'-phosphate
  modified_base 17: mod_base = OTHER; note = 2'-O-methyladenosine-3'-phosphate
  modified_base 18: mod_base = OTHER; note = 2'-O-methylcytidine-3'-phosphate
  modified_base 19: mod_base = OTHER; note = 2'-O-methyluridine-3'-phosphorothioate
  modified_base 20: mod_base = OTHER; note = 2'-O-methylcytidine-3'-phosphorothioate
  modified_base 21: mod_base = OTHER; note = 2'-O-methyladenosine-3'-phosphate
ggcaaagttgtgaagcactca

SEQ ID NO: 2409 - RNA, 21 nt, synthetic construct
  source 1..21: mol_type = other RNA
  modified_base 1: mod_base = OTHER; note = 2'-O-methyladenosine-3'-phosphorothioate
  modified_base 2: mod_base = OTHER; note = 2'-O-methyluridine-3'-phosphorothioate
  modified_base 3: mod_base = OTHER; note = 2'-O-methyladenosine-3'-phosphate
  modified_base 4: mod_base = OTHER; note = 2'-O-methylguanosine-3'-phosphate
  modified_base 5: mod_base = OTHER; note = 2'-O-methylguanosine-3'-phosphate
  modified_base 6: mod_base = OTHER; note = 2'-O-methyladenosine-3'-phosphate
  modified_base 7: mod_base = OTHER; note = 2'-fluorouridine-3'-phosphate
  modified_base 8: mod_base = OTHER; note = 2'-O-methylguanosine-3'-phosphate
  modified_base 9: mod_base = OTHER; note = 2'-fluoroadenosine-3'-phosphate
  modified_base 10: mod_base = OTHER; note = 2'-fluorouridine-3'-phosphate
  modified_base 11: mod_base = OTHER; note = 2'-fluoroguanosine-3'-phosphate
  modified_base 12: mod_base = OTHER; note = 2'-O-methyladenosine-3'-phosphate
  modified_base 13: mod_base = OTHER; note = 2'-O-methyladenosine-3'-phosphate
  modified_base 14: mod_base = OTHER; note = 2'-O-methylguanosine-3'-phosphate
  modified_base 15: mod_base = OTHER; note = 2'-O-methyluridine-3'-phosphate
  modified_base 16: mod_base = OTHER; note = 2'-O-methyluridine-3'-phosphate
  modified_base 17: mod_base = OTHER; note = 2'-O-methyluridine-3'-phosphate
  modified_base 18: mod_base = OTHER; note = 2'-O-methyladenosine-3'-phosphate
  modified_base 19: mod_base = OTHER; note = 2'-O-methylguanosine-3'-phosphorothioate
  modified_base 20: mod_base = OTHER; note = 2'-O-methyladenosine-3'-phosphorothioate
  modified_base 21: mod_base = OTHER; note = 2'-O-methyladenosine-3'-phosphate
ataggatgatgaagtttagaa

SEQ ID NO: 2410 - RNA, 21 nt, synthetic construct
  source 1..21: mol_type = other RNA
  modified_base 1: mod_base = OTHER; note = 2'-O-methyladenosine-3'-phosphorothioate
  modified_base 2: mod_base = OTHER; note = 2'-O-methyluridine-3'-phosphorothioate
  modified_base 3: mod_base = OTHER; note = 2'-O-methyluridine-3'-phosphate
  modified_base 4: mod_base = OTHER; note = 2'-O-methylcytidine-3'-phosphate
  modified_base 5: mod_base = OTHER; note = 2'-O-methylguanosine-3'-phosphate
  modified_base 6: mod_base = OTHER; note = 2'-O-methyluridine-3'-phosphate
  modified_base 7: mod_base = OTHER; note = 2'-fluoroadenosine-3'-phosphate
  modified_base 8: mod_base = OTHER; note = 2'-O-methyluridine-3'-phosphate
  modified_base 9: mod_base = OTHER; note = 2'-fluorocytidine-3'-phosphate
  modified_base 10: mod_base = OTHER; note = 2'-fluorouridine-3'-phosphate
  modified_base 11: mod_base = OTHER; note = 2'-fluorouridine-3'-phosphate
  modified_base 12: mod_base = OTHER; note = 2'-O-methyladenosine-3'-phosphate
  modified_base 13: mod_base = OTHER; note = 2'-O-methyladenosine-3'-phosphate
  modified_base 14: mod_base = OTHER; note = 2'-O-methyladenosine-3'-phosphate
  modified_base 15: mod_base = OTHER; note = 2'-O-methyladenosine-3'-phosphate
  modified_base 16: mod_base = OTHER; note = 2'-O-methyluridine-3'-phosphate
  modified_base 17: mod_base = OTHER; note = 2'-O-methylguanosine-3'-phosphate
  modified_base 18: mod_base = OTHER; note = 2'-O-methylguanosine-3'-phosphate
  modified_base 19: mod_base = OTHER; note = 2'-O-methylcytidine-3'-phosphorothioate
  modified_base 20: mod_base = OTHER; note = 2'-O-methyladenosine-3'-phosphorothioate
  modified_base 21: mod_base = OTHER; note = 2'-O-methyladenosine-3'-phosphate
attcgtatcttaaaatggcaa

SEQ ID NO: 2411 - RNA, 21 nt, synthetic construct
  source 1..21: mol_type = other RNA
  modified_base 1: mod_base = OTHER; note = 2'-O-methylcytidine-3'-phosphorothioate
  modified_base 2: mod_base = OTHER; note = 2'-O-methyladenosine-3'-phosphorothioate
  modified_base 3: mod_base = OTHER; note = 2'-O-methylcytidine-3'-phosphate
  modified_base 4: mod_base = OTHER; note = 2'-O-methyladenosine-3'-phosphate
  modified_base 5: mod_base = OTHER; note = 2'-O-methylguanosine-3'-phosphate
  modified_base 6: mod_base = OTHER; note = 2'-O-methylcytidine-3'-phosphate
  modified_base 7: mod_base = OTHER; note = 2'-fluorouridine-3'-phosphate
  modified_base 8: mod_base = OTHER; note = 2'-O-methyluridine-3'-phosphate
  modified_base 9: mod_base = OTHER; note = 2'-fluoroguanosine-3'-phosphate
  modified_base 10: mod_base = OTHER; note = 2'-fluoroguanosine-3'-phosphate
  modified_base 11: mod_base = OTHER; note = 2'-fluoroguanosine-3'-phosphate
  modified_base 12: mod_base = OTHER; note = 2'-O-methyluridine-3'-phosphate
  modified_base 13: mod_base = OTHER; note = 2'-O-methyladenosine-3'-phosphate
  modified_base 14: mod_base = OTHER; note = 2'-O-methyladenosine-3'-phosphate
  modified_base 15: mod_base = OTHER; note = 2'-O-methyluridine-3'-phosphate
  modified_base 16: mod_base = OTHER; note = 2'-O-methyladenosine-3'-phosphate
  modified_base 17: mod_base = OTHER; note = 2'-O-methylguanosine-3'-phosphate
  modified_base 18: mod_base = OTHER; note = 2'-O-methylcytidine-3'-phosphate
  modified_base 19: mod_base = OTHER; note = 2'-O-methylguanosine-3'-phosphorothioate
  modified_base 20: mod_base = OTHER; note = 2'-O-methyluridine-3'-phosphorothioate
  modified_base 21: mod_base = OTHER; note = 2'-O-methyladenosine-3'-phosphate
cacagcttgggtaatagcgta

SEQ ID NO: 2412 - RNA, 21 nt, synthetic construct
  source 1..21: mol_type = other RNA
  modified_base 1: mod_base = OTHER; note = 2'-O-methyluridine-3'-phosphorothioate
  modified_base 2: mod_base = OTHER; note = 2'-O-methyluridine-3'-phosphorothioate
  modified_base 3: mod_base = OTHER; note = 2'-O-methyluridine-3'-phosphate
  modified_base 4: mod_base = OTHER; note = 2'-O-methylguanosine-3'-phosphate
  modified_base 5: mod_base = OTHER; note = 2'-O-methylcytidine-3'-phosphate
  modified_base 6: mod_base = OTHER; note = 2'-O-methyladenosine-3'-phosphate
  modified_base 7: mod_base = OTHER; note = 2'-fluoroadenosine-3'-phosphate
  modified_base 8: mod_base = OTHER; note = 2'-O-methylcytidine-3'-phosphate
  modified_base 9: mod_base = OTHER; note = 2'-fluoroadenosine-3'-phosphate
  modified_base 10: mod_base = OTHER; note = 2'-fluoroadenosine-3'-phosphate
  modified_base 11: mod_base = OTHER; note = 2'-fluorocytidine-3'-phosphate
  modified_base 12: mod_base = OTHER; note = 2'-O-methyladenosine-3'-phosphate
  modified_base 13: mod_base = OTHER; note = 2'-O-methyluridine-3'-phosphate
  modified_base 14: mod_base = OTHER; note = 2'-O-methyladenosine-3'-phosphate
  modified_base 15: mod_base = OTHER; note = 2'-O-methyladenosine-3'-phosphate
  modified_base 16: mod_base = OTHER; note = 2'-O-methylcytidine-3'-phosphate
  modified_base 17: mod_base = OTHER; note = 2'-O-methyladenosine-3'-phosphate
  modified_base 18: mod_base = OTHER; note = 2'-O-methylcytidine-3'-phosphate
  modified_base 19: mod_base = OTHER; note = 2'-O-methyluridine-3'-phosphorothioate
  modified_base 20: mod_base = OTHER; note = 2'-O-methylguanosine-3'-phosphorothioate
  modified_base 21: mod_base = OTHER; note = 2'-O-methyladenosine-3'-phosphate
tttgcaacaacataacactga

SEQ ID NO: 2413 - RNA, 21 nt, synthetic construct
  source 1..21: mol_type = other RNA
  modified_base 1: mod_base = OTHER; note = 2'-O-methyluridine-3'-phosphorothioate
  modified_base 2: mod_base = OTHER; note = 2'-O-methylguanosine-3'-phosphorothioate
  modified_base 3: mod_base = OTHER; note = 2'-O-methylcytidine-3'-phosphate
  modified_base 4: mod_base = OTHER; note = 2'-O-methylcytidine-3'-phosphate
  modified_base 5: mod_base = OTHER; note = 2'-O-methyladenosine-3'-phosphate
  modified_base 6: mod_base = OTHER; note = 2'-O-methylcytidine-3'-phosphate
  modified_base 7: mod_base = OTHER; note = 2'-fluorocytidine-3'-phosphate
  modified_base 8: mod_base = OTHER; note = 2'-O-methyladenosine-3'-phosphate
  modified_base 9: mod_base = OTHER; note = 2'-fluorouridine-3'-phosphate
  modified_base 10: mod_base = OTHER; note = 2'-fluoroguanosine-3'-phosphate
  modified_base 11: mod_base = OTHER; note = 2'-fluorouridine-3'-phosphate
  modified_base 12: mod_base = OTHER; note = 2'-O-methylguanosine-3'-phosphate
  modified_base 13: mod_base = OTHER; note = 2'-O-methyladenosine-3'-phosphate
  modified_base 14: mod_base = OTHER; note = 2'-O-methylcytidine-3'-phosphate
  modified_base 15: mod_base = OTHER; note = 2'-O-methyluridine-3'-phosphate
  modified_base 16: mod_base = OTHER; note = 2'-O-methyluridine-3'-phosphate
  modified_base 17: mod_base = OTHER; note = 2'-O-methyladenosine-3'-phosphate
  modified_base 18: mod_base = OTHER; note = 2'-O-methyluridine-3'-phosphate
  modified_base 19: mod_base = OTHER; note = 2'-O-methyluridine-3'-phosphorothioate
  modified_base 20: mod_base = OTHER; note = 2'-O-methylguanosine-3'-phosphorothioate
  modified_base 21: mod_base = OTHER; note = 2'-O-methyladenosine-3'-phosphate
tgccaccatgtgacttattga

SEQ ID NO: 2414 - RNA, 21 nt, synthetic construct
  source 1..21: mol_type = other RNA
  modified_base 1: mod_base = OTHER; note = 2'-O-methyluridine-3'-phosphorothioate
  modified_base 2: mod_base = OTHER; note = 2'-O-methylcytidine-3'-phosphorothioate
  modified_base 3: mod_base = OTHER; note = 2'-O-methylguanosine-3'-phosphate
  modified_base 4: mod_base = OTHER; note = 2'-O-methyladenosine-3'-phosphate
  modified_base 5: mod_base = OTHER; note = 2'-O-methyluridine-3'-phosphate
  modified_base 6: mod_base = OTHER; note = 2'-O-methyladenosine-3'-phosphate
  modified_base 7: mod_base = OTHER; note = 2'-fluoroguanosine-3'-phosphate
  modified_base 8: mod_base = OTHER; note = 2'-O-methyladenosine-3'-phosphate
  modified_base 9: mod_base = OTHER; note = 2'-fluoroguanosine-3'-phosphate
  modified_base 10: mod_base = OTHER; note = 2'-fluoroguanosine-3'-phosphate
  modified_base 11: mod_base = OTHER; note = 2'-fluoroadenosine-3'-phosphate
  modified_base 12: mod_base = OTHER; note = 2'-O-methyladenosine-3'-phosphate
  modified_base 13: mod_base = OTHER; note = 2'-O-methyladenosine-3'-phosphate
  modified_base 14: mod_base = OTHER; note = 2'-O-methyluridine-3'-phosphate
  modified_base 15: mod_base = OTHER; note = 2'-O-methylguanosine-3'-phosphate
  modified_base 16: mod_base = OTHER; note = 2'-O-methyladenosine-3'-phosphate
  modified_base 17: mod_base = OTHER; note = 2'-O-methylguanosine-3'-phosphate
  modified_base 18: mod_base = OTHER; note = 2'-O-methyladenosine-3'-phosphate
  modified_base 19: mod_base = OTHER; note = 2'-O-methyladenosine-3'-phosphorothioate
  modified_base 20: mod_base = OTHER; note = 2'-O-methyladenosine-3'-phosphorothioate
  modified_base 21: mod_base = OTHER; note = 2'-O-methyladenosine-3'-phosphate
tcgatagaggaaatgagaaaa

SEQ ID NO: 2415 - RNA, 21 nt, synthetic construct
  source 1..21: mol_type = other RNA
  modified_base 1: mod_base = OTHER; note = 2'-O-methyluridine-3'-phosphorothioate
  modified_base 2: mod_base = OTHER; note = 2'-O-methyluridine-3'-phosphorothioate
  modified_base 3: mod_base = OTHER; note = 2'-O-methyluridine-3'-phosphate
  modified_base 4: mod_base = OTHER; note = 2'-O-methyluridine-3'-phosphate
  modified_base 5: mod_base = OTHER; note = 2'-O-methyluridine-3'-phosphate
  modified_base 6: mod_base = OTHER; note = 2'-O-methyladenosine-3'-phosphate
  modified_base 7: mod_base = OTHER; note = 2'-fluoroadenosine-3'-phosphate
  modified_base 8: mod_base = OTHER; note = 2'-O-methylguanosine-3'-phosphate
  modified_base 9: mod_base = OTHER; note = 2'-fluorouridine-3'-phosphate
  modified_base 10: mod_base = OTHER; note = 2'-fluorouridine-3'-phosphate
  modified_base 11: mod_base = OTHER; note = 2'-fluoroadenosine-3'-phosphate
  modified_base 12: mod_base = OTHER; note = 2'-O-methylguanosine-3'-phosphate
  modified_base 13: mod_base = OTHER; note = 2'-O-methylcytidine-3'-phosphate
  modified_base 14: mod_base = OTHER; note = 2'-O-methyladenosine-3'-phosphate
  modified_base 15: mod_base = OTHER; note = 2'-O-methylguanosine-3'-phosphate
  modified_base 16: mod_base = OTHER; note = 2'-O-methylguanosine-3'-phosphate
  modified_base 17: mod_base = OTHER; note = 2'-O-methyladenosine-3'-phosphate
  modified_base 18: mod_base = OTHER; note = 2'-O-methylcytidine-3'-phosphate
  modified_base 19: mod_base = OTHER; note = 2'-O-methyluridine-3'-phosphorothioate
  modified_base 20: mod_base = OTHER; note = 2'-O-methyluridine-3'-phosphorothioate
  modified_base 21: mod_base = OTHER; note = 2'-O-methyladenosine-3'-phosphate
tttttaagttagcaggactta

SEQ ID NO: 2416 - RNA, 21 nt, synthetic construct
  source 1..21: mol_type = other RNA
  modified_base 1: mod_base = OTHER; note = 2'-O-methyluridine-3'-phosphorothioate
  modified_base 2: mod_base = OTHER; note = 2'-O-methylguanosine-3'-phosphorothioate
  modified_base 3: mod_base = OTHER; note = 2'-O-methyluridine-3'-phosphate
  modified_base 4: mod_base = OTHER; note = 2'-O-methyladenosine-3'-phosphate
  modified_base 5: mod_base = OTHER; note = 2'-O-methyladenosine-3'-phosphate
  modified_base 6: mod_base = OTHER; note = 2'-O-methyladenosine-3'-phosphate
  modified_base 7: mod_base = OTHER; note = 2'-fluorouridine-3'-phosphate
  modified_base 8: mod_base = OTHER; note = 2'-O-methyladenosine-3'-phosphate
  modified_base 9: mod_base = OTHER; note = 2'-fluoroadenosine-3'-phosphate
  modified_base 10: mod_base = OTHER; note = 2'-fluorouridine-3'-phosphate
  modified_base 11: mod_base = OTHER; note = 2'-fluorouridine-3'-phosphate
  modified_base 12: mod_base = OTHER; note = 2'-O-methyladenosine-3'-phosphate
  modified_base 13: mod_base = OTHER; note = 2'-O-methyluridine-3'-phosphate
  modified_base 14: mod_base = OTHER; note = 2'-O-methylcytidine-3'-phosphate
  modified_base 15: mod_base = OTHER; note = 2'-O-methyluridine-3'-phosphate
  modified_base 16: mod_base = OTHER; note = 2'-O-methylguanosine-3'-phosphate
  modified_base 17: mod_base = OTHER; note = 2'-O-methylcytidine-3'-phosphate
  modified_base 18: mod_base = OTHER; note = 2'-O-methylcytidine-3'-phosphate
  modified_base 19: mod_base = OTHER; note = 2'-O-methyluridine-3'-phosphorothioate
  modified_base 20: mod_base = OTHER; note = 2'-O-methyladenosine-3'-phosphorothioate
  modified_base 21: mod_base = OTHER; note = 2'-O-methyladenosine-3'-phosphate
tgtaaataattatctgcctaa

SEQ ID NO: 2417 - RNA, 21 nt, synthetic construct
  source 1..21: mol_type = other RNA
  modified_base 1: mod_base = OTHER; note = 2'-O-methyluridine-3'-phosphorothioate
  modified_base 2: mod_base = OTHER; note = 2'-O-methylguanosine-3'-phosphorothioate
  modified_base 3: mod_base = OTHER; note = 2'-O-methylguanosine-3'-phosphate
  modified_base 4: mod_base = OTHER; note = 2'-O-methyluridine-3'-phosphate
  modified_base 5: mod_base = OTHER; note = 2'-O-methyluridine-3'-phosphate
  modified_base 6: mod_base = OTHER; note = 2'-O-methylguanosine-3'-phosphate
  modified_base 7: mod_base = OTHER; note = 2'-fluorouridine-3'-phosphate
  modified_base 8: mod_base = OTHER; note = 2'-O-methyladenosine-3'-phosphate
  modified_base 9: mod_base = OTHER; note = 2'-fluorocytidine-3'-phosphate
  modified_base 10: mod_base = OTHER; note = 2'-fluoroguanosine-3'-phosphate
  modified_base 11: mod_base = OTHER; note = 2'-fluorouridine-3'-phosphate
  modified_base 12: mod_base = OTHER; note = 2'-O-methylguanosine-3'-phosphate
  modified_base 13: mod_base = OTHER; note = 2'-O-methylcytidine-3'-phosphate
  modified_base 14: mod_base = OTHER; note = 2'-O-methylcytidine-3'-phosphate
  modified_base 15: mod_base = OTHER; note = 2'-O-methyluridine-3'-phosphate
  modified_base 16: mod_base = OTHER; note = 2'-O-methylcytidine-3'-phosphate
  modified_base 17: mod_base = OTHER; note = 2'-O-methyladenosine-3'-phosphate
  modified_base 18: mod_base = OTHER; note = 2'-O-methyladenosine-3'-phosphate
  modified_base 19: mod_base = OTHER; note = 2'-O-methyladenosine-3'-phosphorothioate
  modified_base 20: mod_base = OTHER; note = 2'-O-methyluridine-3'-phosphorothioate
  modified_base 21: mod_base = OTHER; note = 2'-O-methyladenosine-3'-phosphate
tggttgtacgtgcctcaaata

SEQ ID NO: 2418 - RNA, 21 nt, synthetic construct
  source 1..21: mol_type = other RNA
  modified_base 1: mod_base = OTHER; note = 2'-O-methylcytidine-3'-phosphorothioate
  modified_base 2: mod_base = OTHER; note = 2'-O-methylcytidine-3'-phosphorothioate
  modified_base 3: mod_base = OTHER; note = 2'-O-methyladenosine-3'-phosphate
  modified_base 4: mod_base = OTHER; note = 2'-O-methylcytidine-3'-phosphate
  modified_base 5: mod_base = OTHER; note = 2'-O-methyladenosine-3'-phosphate
  modified_base 6: mod_base = OTHER; note = 2'-O-methylcytidine-3'-phosphate
  modified_base 7: mod_base = OTHER; note = 2'-fluorouridine-3'-phosphate
  modified_base 8: mod_base = OTHER; note = 2'-O-methylguanosine-3'-phosphate
  modified_base 9: mod_base = OTHER; note = 2'-fluoroadenosine-3'-phosphate
  modified_base 10: mod_base = OTHER; note = 2'-fluorocytidine-3'-phosphate
  modified_base 11: mod_base = OTHER; note = 2'-fluorouridine-3'-phosphate
  modified_base 12: mod_base = OTHER; note = 2'-O-methyladenosine-3'-phosphate
  modified_base 13: mod_base = OTHER; note = 2'-O-methylguanosine-3'-phosphate
  modified_base 14: mod_base = OTHER; note = 2'-O-methyladenosine-3'-phosphate
  modified_base 15: mod_base = OTHER; note = 2'-O-methylguanosine-3'-phosphate
  modified_base 16: mod_base = OTHER; note = 2'-O-methylcytidine-3'-phosphate
  modified_base 17: mod_base = OTHER; note = 2'-O-methylcytidine-3'-phosphate
  modified_base 18: mod_base = OTHER; note = 2'-O-methyladenosine-3'-phosphate
  modified_base 19: mod_base = OTHER; note = 2'-O-methyladenosine-3'-phosphorothioate
  modified_base 20: mod_base = OTHER; note = 2'-O-methylcytidine-3'-phosphorothioate
  modified_base 21: mod_base = OTHER; note = 2'-O-methyladenosine-3'-phosphate
ccacactgactagagccaaca

SEQ ID NO: 2419 - RNA, 23 nt, synthetic construct
  source 1..23: mol_type = other RNA
  modified_base 1: mod_base = OTHER; note = Vinyl-phosphonate 2'-O-methyluridine-3'-phosphorothioate
  modified_base 2: mod_base = OTHER; note = 2'-fluoroguanosine-3'-phosphorothioate
  modified_base 3: mod_base = OTHER; note = 2'-O-methyluridine-3'-phosphate
  modified_base 4: mod_base = OTHER; note = 2'-O-methyluridine-3'-phosphate
  modified_base 5: mod_base = OTHER; note = 2'-O-methylguanosine-3'-phosphate
  modified_base 6: mod_base = OTHER; note = 2'-fluoroguanosine-3'-phosphate
  modified_base 7: mod_base = OTHER; note = 2'-O-methylcytidine-3'-phosphate
  modified_base 8: mod_base = OTHER; note = 2'-fluorouridine-3'-phosphate
  modified_base 9: mod_base = OTHER; note = 2'-fluorocytidine-3'-phosphate
  modified_base 10: mod_base = OTHER; note = 2'-O-methyluridine-3'-phosphate
  modified_base 11: mod_base = OTHER; note = 2'-O-methyladenosine-3'-phosphate
  modified_base 12: mod_base = OTHER; note = 2'-O-methylguanosine-3'-phosphate
  modified_base 13: mod_base = OTHER; note = 2'-O-methyluridine-3'-phosphate
  modified_base 14: mod_base = OTHER; note = 2'-fluorocytidine-3'-phosphate
  modified_base 15: mod_base = OTHER; note = 2'-O-methyladenosine-3'-phosphate
  modified_base 16: mod_base = OTHER; note = 2'-fluoroguanosine-3'-phosphate
  modified_base 17: mod_base = OTHER; note = 2'-O-methyluridine-3'-phosphate
  modified_base 18: mod_base = OTHER; note = 2'-O-methylguanosine-3'-phosphate
  modified_base 19: mod_base = OTHER; note = 2'-O-methyluridine-3'-phosphate
  modified_base 20: mod_base = OTHER; note = 2'-O-methylguanosine-3'-phosphate
  modified_base 21: mod_base = OTHER; note = 2'-O-methylguanosine-3'-phosphorothioate
  modified_base 22: mod_base = OTHER; note = 2'-O-methylguanosine-3'-phosphorothioate
  modified_base 23: mod_base = OTHER; note = 2'-O-methylcytidine-3'-phosphate
tgttggctctagtcagtgtgggc

SEQ ID NO: 2420 - RNA, 23 nt, synthetic construct
  source 1..23: mol_type = other RNA
gcccacactgactagagccaacc

SEQ ID NO: 2421 - RNA, 21 nt, synthetic construct
  source 1..21: mol_type = other RNA
catctctttaaccaaacttga

SEQ ID NO: 2422 - RNA, 21 nt, synthetic construct
  source 1..21: mol_type = other RNA
ctctaacaaataaacagaaca

SEQ ID NO: 2423 - RNA, 21 nt, synthetic construct
  source 1..21: mol_type = other RNA
tgcatagtcactcttttgata

SEQ ID NO: 2424 - RNA, 21 nt, synthetic construct
  source 1..21: mol_type = other RNA
aacttgatttttcatctctta

SEQ ID NO: 2425 - RNA, 21 nt, synthetic construct
  source 1..21: mol_type = other RNA
gacacattcttagcactgaaa

SEQ ID NO: 2426 - RNA, 21 nt, synthetic construct
  source 1..21: mol_type = other RNA
acgccttatttgatttaacta

SEQ ID NO: 2427 - RNA, 21 nt, synthetic construct
  source 1..21: mol_type = other RNA
tagtcttcgaaatgttaataa

SEQ ID NO: 2428 - RNA, 21 nt, synthetic construct
  source 1..21: mol_type = other RNA
gatggacttttaagttgttta

SEQ ID NO: 2429 - RNA, 21 nt, synthetic construct
  source 1..21: mol_type = other RNA
tgcttttttcacttaataata

SEQ ID NO: 2430 - RNA, 21 nt, synthetic construct
  source 1..21: mol_type = other RNA
acataataactactgcataaa

SEQ ID NO: 2431 - RNA, 21 nt, synthetic construct
  source 1..21: mol_type = other RNA
tactagtgtcactttctgaga

SEQ ID NO: 2432 - RNA, 21 nt, synthetic construct
  source 1..21: mol_type = other RNA
caatcagatgcaaaagctcta

SEQ ID NO: 2433 - RNA, 21 nt, synthetic construct
  source 1..21: mol_type = other RNA
taagagtaattgcctaactta

SEQ ID NO: 2434 - RNA, 21 nt, synthetic construct
  source 1..21: mol_type = other RNA
ggcttgtttatgaacattaaa

SEQ ID NO: 2435 - RNA, 21 nt, synthetic construct
  source 1..21: mol_type = other RNA
tttttgctactgcaaacgata

SEQ ID NO: 2436 - RNA, 21 nt, synthetic construct
  source 1..21: mol_type = other RNA
aacgatgctataataaatgta

SEQ ID NO: 2437 - RNA, 21 nt, synthetic construct
  source 1..21: mol_type = other RNA
tggttgttactataagagtaa

SEQ ID NO: 2438 - RNA, 21 nt, synthetic construct
  source 1..21: mol_type = other RNA
ctgatgaacatcctctgatga

SEQ ID NO: 2439 - RNA, 21 nt, synthetic construct
  source 1..21: mol_type = other RNA
ctgcggataaatatttgccaa

SEQ ID NO: 2440 - RNA, 21 nt, synthetic construct
  source 1..21: mol_type = other RNA
ccaaaattcagattctgccta

SEQ ID NO: 2441 - RNA, 21 nt, synthetic construct
  source 1..21: mol_type = other RNA
aaggatgtgtgtctttctcca

SEQ ID NO: 2442 - RNA, 21 nt, synthetic construct
  source 1..21: mol_type = other RNA
tgcgaatgcttccagaagaca

SEQ ID NO: 2443 - RNA, 21 nt, synthetic construct
  source 1..21: mol_type = other RNA
cgaatgagtaactcctgtcaa

SEQ ID NO: 2444 - RNA, 21 nt, synthetic construct
  source 1..21: mol_type = other RNA
tgggtgtttatttaaaataca

SEQ ID NO: 2445 - RNA, 21 nt, synthetic construct
  source 1..21: mol_type = other RNA
caaaagatatttgaccgttta

SEQ ID NO: 2446 - RNA, 21 nt, synthetic construct
  source 1..21: mol_type = other RNA
atacagcttggagagatttta

SEQ ID NO: 2447 - RNA, 21 nt, synthetic construct
  source 1..21: mol_type = other RNA
aaatgcattcatacaattaca

SEQ ID NO: 2448 - RNA, 21 nt, synthetic construct
  source 1..21: mol_type = other RNA
tcccactcgctctttttgata

SEQ ID NO: 2449 - RNA, 21 nt, synthetic construct
  source 1..21: mol_type = other RNA
gcttgtgtttacacaagctga

SEQ ID NO: 2450 - RNA, 21 nt, synthetic construct
  source 1..21: mol_type = other RNA
cctgccttacatggcttgtta

SEQ ID NO: 2451 - RNA, 21 nt, synthetic construct
  source 1..21: mol_type = other RNA
gagatttttgtatcacattaa

SEQ ID NO: 2452 - RNA, 21 nt, synthetic construct
  source 1..21: mol_type = other RNA
agcacttcagacaaggtccta

SEQ ID NO: 2453 - RNA, 21 nt, synthetic construct
  source 1..21: mol_type = other RNA
tcactctcagagccagtttta

SEQ ID NO: 2454 - RNA, 21 nt, synthetic construct
  source 1..21: mol_type = other RNA
actgaactcctctgtgatcta

SEQ ID NO: 2455 - RNA, 21 nt, synthetic construct
  source 1..21: mol_type = other RNA
tagttccctaatgatggacta

SEQ ID NO: 2456 - RNA, 21 nt, synthetic construct
  source 1..21: mol_type = other RNA
ggcgttactgacaacgtggta

SEQ ID NO: 2457 - RNA, 21 nt, synthetic construct
  source 1..21: mol_type = other RNA
tgatctaggatgatctgttca

SEQ ID NO: 2458 - RNA, 21 nt, synthetic construct
  source 1..21: mol_type = other RNA
gtgatgatatatagactttaa

SEQ ID NO: 2459 - RNA, 21 nt, synthetic construct
  source 1..21: mol_type = other RNA
ggctactttgaagggaacaaa

SEQ ID NO: 2460 - RNA, 21 nt, synthetic construct
  source 1..21: mol_type = other RNA
ctgctctgattctatggctta

SEQ ID NO: 2461 - RNA, 21 nt, synthetic construct
  source 1..21: mol_type = other RNA
agattgcttctgagctgaaga

SEQ ID NO: 2462 - RNA, 21 nt, synthetic construct
  source 1..21: mol_type = other RNA
gccatctcttgtgtatgcaga

SEQ ID NO: 2463 - RNA, 21 nt, synthetic construct
  source 1..21: mol_type = other RNA
agccacatttccatttgcata

SEQ ID NO: 2464 - RNA, 21 nt, synthetic construct
  source 1..21: mol_type = other RNA
tccagacagaaggttttgaca

SEQ ID NO: 2465 - RNA, 21 nt, synthetic construct
  source 1..21: mol_type = other RNA
ctctcgatacaccgtgcagaa

SEQ ID NO: 2466 - RNA, 21 nt, synthetic construct
  source 1..21: mol_type = other RNA
ggcgcactttttatttttata

SEQ ID NO: 2467 - RNA, 21 nt, synthetic construct
  source 1..21: mol_type = other RNA
gagcgttgccactttcaaaga

SEQ ID NO: 2468 - RNA, 21 nt, synthetic construct
  source 1..21: mol_type = other RNA
ttgcatcattactgccttcaa

SEQ ID NO: 2469 - RNA, 21 nt, synthetic construct
  source 1..21: mol_type = other RNA
gcgcaagaagagctgagtcga

SEQ ID NO: 2470 - RNA, 21 nt, synthetic construct
  source 1..21: mol_type = other RNA
tgcggaatttgctgccaacaa

SEQ ID NO: 2471 - RNA, 21 nt, synthetic construct
  source 1..21: mol_type = other RNA
gtgtgcaatgcctatgagaaa

SEQ ID NO: 2472 - RNA, 21 nt, synthetic construct
  source 1..21: mol_type = other RNA
gaattcaaatattgcaaaaga

SEQ ID NO: 2473 - RNA, 21 nt, synthetic construct
  source 1..21: mol_type = other RNA
cctgtgtgctttgtagagcca

SEQ ID NO: 2474 - RNA, 21 nt, synthetic construct
  source 1..21: mol_type = other RNA
tccagacaaggaagagtcaga

SEQ ID NO: 2475 - RNA, 21 nt, synthetic construct
  source 1..21: mol_type = other RNA
tgccagaaacagcatcagcga

SEQ ID NO: 2476 - RNA, 21 nt, synthetic construct
  source 1..21: mol_type = other RNA
gcataatatggatacgcctta

SEQ ID NO: 2477 - RNA, 21 nt, synthetic construct
  source 1..21: mol_type = other RNA
agcctcatcctgatgatgcta

SEQ ID NO: 2478 - RNA, 21 nt, synthetic construct
  source 1..21: mol_type = other RNA
aagcctcttgagcagggttga

SEQ ID NO: 2479 - RNA, 21 nt, synthetic construct
  source 1..21: mol_type = other RNA
taaagggaagaagttgaagca

SEQ ID NO: 2480 - RNA, 21 nt, synthetic construct
  source 1..21: mol_type = other RNA
ggcagcattgagaaggtggta

SEQ ID NO: 2481 - RNA, 21 nt, synthetic construct
  source 1..21: mol_type = other RNA
gtcagcgacagcttcttccga

SEQ ID NO: 2482 - RNA, 21 nt, synthetic construct
  source 1..21: mol_type = other RNA
ctgctgtctcctcaaccaaga

SEQ ID NO: 2483 - RNA, 21 nt, synthetic construct
  source 1..21: mol_type = other RNA
aggaggaagaattggagacta

SEQ ID NO: 2484 - RNA, 21 nt, synthetic construct
  source 1..21: mol_type = other RNA
cctgtcaccactctgaaggta

SEQ ID NO: 2485 - RNA, 21 nt, synthetic construct
  source 1..21: mol_type = other RNA
agactttatgtatagccacaa

SEQ ID NO: 2486 - RNA, 21 nt, synthetic construct
  source 1..21: mol_type = other RNA
gttacgcatgcctgcttttta

SEQ ID NO: 2487 - RNA, 21 nt, synthetic construct
  source 1..21: mol_type = other RNA
ccagttcacagctgccaatga

SEQ ID NO: 2488 - RNA, 21 nt, synthetic construct
  source 1..21: mol_type = other RNA
caggcacgtgtgtatgcacta

SEQ ID NO: 2489 - RNA, 21 nt, synthetic construct
  source 1..21: mol_type = other RNA
atggcagtcaacaaaggccta

SEQ ID NO: 2490 - RNA, 21 nt, synthetic construct
  source 1..21: mol_type = other RNA
caaacttgtggccaaaagata

SEQ ID NO: 2491 - RNA, 21 nt, synthetic construct
  source 1..21: mol_type = other RNA
tctgaccaacaccctctctca

SEQ ID NO: 2492 - RNA, 21 nt, synthetic construct
  source 1..21: mol_type = other RNA
tcacattataaatcccactca

SEQ ID NO: 2493 - RNA, 21 nt, synthetic construct
  source 1..21: mol_type = other RNA
gaggagaacaagttcagtgaa

SEQ ID NO: 2494 - RNA, 21 nt, synthetic construct
  source 1..21: mol_type = other RNA
gagcaggagaatgtgctgcaa

SEQ ID NO: 2495 - RNA, 21 nt, synthetic construct
  source 1..21: mol_type = other RNA
gaagacctacaccagcactaa

SEQ ID NO: 2496 - RNA, 21 nt, synthetic construct
  source 1..21: mol_type = other RNA
aggcctcaccttgctggatga

SEQ ID NO: 2497 - RNA, 21 nt, synthetic construct
  source 1..21: mol_type = other RNA
agccagctgcttgctcacaga

SEQ ID NO: 2498 - RNA, 21 nt, synthetic construct
  source 1..21: mol_type = other RNA
gggctctgtgagactgaggta

SEQ ID NO: 2499 - RNA, 21 nt, synthetic construct
  source 1..21: mol_type = other RNA
cgagagcgaattccgggacaa

SEQ ID NO: 2500 - RNA, 21 nt, synthetic construct
  source 1..21: mol_type = other RNA
gtggcacataccctgcagaaa

SEQ ID NO: 2501 - RNA, 21 nt, synthetic construct
  source 1..21: mol_type = other RNA
gtggacacagtggtgcattaa

SEQ ID NO: 2502 - RNA, 21 nt, synthetic construct
  source 1..21: mol_type = other RNA
aagcccagaagtctcccaaga

SEQ ID NO: 2503 - RNA, 21 nt, synthetic construct
  source 1..21: mol_type = other RNA
ggccatgtccctatcagatga

SEQ ID NO: 2504 - RNA, 21 nt, synthetic construct
  source 1..21: mol_type = other RNA
gccggcgggtttctctaacaa

SEQ ID NO: 2505 - RNA, 21 nt, synthetic construct
  source 1..21: mol_type = other RNA
ctgaaggacaccatctccaca

SEQ ID NO: 2506 - RNA, 21 nt, synthetic construct
  source 1..21: mol_type = other RNA
gaccaccatctcggctgtgaa

SEQ ID NO: 2507 - RNA, 21 nt, synthetic construct
  source 1..21: mol_type = other RNA
ccagtttttaagggacaccaa

SEQ ID NO: 2508 - RNA, 21 nt, synthetic construct
  source 1..21: mol_type = other RNA
ggccagagacactgcggaata

SEQ ID NO: 2509 - RNA, 21 nt, synthetic construct
  source 1..21: mol_type = other RNA
cgttcccatcgcgagcactta

SEQ ID NO: 2510 - RNA, 21 nt, synthetic construct
  source 1..21: mol_type = other RNA
ccgggacatcgacaacccaca

SEQ ID NO: 2511 - RNA, 21 nt, synthetic construct
  source 1..21: mol_type = other RNA
tctgatgatctaggctcccaa

SEQ ID NO: 2512 - RNA, 21 nt, synthetic construct
  source 1..21: mol_type = other RNA
ctgcagaagaccctccagaca

SEQ ID NO: 2513 - RNA, 21 nt, synthetic construct
  source 1..21: mol_type = other RNA
cgccagtagcttggctgccta

SEQ ID NO: 2514 - RNA, 21 nt, synthetic construct
  source 1..21: mol_type = other RNA
cgcttcacaggctgagtccaa

SEQ ID NO: 2515 - RNA, 21 nt, synthetic construct
  source 1..21: mol_type = other RNA
tttttttagcatccttttgga

SEQ ID NO: 2516 - RNA, 21 nt, synthetic construct
  source 1..21: mol_type = other RNA
gaagccaaagcgcagggtcaa

SEQ ID NO: 2517 - RNA, 21 nt, synthetic construct
  source 1..21: mol_type = other RNA
gaggaggatcatgaggaccaa

SEQ ID NO: 2518 - RNA, 21 nt, synthetic construct
  source 1..21: mol_type = other RNA
gcacgcattacagccagctga

SEQ ID NO: 2519 - RNA, 21 nt, synthetic construct
  source 1..21: mol_type = other RNA
cttcattgaaaaccaccacga

SEQ ID NO: 2520 - RNA, 21 nt, synthetic construct
  source 1..21: mol_type = other RNA
tttttgatggccacataataa

SEQ ID NO: 2521 - RNA, 21 nt, synthetic construct
  source 1..21: mol_type = other RNA
ccacctggaggaaaagatcca

SEQ ID NO: 2522 - RNA, 21 nt, synthetic construct
  source 1..21: mol_type = other RNA
caaggccaagccaagcctcta

SEQ ID NO: 2523 - RNA, 21 nt, synthetic construct
  source 1..21: mol_type = other RNA
gaggaccagacagacacggaa

SEQ ID NO: 2524 - RNA, 21 nt, synthetic construct
  source 1..21: mol_type = other RNA
gatgccctgaagggcgttaca

SEQ ID NO: 2525 - RNA, 21 nt, synthetic construct
  source 1..21: mol_type = other RNA
ccaacactcgagctggccgaa

SEQ ID NO: 2526 - RNA, 21 nt, synthetic construct
  source 1..21: mol_type = other RNA
cagggctatgcacctgcagga

SEQ ID NO: 2527 - RNA, 21 nt, synthetic construct
  source 1..21: mol_type = other RNA
aaggtggtggagtacctccta

SEQ ID NO: 2528 - RNA, 21 nt, synthetic construct
  source 1..21: mol_type = other RNA
ttgaagcttgaggagcgagga

SEQ ID NO: 2529 - RNA, 21 nt, synthetic construct
  source 1..21: mol_type = other RNA
cgtggccatgtggatcccaga

SEQ ID NO: 2530 - RNA, 21 nt, synthetic construct
  source 1..21: mol_type = other RNA
cagcactaaggaagcccacca

SEQ ID NO: 2531 - RNA, 21 nt, synthetic construct
  source 1..21: mol_type = other RNA
gtcgctgatggagcccgagaa

SEQ ID NO: 2532 - RNA, 21 nt, synthetic construct
  source 1..21: mol_type = other RNA
ttcttccggcccagcgtcata

SEQ ID NO: 2533 - RNA, 21 nt, synthetic construct
  source 1..21: mol_type = other RNA
ctgctcctggacaccagcaaa

SEQ ID NO: 2534 - RNA, 21 nt, synthetic construct
  source 1..21: mol_type = other RNA
tttctgagtacccgccgctta

SEQ ID NO: 2535 - RNA, 21 nt, synthetic construct
  source 1..21: mol_type = other RNA
cgcaggctgtccacccagtta

SEQ ID NO: 2536 - RNA, 21 nt, synthetic construct
  source 1..21: mol_type = other RNA
ggctgtgacatgggcacctga

SEQ ID NO: 2537 - RNA, 21 nt, synthetic construct
  source 1..21: mol_type = other RNA
tcagtgaggtagcagccctga

SEQ ID NO: 2538 - RNA, 21 nt, synthetic construct
  source 1..21: mol_type = other RNA
agcgtcatggagcccatccta

SEQ ID NO: 2539 - RNA, 21 nt, synthetic construct
  source 1..21: mol_type = other RNA
ctggatggagacctccctgaa

SEQ ID NO: 2540 - RNA, 21 nt, synthetic construct
  source 1..21: mol_type = other RNA
tcagccggagtgagtgttgga

SEQ ID NO: 2541 - RNA, 21 nt, synthetic construct
  source 1..21: mol_type = other RNA
ctggccgactggcttctggaa

SEQ ID NO: 2542 - RNA, 21 nt, synthetic construct
  source 1..21: mol_type = other RNA
ggtgctgcacctcacaccaga

SEQ ID NO: 2543 - RNA, 21 nt, synthetic construct
  source 1..21: mol_type = other RNA
ggctgcctggagcatggagca

SEQ ID NO: 2544 - RNA, 21 nt, synthetic construct
  source 1..21: mol_type = other RNA
cctgcagctgtgctgggcata

SEQ ID NO: 2545 - RNA, 21 nt, synthetic construct
  source 1..21: mol_type = other RNA
agtggccatgcaggcggtgta

SEQ ID NO: 2546 - RNA, 21 nt, synthetic construct
  source 1..21: mol_type = other RNA
gacttggccttgggcagcata

SEQ ID NO: 2547 - RNA, 21 nt, synthetic construct
  source 1..21: mol_type = other RNA
gagcgaagtgcgggtacccta

SEQ ID NO: 2548 - RNA, 21 nt, synthetic construct
  source 1..21: mol_type = other RNA
ctggtggcctctgtgtgcaaa

SEQ ID NO: 2549 - RNA, 21 nt, synthetic construct
  source 1..21: mol_type = other RNA
aacccaccagccgaggtcgaa

SEQ ID NO: 2550 - RNA, 21 nt, synthetic construct
  source 1..21: mol_type = other RNA
tgatgctgccaaggcgcacta

SEQ ID NO: 2551 - RNA, 21 nt, synthetic construct
  source 1..21: mol_type = other RNA
ccaatgagctggcctgccgaa

SEQ ID NO: 2552 - RNA, 21 nt, synthetic construct
  source 1..21: mol_type = other RNA
gtgctgcagcgggtcctgcaa

SEQ ID NO: 2553 - RNA, 21 nt, synthetic construct
  source 1..21: mol_type = other RNA
gggcgtgcagagcgccagtaa

SEQ ID NO: 2554 - RNA, 21 nt, synthetic construct
  source 1..21: mol_type = other RNA
ggtgagtggcacctgcgaata

SEQ ID NO: 2555 - RNA, 21 nt, synthetic construct
  source 1..21: mol_type = other RNA
acggagggagaggacacggaa

SEQ ID NO: 2556 - RNA, 23 nt, synthetic construct
  source 1..23: mol_type = other RNA
tcaagtttggttaaagagatgaa

SEQ ID NO: 2557 - RNA, 23 nt, synthetic construct
  source 1..23: mol_type = other RNA
tgttctgtttatttgttagagaa

SEQ ID NO: 2558 - RNA, 23 nt, synthetic construct
  source 1..23: mol_type = other RNA
tatcaaaagagtgactatgcagg

SEQ ID NO: 2559 - RNA, 23 nt, synthetic construct
  source 1..23: mol_type = other RNA
taagagatgaaaaatcaagttag

SEQ ID NO: 2560 - RNA, 23 nt, synthetic construct
  source 1..23: mol_type = other RNA
tttcagtgctaagaatgtgtcaa

SEQ ID NO: 2561 - RNA, 23 nt, synthetic construct
  source 1..23: mol_type = other RNA
tagttaaatcaaataaggcgtat

SEQ ID NO: 2562 - RNA, 23 nt, synthetic construct
  source 1..23: mol_type = other RNA
ttattaacatttcgaagactagg

SEQ ID NO: 2563 - RNA, 23 nt, synthetic construct
  source 1..23: mol_type = other RNA
taaacaacttaaaagtccatcat

SEQ ID NO: 2564 - RNA, 23 nt, synthetic construct
  source 1..23: mol_type = other RNA
tattattaagtgaaaaaagcagg

SEQ ID NO: 2565 - RNA, 23 nt, synthetic construct
  source 1..23: mol_type = other RNA
tttatgcagtagttattatgtgg

SEQ ID NO: 2566 - RNA, 23 nt, synthetic construct
  source 1..23: mol_type = other RNA
tctcagaaagtgacactagtatt

SEQ ID NO: 2567 - RNA, 23 nt, synthetic construct
  source 1..23: mol_type = other RNA
tagagcttttgcatctgattgtt

SEQ ID NO: 2568 - RNA, 23 nt, synthetic construct
  source 1..23: mol_type = other RNA
taagttaggcaattactcttata

SEQ ID NO: 2569 - RNA, 23 nt, synthetic construct
  source 1..23: mol_type = other RNA
tttaatgttcataaacaagccat

SEQ ID NO: 2570 - RNA, 23 nt, synthetic construct
  source 1..23: mol_type = other RNA
tatcgtttgcagtagcaaaaaag

SEQ ID NO: 2571 - RNA, 23 nt, synthetic construct
  source 1..23: mol_type = other RNA
tacatttattatagcatcgtttg

SEQ ID NO: 2572 - RNA, 23 nt, synthetic construct
  source 1..23: mol_type = other RNA
ttactcttatagtaacaaccaag

SEQ ID NO: 2573 - RNA, 23 nt, synthetic construct
  source 1..23: mol_type = other RNA
tcatcagaggatgttcatcagag

SEQ ID NO: 2574 - RNA, 23 nt, synthetic construct
  source 1..23: mol_type = other RNA
ttggcaaatatttatccgcagag

SEQ ID NO: 2575 - RNA, 23 nt, synthetic construct
  source 1..23: mol_type = other RNA
taggcagaatctgaattttggaa

SEQ ID NO: 2576 - RNA, 23 nt, synthetic construct
  source 1..23: mol_type = other RNA
tggagaaagacacacatcctttt

SEQ ID NO: 2577 - RNA, 23 nt, synthetic construct
  source 1..23: mol_type = other RNA
tgtcttctggaagcattcgcagg

SEQ ID NO: 2578 - RNA, 23 nt, synthetic construct
  source 1..23: mol_type = other RNA
ttgacaggagttactcattcgtg

SEQ ID NO: 2579 - RNA, 23 nt, synthetic construct
  source 1..23: mol_type = other RNA
tgtattttaaataaacacccaag

SEQ ID NO: 2580 - RNA, 23 nt, synthetic construct
  source 1..23: mol_type = other RNA
taaacggtcaaatatcttttggc

SEQ ID NO: 2581 - RNA, 23 nt, synthetic construct
  source 1..23: mol_type = other RNA
taaaatctctccaagctgtatta

SEQ ID NO: 2582 - RNA, 23 nt, synthetic construct
  source 1..23: mol_type = other RNA
tgtaattgtatgaatgcattttc

SEQ ID NO: 2583 - RNA, 23 nt, synthetic construct
  source 1..23: mol_type = other RNA
tatcaaaaagagcgagtgggatt

SEQ ID NO: 2584 - RNA, 23 nt, synthetic construct
  source 1..23: mol_type = other RNA
tcagcttgtgtaaacacaagcgg

SEQ ID NO: 2585 - RNA, 23 nt, synthetic construct
  source 1..23: mol_type = other RNA
taacaagccatgtaaggcaggtg

SEQ ID NO: 2586 - RNA, 23 nt, synthetic construct
  source 1..23: mol_type = other RNA
ttaatgtgatacaaaaatctctc

SEQ ID NO: 2587 - RNA, 23 nt, synthetic construct
  source 1..23: mol_type = other RNA
taggaccttgtctgaagtgctcg

SEQ ID NO: 2588 - RNA, 23 nt, synthetic construct
  source 1..23: mol_type = other RNA
taaaactggctctgagagtgaag

SEQ ID NO: 2589 - RNA, 23 nt, synthetic construct
  source 1..23: mol_type = other RNA
tagatcacagaggagttcagtgc

SEQ ID NO: 2590 - RNA, 23 nt, synthetic construct
  source 1..23: mol_type = other RNA
tagtccatcattagggaactagt

SEQ ID NO: 2591 - RNA, 23 nt, synthetic construct
  source 1..23: mol_type = other RNA
taccacgttgtcagtaacgccct

SEQ ID NO: 2592 - RNA, 23 nt, synthetic construct
  source 1..23: mol_type = other RNA
tgaacagatcatcctagatcaca

SEQ ID NO: 2593 - RNA, 23 nt, synthetic construct
  source 1..23: mol_type = other RNA
ttaaagtctatatatcatcacca

SEQ ID NO: 2594 - RNA, 23 nt, synthetic construct
  source 1..23: mol_type = other RNA
tttgttcccttcaaagtagcctg

SEQ ID NO: 2595 - RNA, 23 nt, synthetic construct
  source 1..23: mol_type = other RNA
taagccatagaatcagagcaggc

SEQ ID NO: 2596 - RNA, 23 nt, synthetic construct
  source 1..23: mol_type = other RNA
tcttcagctcagaagcaatcttt

SEQ ID NO: 2597 - RNA, 23 nt, synthetic construct
  source 1..23: mol_type = other RNA
tctgcatacacaagagatggcac

SEQ ID NO: 2598 - RNA, 23 nt, synthetic construct
  source 1..23: mol_type = other RNA
tatgcaaatggaaatgtggctgt

SEQ ID NO: 2599 - RNA, 23 nt, synthetic construct
  source 1..23: mol_type = other RNA
tgtcaaaaccttctgtctggacc

SEQ ID NO: 2600 - RNA, 23 nt, synthetic construct
  source 1..23: mol_type = other RNA
ttctgcacggtgtatcgagagag

SEQ ID NO: 2601 - RNA, 23 nt, synthetic construct
  source 1..23: mol_type = other RNA
tataaaaataaaaagtgcgcctt

SEQ ID NO: 2602 - RNA, 23 nt, synthetic construct
  source 1..23: mol_type = other RNA
tctttgaaagtggcaacgctcgc

SEQ ID NO: 2603 - RNA, 23 nt, synthetic construct
  source 1..23: mol_type = other RNA
ttgaaggcagtaatgatgcaaat

SEQ ID NO: 2604 - RNA, 23 nt, synthetic construct
  source 1..23: mol_type = other RNA
tcgactcagctcttcttgcgcag

SEQ ID NO: 2605 - RNA, 23 nt, synthetic construct
  source 1..23: mol_type = other RNA
ttgttggcagcaaattccgcagt

SEQ ID NO: 2606 - RNA, 23 nt, synthetic construct
  source 1..23: mol_type = other RNA
tttctcataggcattgcacacag

SEQ ID NO: 2607 - RNA, 23 nt, synthetic construct
  source 1..23: mol_type = other RNA
tcttttgcaatatttgaattctg

SEQ ID NO: 2608 - RNA, 23 nt, synthetic construct
  source 1..23: mol_type = other RNA
tggctctacaaagcacacaggcc

SEQ ID NO: 2609 - RNA, 23 nt, synthetic construct
  source 1..23: mol_type = other RNA
tctgactcttccttgtctggagg

SEQ ID NO: 2610 - RNA, 23 nt, synthetic construct
  source 1..23: mol_type = other RNA
tcgctgatgctgtttctggcact

SEQ ID NO: 2611 - RNA, 23 nt, synthetic construct
  source 1..23: mol_type = other RNA
taaggcgtatccatattatgcag

SEQ ID NO: 2612 - RNA, 23 nt, synthetic construct
  source 1..23: mol_type = other RNA
tagcatcatcaggatgaggctga

SEQ ID NO: 2613 - RNA, 23 nt, synthetic construct
  source 1..23: mol_type = other RNA
tcaaccctgctcaagaggcttgg

SEQ ID NO: 2614 - RNA, 23 nt, synthetic construct
  source 1..23: mol_type = other RNA
tgcttcaacttcttccctttaat

SEQ ID NO: 2615 - RNA, 23 nt, synthetic construct
  source 1..23: mol_type = other RNA
taccaccttctcaatgctgccca

SEQ ID NO: 2616 - RNA, 23 nt, synthetic construct
  source 1..23: mol_type = other RNA
tcggaagaagctgtcgctgaccc

SEQ ID NO: 2617 - RNA, 23 nt, synthetic construct
  source 1..23: mol_type = other RNA
tcttggttgaggagacagcaggg

SEQ ID NO: 2618 - RNA, 23 nt, synthetic construct
  source 1..23: mol_type = other RNA
tagtctccaattcttcctcctcc

SEQ ID NO: 2619 - RNA, 23 nt, synthetic construct
  source 1..23: mol_type = other RNA
taccttcagagtggtgacaggag

SEQ ID NO: 2620 - RNA, 23 nt, synthetic construct
  source 1..23: mol_type = other RNA
ttgtggctatacataaagtctat

SEQ ID NO: 2621 - RNA, 23 nt, synthetic construct
  source 1..23: mol_type = other RNA
taaaaagcaggcatgcgtaacac

SEQ ID NO: 2622 - RNA, 23 nt, synthetic construct
  source 1..23: mol_type = other RNA
tcattggcagctgtgaactgggt

SEQ ID NO: 2623 - RNA, 23 nt, synthetic construct
  source 1..23: mol_type = other RNA
tagtgcatacacacgtgcctgca

SEQ ID NO: 2624 - RNA, 23 nt, synthetic construct
  source 1..23: mol_type = other RNA
taggcctttgttgactgccatcc

SEQ ID NO: 2625 - RNA, 23 nt, synthetic construct
  source 1..23: mol_type = other RNA
tatcttttggccacaagtttggt

SEQ ID NO: 2626 - RNA, 23 nt, synthetic construct
  source 1..23: mol_type = other RNA
tgagagagggtgttggtcagagc

SEQ ID NO: 2627 - RNA, 23 nt, synthetic construct
  source 1..23: mol_type = other RNA
tgagtgggatttataatgtgata

SEQ ID NO: 2628 - RNA, 23 nt, synthetic construct
  source 1..23: mol_type = other RNA
ttcactgaacttgttctcctcag

SEQ ID NO: 2629 - RNA, 23 nt, synthetic construct
  source 1..23: mol_type = other RNA
ttgcagcacattctcctgctcag

SEQ ID NO: 2630 - RNA, 23 nt, synthetic construct
  source 1..23: mol_type = other RNA
ttagtgctggtgtaggtcttctg

SEQ ID NO: 2631 - RNA, 23 nt, synthetic construct
  source 1..23: mol_type = other RNA
tcatccagcaaggtgaggccttt

SEQ ID NO: 2632 - RNA, 23 nt, synthetic construct
  source 1..23: mol_type = other RNA
tctgtgagcaagcagctggctct

SEQ ID NO: 2633 - RNA, 23 nt, synthetic construct
  source 1..23: mol_type = other RNA
tacctcagtctcacagagcccag

SEQ ID NO: 2634 - RNA, 23 nt, synthetic construct
  source 1..23: mol_type = other RNA
ttgtcccggaattcgctctcggg

SEQ ID NO: 2635 - RNA, 23 nt, synthetic construct
  source 1..23: mol_type = other RNA
tttctgcagggtatgtgccacac

SEQ ID NO: 2636 - RNA, 23 nt, synthetic construct
  source 1..23: mol_type = other RNA
ttaatgcaccactgtgtccacca

SEQ ID NO: 2637 - RNA, 23 nt, synthetic construct
  source 1..23: mol_type = other RNA
tcttgggagacttctgggcttgc

SEQ ID NO: 2638 - RNA, 23 nt, synthetic construct
  source 1..23: mol_type = other RNA
tcatctgatagggacatggccct

SEQ ID NO: 2639 - RNA, 23 nt, synthetic construct
  source 1..23: mol_type = other RNA
ttgttagagaaacccgccggccc

SEQ ID NO: 2640 - RNA, 23 nt, synthetic construct
  source 1..23: mol_type = other RNA
tgtggagatggtgtccttcagct

SEQ ID NO: 2641 - RNA, 23 nt, synthetic construct
  source 1..23: mol_type = other RNA
ttcacagccgagatggtggtctg

SEQ ID NO: 2642 - RNA, 23 nt, synthetic construct
  source 1..23: mol_type = other RNA
ttggtgtcccttaaaaactggct

SEQ ID NO: 2643 - RNA, 23 nt, synthetic construct
  source 1..23: mol_type = other RNA
tattccgcagtgtctctggccac

SEQ ID NO: 2644 - RNA, 23 nt, synthetic construct
  source 1..23: mol_type = other RNA
taagtgctcgcgatgggaacgct

SEQ ID NO: 2645 - RNA, 23 nt, synthetic construct
  source 1..23: mol_type = other RNA
tgtgggttgtcgatgtcccggaa

SEQ ID NO: 2646 - RNA, 23 nt, synthetic construct
  source 1..23: mol_type = other RNA
ttgggagcctagatcatcagagg

SEQ ID NO: 2647 - RNA, 23 nt, synthetic construct
  source 1..23: mol_type = other RNA
tgtctggagggtcttctgcaggg

SEQ ID NO: 2648 - RNA, 23 nt, synthetic construct
  source 1..23: mol_type = other RNA
taggcagccaagctactggcgct

SEQ ID NO: 2649 - RNA, 23 nt, synthetic construct
  source 1..23: mol_type = other RNA
ttggactcagcctgtgaagcggc

SEQ ID NO: 2650 - RNA, 23 nt, synthetic construct
  source 1..23: mol_type = other RNA
tccaaaaggatgctaaaaaaaaa

SEQ ID NO: 2651 - RNA, 23 nt, synthetic construct
  source 1..23: mol_type = other RNA
ttgaccctgcgctttggcttctc

SEQ ID NO: 2652 - RNA, 23 nt, synthetic construct
  source 1..23: mol_type = other RNA
ttggtcctcatgatcctcctcct

SEQ ID NO: 2653 - RNA, 23 nt, synthetic construct
  source 1..23: mol_type = other RNA
tcagctggctgtaatgcgtgcgg

SEQ ID NO: 2654 - RNA, 23 nt, synthetic construct
  source 1..23: mol_type = other RNA
tcgtggtggttttcaatgaaggg

SEQ ID NO: 2655 - RNA, 23 nt, synthetic construct
  source 1..23: mol_type = other RNA
ttattatgtggccatcaaaaaga

SEQ ID NO: 2656 - RNA, 23 nt, synthetic construct
  source 1..23: mol_type = other RNA
tggatcttttcctccaggtggtc

SEQ ID NO: 2657 - RNA, 23 nt, synthetic construct
  source 1..23: mol_type = other RNA
tagaggcttggcttggccttggg

SEQ ID NO: 2658 - RNA, 23 nt, synthetic construct
  source 1..23: mol_type = other RNA
ttccgtgtctgtctggtcctcat

SEQ ID NO: 2659 - RNA, 23 nt, synthetic construct
  source 1..23: mol_type = other RNA
tgtaacgcccttcagggcatctg

SEQ ID NO: 2660 - RNA, 23 nt, synthetic construct
  source 1..23: mol_type = other RNA
ttcggccagctcgagtgttggca

SEQ ID NO: 2661 - RNA, 23 nt, synthetic construct
  source 1..23: mol_type = other RNA
tcctgcaggtgcatagccctgca

SEQ ID NO: 2662 - RNA, 23 nt, synthetic construct
  source 1..23: mol_type = other RNA
taggaggtactccaccaccttct

SEQ ID NO: 2663 - RNA, 23 nt, synthetic construct
  source 1..23: mol_type = other RNA
tcctcgctcctcaagcttcaact

SEQ ID NO: 2664 - RNA, 23 nt, synthetic construct
  source 1..23: mol_type = other RNA
tctgggatccacatggccacggt

SEQ ID NO: 2665 - RNA, 23 nt, synthetic construct
  source 1..23: mol_type = other RNA
tggtgggcttccttagtgctggt

SEQ ID NO: 2666 - RNA, 23 nt, synthetic construct
  source 1..23: mol_type = other RNA
ttctcgggctccatcagcgacag

SEQ ID NO: 2667 - RNA, 23 nt, synthetic construct
  source 1..23: mol_type = other RNA
tatgacgctgggccggaagaagc

SEQ ID NO: 2668 - RNA, 23 nt, synthetic construct
  source 1..23: mol_type = other RNA
tttgctggtgtccaggagcaggg

SEQ ID NO: 2669 - RNA, 23 nt, synthetic construct
  source 1..23: mol_type = other RNA
taagcggcgggtactcagaaagt

SEQ ID NO: 2670 - RNA, 23 nt, synthetic construct
  source 1..23: mol_type = other RNA
taactgggtggacagcctgcgga

SEQ ID NO: 2671 - RNA, 23 nt, synthetic construct
  source 1..23: mol_type = other RNA
tcaggtgcccatgtcacagccga

SEQ ID NO: 2672 - RNA, 23 nt, synthetic construct
  source 1..23: mol_type = other RNA
tcagggctgctacctcactgaac

SEQ ID NO: 2673 - RNA, 23 nt, synthetic construct
  source 1..23: mol_type = other RNA
taggatgggctccatgacgctgg

SEQ ID NO: 2674 - RNA, 23 nt, synthetic construct
  source 1..23: mol_type = other RNA
ttcagggaggtctccatccagca

SEQ ID NO: 2675 - RNA, 23 nt, synthetic construct
  source 1..23: mol_type = other RNA
tccaacactcactccggctgacc

SEQ ID NO: 2676 - RNA, 23 nt, synthetic construct
  source 1..23: mol_type = other RNA
ttccagaagccagtcggccagct

SEQ ID NO: 2677 - RNA, 23 nt, synthetic construct
  source 1..23: mol_type = other RNA
tctggtgtgaggtgcagcaccct

SEQ ID NO: 2678 - RNA, 23 nt, synthetic construct
  source 1..23: mol_type = other RNA
tgctccatgctccaggcagccaa

SEQ ID NO: 2679 - RNA, 23 nt, synthetic construct
  source 1..23: mol_type = other RNA
tatgcccagcacagctgcaggtg

SEQ ID NO: 2680 - RNA, 23 nt, synthetic construct
  source 1..23: mol_type = other RNA
tacaccgcctgcatggccactga

SEQ ID NO: 2681 - RNA, 23 nt, synthetic construct
  source 1..23: mol_type = other RNA
tatgctgcccaaggccaagtcgg

SEQ ID NO: 2682 - RNA, 23 nt, synthetic construct
  source 1..23: mol_type = other RNA
tagggtacccgcacttcgctcct

SEQ ID NO: 2683 - RNA, 23 nt, synthetic construct
  source 1..23: mol_type = other RNA
tttgcacacagaggccaccaggg

SEQ ID NO: 2684 - RNA, 23 nt, synthetic construct
  source 1..23: mol_type = other RNA
ttcgacctcggctggtgggttgt

SEQ ID NO: 2685 - RNA, 23 nt, synthetic construct
  source 1..23: mol_type = other RNA
tagtgcgccttggcagcatcatc

SEQ ID NO: 2686 - RNA, 23 nt, synthetic construct
  source 1..23: mol_type = other RNA
ttcggcaggccagctcattggca

SEQ ID NO: 2687 - RNA, 23 nt, synthetic construct
  source 1..23: mol_type = other RNA
ttgcaggacccgctgcagcacat

SEQ ID NO: 2688 - RNA, 23 nt, synthetic construct
  source 1..23: mol_type = other RNA
ttactggcgctctgcacgccctt

SEQ ID NO: 2689 - RNA, 23 nt, synthetic construct
  source 1..23: mol_type = other RNA
tattcgcaggtgccactcaccac

SEQ ID NO: 2690 - RNA, 23 nt, synthetic construct
  source 1..23: mol_type = other RNA
ttccgtgtcctctccctccgtgt

SEQ ID NO: 2691 - RNA, 21 nt, synthetic construct
  source 1..21: mol_type = other RNA
  modified_base 1: mod_base = OTHER; note = 2'-O-methylcytidine-3'-phosphorothioate
  modified_base 2: mod_base = OTHER; note = 2'-O-methyladenosine-3'-phosphorothioate
  modified_base 3: mod_base = OTHER; note = 2'-O-methyluridine-3'-phosphate
  modified_base 4: mod_base = OTHER; note = 2'-O-methylcytidine-3'-phosphate
  modified_base 5: mod_base = OTHER; note = 2'-O-methyluridine-3'-phosphate
  modified_base 6: mod_base = OTHER; note 4-amino-1-((2R,3R,4R,5R)-3-(docosyloxy)-4-hydroxy-5-(hydrox ymethyl)tetrahydrofuran-2-yl)pyrimidin-2(1H)-one
  modified_base 7: mod_base = OTHER; note = 2'-fluorouridine-3'-phosphate
  modified_base 8: mod_base = OTHER; note = 2'-O-methyluridine-3'-phosphate
  modified_base 9: mod_base = OTHER; note = 2'-fluorouridine-3'-phosphate
  modified_base 10: mod_base = OTHER; note = 2'-fluoroadenosine-3'-phosphate
  modified_base 11: mod_base = OTHER; note = 2'-fluoroadenosine-3'-phosphate
  modified_base 12: mod_base = OTHER; note = 2'-O-methylcytidine-3'-phosphate
  modified_base 13: mod_base = OTHER; note = 2'-O-methylcytidine-3'-phosphate
  modified_base 14: mod_base = OTHER; note = 2'-O-methyladenosine-3'-phosphate
  modified_base 15: mod_base = OTHER; note = 2'-O-methyladenosine-3'-phosphate
  modified_base 16: mod_base = OTHER; note = 2'-O-methyladenosine-3'-phosphate
  modified_base 17: mod_base = OTHER; note = 2'-O-methylcytidine-3'-phosphate
  modified_base 18: mod_base = OTHER; note = 2'-O-methyluridine-3'-phosphate
  modified_base 19: mod_base = OTHER; note = 2'-O-methyluridine-3'-phosphorothioate
  modified_base 20: mod_base = OTHER; note = 2'-O-methylguanosine-3'-phosphorothioate
  modified_base 21: mod_base = OTHER; note = 2'-O-methyladenosine-3'-phosphate
catctctttaaccaaacttga

SEQ ID NO: 2692 - RNA, 21 nt, synthetic construct
  source 1..21: mol_type = other RNA
  modified_base 1: mod_base = OTHER; note = 2'-O-methylcytidine-3'-phosphorothioate
  modified_base 2: mod_base = OTHER; note = 2'-O-methyluridine-3'-phosphorothioate
  modified_base 3: mod_base = OTHER; note = 2'-O-methylcytidine-3'-phosphate
  modified_base 4: mod_base = OTHER; note = 2'-O-methyluridine-3'-phosphate
  modified_base 5: mod_base = OTHER; note = 2'-O-methyladenosine-3'-phosphate
  modified_base 6: mod_base = OTHER; note (2R,3S,4S,5R)-5-(6-amino-9H-purin-9-yl)-4-(docosyloxy)-2-(h ydroxymethyl)tetrahydrofuran-3-ol
  modified_base 7: mod_base = OTHER; note = 2'-fluorocytidine-3'-phosphate
  modified_base 8: mod_base = OTHER; note = 2'-O-methyladenosine-3'-phosphate
  modified_base 9: mod_base = OTHER; note = 2'-fluoroadenosine-3'-phosphate
  modified_base 10: mod_base = OTHER; note = 2'-fluoroadenosine-3'-phosphate
  modified_base 11: mod_base = OTHER; note = 2'-fluorouridine-3'-phosphate
  modified_base 12: mod_base = OTHER; note = 2'-O-methyladenosine-3'-phosphate
  modified_base 13: mod_base = OTHER; note = 2'-O-methyladenosine-3'-phosphate
  modified_base 14: mod_base = OTHER; note = 2'-O-methyladenosine-3'-phosphate
  modified_base 15: mod_base = OTHER; note = 2'-O-methylcytidine-3'-phosphate
  modified_base 16: mod_base = OTHER; note = 2'-O-methyladenosine-3'-phosphate
  modified_base 17: mod_base = OTHER; note = 2'-O-methylguanosine-3'-phosphate
  modified_base 18: mod_base = OTHER; note = 2'-O-methyladenosine-3'-phosphate
  modified_base 19: mod_base = OTHER; note = 2'-O-methyladenosine-3'-phosphorothioate
  modified_base 20: mod_base = OTHER; note = 2'-O-methylcytidine-3'-phosphorothioate
  modified_base 21: mod_base = OTHER; note = 2'-O-methyladenosine-3'-phosphate
ctctaacaaataaacagaaca

SEQ ID NO: 2693 - RNA, 21 nt, synthetic construct
  source 1..21: mol_type = other RNA
  modified_base 1: mod_base = OTHER; note = 2'-O-methyluridine-3'-phosphorothioate
  modified_base 2: mod_base = OTHER; note = 2'-O-methylguanosine-3'-phosphorothioate
  modified_base 3: mod_base = OTHER; note = 2'-O-methylcytidine-3'-phosphate
  modified_base 4: mod_base = OTHER; note = 2'-O-methyladenosine-3'-phosphate
  modified_base 5: mod_base = OTHER; note = 2'-O-methyluridine-3'-phosphate
  modified_base 6: mod_base = OTHER; note (2R,3S,4S,5R)-5-(6-amino-9H-purin-9-yl)-4-(docosyloxy)-2-(h ydroxymethyl)tetrahydrofuran-3-ol
  modified_base 7: mod_base = OTHER; note = 2'-fluoroguanosine-3'-phosphate
  modified_base 8: mod_base = OTHER; note = 2'-O-methyluridine-3'-phosphate
  modified_base 9: mod_base = OTHER; note = 2'-fluorocytidine-3'-phosphate
  modified_base 10: mod_base = OTHER; note = 2'-fluoroadenosine-3'-phosphate
  modified_base 11: mod_base = OTHER; note = 2'-fluorocytidine-3'-phosphate
  modified_base 12: mod_base = OTHER; note = 2'-O-methyluridine-3'-phosphate
  modified_base 13: mod_base = OTHER; note = 2'-O-methylcytidine-3'-phosphate
  modified_base 14: mod_base = OTHER; note = 2'-O-methyluridine-3'-phosphate
  modified_base 15: mod_base = OTHER; note = 2'-O-methyluridine-3'-phosphate
  modified_base 16: mod_base = OTHER; note = 2'-O-methyluridine-3'-phosphate
  modified_base 17: mod_base = OTHER; note = 2'-O-methyluridine-3'-phosphate
  modified_base 18: mod_base = OTHER; note = 2'-O-methylguanosine-3'-phosphate
  modified_base 19: mod_base = OTHER; note = 2'-O-methyladenosine-3'-phosphorothioate
  modified_base 20: mod_base = OTHER; note = 2'-O-methyluridine-3'-phosphorothioate
  modified_base 21: mod_base = OTHER; note = 2'-O-methyladenosine-3'-phosphate
tgcatagtcactcttttgata

SEQ ID NO: 2694 - RNA, 21 nt, synthetic construct
  source 1..21: mol_type = other RNA
  modified_base 1: mod_base = OTHER; note = 2'-O-methyladenosine-3'-phosphorothioate
  modified_base 2: mod_base = OTHER; note = 2'-O-methyladenosine-3'-phosphorothioate
  modified_base 3: mod_base = OTHER; note = 2'-O-methylcytidine-3'-phosphate
  modified_base 4: mod_base = OTHER; note = 2'-O-methyluridine-3'-phosphate
  modified_base 5: mod_base = OTHER; note = 2'-O-methyluridine-3'-phosphate
  modified_base 6: mod_base = OTHER; note 2-amino-9-((2R,3S,4S,5R)-3-(docosyloxy)-4-hydroxy-5-(hydrox ymethyl)tetrahydrofuran-2-yl)-1,9-dihydro-6H-purin-6-one
  modified_base 7: mod_base = OTHER; note = 2'-fluoroadenosine-3'-phosphate
  modified_base 8: mod_base = OTHER; note = 2'-O-methyluridine-3'-phosphate
  modified_base 9: mod_base = OTHER; note = 2'-fluorouridine-3'-phosphate
  modified_base 10: mod_base = OTHER; note = 2'-fluorouridine-3'-phosphate
  modified_base 11: mod_base = OTHER; note = 2'-fluorouridine-3'-phosphate
  modified_base 12: mod_base = OTHER; note = 2'-O-methyluridine-3'-phosphate
  modified_base 13: mod_base = OTHER; note = 2'-O-methylcytidine-3'-phosphate
  modified_base 14: mod_base = OTHER; note = 2'-O-methyladenosine-3'-phosphate
  modified_base 15: mod_base = OTHER; note = 2'-O-methyluridine-3'-phosphate
  modified_base 16: mod_base = OTHER; note = 2'-O-methylcytidine-3'-phosphate
  modified_base 17: mod_base = OTHER; note = 2'-O-methyluridine-3'-phosphate
  modified_base 18: mod_base = OTHER; note = 2'-O-methylcytidine-3'-phosphate
  modified_base 19: mod_base = OTHER; note = 2'-O-methyluridine-3'-phosphorothioate
  modified_base 20: mod_base = OTHER; note = 2'-O-methyluridine-3'-phosphorothioate
  modified_base 21: mod_base = OTHER; note = 2'-O-methyladenosine-3'-phosphate
aacttgatttttcatctctta

SEQ ID NO: 2695 - RNA, 21 nt, synthetic construct
  source 1..21: mol_type = other RNA
  modified_base 1: mod_base = OTHER; note = 2'-O-methylguanosine-3'-phosphorothioate
  modified_base 2: mod_base = OTHER; note = 2'-O-methyladenosine-3'-phosphorothioate
  modified_base 3: mod_base = OTHER; note = 2'-O-methylcytidine-3'-phosphate
  modified_base 4: mod_base = OTHER; note = 2'-O-methyladenosine-3'-phosphate
  modified_base 5: mod_base = OTHER; note = 2'-O-methylcytidine-3'-phosphate
  modified_base 6: mod_base = OTHER; note (2R,3S,4S,5R)-5-(6-amino-9H-purin-9-yl)-4-(docosyloxy)-2-(h ydroxymethyl)tetrahydrofuran-3-ol
  modified_base 7: mod_base = OTHER; note = 2'-fluorouridine-3'-phosphate
  modified_base 8: mod_base = OTHER; note = 2'-O-methyluridine-3'-phosphate
  modified_base 9: mod_base = OTHER; note = 2'-fluorocytidine-3'-phosphate
  modified_base 10: mod_base = OTHER; note = 2'-fluorouridine-3'-phosphate
  modified_base 11: mod_base = OTHER; note = 2'-fluorouridine-3'-phosphate
  modified_base 12: mod_base = OTHER; note = 2'-O-methyladenosine-3'-phosphate
  modified_base 13: mod_base = OTHER; note = 2'-O-methylguanosine-3'-phosphate
  modified_base 14: mod_base = OTHER; note = 2'-O-methylcytidine-3'-phosphate
  modified_base 15: mod_base = OTHER; note = 2'-O-methyladenosine-3'-phosphate
  modified_base 16: mod_base = OTHER; note = 2'-O-methylcytidine-3'-phosphate
  modified_base 17: mod_base = OTHER; note = 2'-O-methyluridine-3'-phosphate
  modified_base 18: mod_base = OTHER; note = 2'-O-methylguanosine-3'-phosphate
  modified_base 19: mod_base = OTHER; note = 2'-O-methyladenosine-3'-phosphorothioate
  modified_base 20: mod_base = OTHER; note = 2'-O-methyladenosine-3'-phosphorothioate
  modified_base 21: mod_base = OTHER; note = 2'-O-methyladenosine-3'-phosphate
gacacattcttagcactgaaa

SEQ ID NO: 2696 - RNA, 21 nt, synthetic construct
  source 1..21: mol_type = other RNA
  modified_base 1: mod_base = OTHER; note = 2'-O-methyladenosine-3'-phosphorothioate
  modified_base 2: mod_base = OTHER; note = 2'-O-methylcytidine-3'-phosphorothioate
  modified_base 3: mod_base = OTHER; note = 2'-O-methylguanosine-3'-phosphate
  modified_base 4: mod_base = OTHER; note = 2'-O-methylcytidine-3'-phosphate
  modified_base 5: mod_base = OTHER; note = 2'-O-methylcytidine-3'-phosphate
  modified_base 6: mod_base = OTHER; note 1-((2R,3R,4R,5R)-3-(docosyloxy)-4-hydroxy-5-(hydroxymethyl) tetrahydrofuran-2-yl)pyrimidine-2,4(1H,3H)-dione
  modified_base 7: mod_base = OTHER; note = 2'-fluorouridine-3'-phosphate
  modified_base 8: mod_base = OTHER; note = 2'-O-methyladenosine-3'-phosphate
  modified_base 9: mod_base = OTHER; note = 2'-fluorouridine-3'-phosphate
  modified_base 10: mod_base = OTHER; note = 2'-fluorouridine-3'-phosphate
  modified_base 11: mod_base = OTHER; note = 2'-fluorouridine-3'-phosphate
  modified_base 12: mod_base = OTHER; note = 2'-O-methylguanosine-3'-phosphate
  modified_base 13: mod_base = OTHER; note = 2'-O-methyladenosine-3'-phosphate
  modified_base 14: mod_base = OTHER; note = 2'-O-methyluridine-3'-phosphate
  modified_base 15: mod_base = OTHER; note = 2'-O-methyluridine-3'-phosphate
  modified_base 16: mod_base = OTHER; note = 2'-O-methyluridine-3'-phosphate
  modified_base 17: mod_base = OTHER; note = 2'-O-methyladenosine-3'-phosphate
  modified_base 18: mod_base = OTHER; note = 2'-O-methyladenosine-3'-phosphate
  modified_base 19: mod_base = OTHER; note = 2'-O-methylcytidine-3'-phosphorothioate
  modified_base 20: mod_base = OTHER; note = 2'-O-methyluridine-3'-phosphorothioate
  modified_base 21: mod_base = OTHER; note = 2'-O-methyladenosine-3'-phosphate
acgccttatttgatttaacta

SEQ ID NO: 2697 - RNA, 21 nt, synthetic construct
  source 1..21: mol_type = other RNA
  modified_base 1: mod_base = OTHER; note = 2'-O-methyluridine-3'-phosphorothioate
  modified_base 2: mod_base = OTHER; note = 2'-O-methyladenosine-3'-phosphorothioate
  modified_base 3: mod_base = OTHER; note = 2'-O-methylguanosine-3'-phosphate
  modified_base 4: mod_base = OTHER; note = 2'-O-methyluridine-3'-phosphate
  modified_base 5: mod_base = OTHER; note = 2'-O-methylcytidine-3'-phosphate
  modified_base 6: mod_base = OTHER; note 1-((2R,3R,4R,5R)-3-(docosyloxy)-4-hydroxy-5-(hydroxymethyl) tetrahydrofuran-2-yl)pyrimidine-2,4(1H,3H)-dione
  modified_base 7: mod_base = OTHER; note = 2'-fluorouridine-3'-phosphate
  modified_base 8: mod_base = OTHER; note = 2'-O-methylcytidine-3'-phosphate
  modified_base 9: mod_base = OTHER; note = 2'-fluoroguanosine-3'-phosphate
  modified_base 10: mod_base = OTHER; note = 2'-fluoroadenosine-3'-phosphate
  modified_base 11: mod_base = OTHER; note = 2'-fluoroadenosine-3'-phosphate
  modified_base 12: mod_base = OTHER; note = 2'-O-methyladenosine-3'-phosphate
  modified_base 13: mod_base = OTHER; note = 2'-O-methyluridine-3'-phosphate
  modified_base 14: mod_base = OTHER; note = 2'-O-methylguanosine-3'-phosphate
  modified_base 15: mod_base = OTHER; note = 2'-O-methyluridine-3'-phosphate
  modified_base 16: mod_base = OTHER; note = 2'-O-methyluridine-3'-phosphate
  modified_base 17: mod_base = OTHER; note = 2'-O-methyladenosine-3'-phosphate
  modified_base 18: mod_base = OTHER; note = 2'-O-methyladenosine-3'-phosphate
  modified_base 19: mod_base = OTHER; note = 2'-O-methyluridine-3'-phosphorothioate
  modified_base 20: mod_base = OTHER; note = 2'-O-methyladenosine-3'-phosphorothioate
  modified_base 21: mod_base = OTHER; note = 2'-O-methyladenosine-3'-phosphate
tagtcttcgaaatgttaataa

SEQ ID NO: 2698 - RNA, 21 nt, synthetic construct
  source 1..21: mol_type = other RNA
  modified_base 1: mod_base = OTHER; note = 2'-O-methylguanosine-3'-phosphorothioate
  modified_base 2: mod_base = OTHER; note = 2'-O-methyladenosine-3'-phosphorothioate
  modified_base 3: mod_base = OTHER; note = 2'-O-methyluridine-3'-phosphate
  modified_base 4: mod_base = OTHER; note = 2'-O-methylguanosine-3'-phosphate
  modified_base 5: mod_base = OTHER; note = 2'-O-methylguanosine-3'-phosphate
  modified_base 6: mod_base = OTHER; note (2R,3S,4S,5R)-5-(6-amino-9H-purin-9-yl)-4-(docosyloxy)-2-(h ydroxymethyl)tetrahydrofuran-3-ol
  modified_base 7: mod_base = OTHER; note = 2'-fluorocytidine-3'-phosphate
  modified_base 8: mod_base = OTHER; note = 2'-O-methyluridine-3'-phosphate
  modified_base 9: mod_base = OTHER; note = 2'-fluorouridine-3'-phosphate
  modified_base 10: mod_base = OTHER; note = 2'-fluorouridine-3'-phosphate
  modified_base 11: mod_base = OTHER; note = 2'-fluorouridine-3'-phosphate
  modified_base 12: mod_base = OTHER; note = 2'-O-methyladenosine-3'-phosphate
  modified_base 13: mod_base = OTHER; note = 2'-O-methyladenosine-3'-phosphate
  modified_base 14: mod_base = OTHER; note = 2'-O-methylguanosine-3'-phosphate
  modified_base 15: mod_base = OTHER; note = 2'-O-methyluridine-3'-phosphate
  modified_base 16: mod_base = OTHER; note = 2'-O-methyluridine-3'-phosphate
  modified_base 17: mod_base = OTHER; note = 2'-O-methylguanosine-3'-phosphate
  modified_base 18: mod_base = OTHER; note = 2'-O-methyluridine-3'-phosphate
  modified_base 19: mod_base = OTHER; note = 2'-O-methyluridine-3'-phosphorothioate
  modified_base 20: mod_base = OTHER; note = 2'-O-methyluridine-3'-phosphorothioate
  modified_base 21: mod_base = OTHER; note = 2'-O-methyladenosine-3'-phosphate
gatggacttttaagttgttta

SEQ ID NO: 2699 - RNA, 21 nt, synthetic construct
  source 1..21: mol_type = other RNA
  modified_base 1: mod_base = OTHER; note = 2'-O-methyluridine-3'-phosphorothioate
  modified_base 2: mod_base = OTHER; note = 2'-O-methylguanosine-3'-phosphorothioate
  modified_base 3: mod_base = OTHER; note = 2'-O-methylcytidine-3'-phosphate
  modified_base 4: mod_base = OTHER; note = 2'-O-methyluridine-3'-phosphate
  modified_base 5: mod_base = OTHER; note = 2'-O-methyluridine-3'-phosphate
  modified_base 6: mod_base = OTHER; note 1-((2R,3R,4R,5R)-3-(docosyloxy)-4-hydroxy-5-(hydroxymethyl) tetrahydrofuran-2-yl)pyrimidine-2,4(1H,3H)-dione
  modified_base 7: mod_base = OTHER; note = 2'-fluorouridine-3'-phosphate
  modified_base 8: mod_base = OTHER; note = 2'-O-methyluridine-3'-phosphate
  modified_base 9: mod_base = OTHER; note = 2'-fluorouridine-3'-phosphate
  modified_base 10: mod_base = OTHER; note = 2'-fluorocytidine-3'-phosphate
  modified_base 11: mod_base = OTHER; note = 2'-fluoroadenosine-3'-phosphate
  modified_base 12: mod_base = OTHER; note = 2'-O-methylcytidine-3'-phosphate
  modified_base 13: mod_base = OTHER; note = 2'-O-methyluridine-3'-phosphate
  modified_base 14: mod_base = OTHER; note = 2'-O-methyluridine-3'-phosphate
  modified_base 15: mod_base = OTHER; note = 2'-O-methyladenosine-3'-phosphate
  modified_base 16: mod_base = OTHER; note = 2'-O-methyladenosine-3'-phosphate
  modified_base 17: mod_base = OTHER; note = 2'-O-methyluridine-3'-phosphate
  modified_base 18: mod_base = OTHER; note = 2'-O-methyladenosine-3'-phosphate
  modified_base 19: mod_base = OTHER; note = 2'-O-methyladenosine-3'-phosphorothioate
  modified_base 20: mod_base = OTHER; note = 2'-O-methyluridine-3'-phosphorothioate
  modified_base 21: mod_base = OTHER; note = 2'-O-methyladenosine-3'-phosphate
tgcttttttcacttaataata

SEQ ID NO: 2700 - RNA, 21 nt, synthetic construct
  source 1..21: mol_type = other RNA
  modified_base 1: mod_base = OTHER; note = 2'-O-methyladenosine-3'-phosphorothioate
  modified_base 2: mod_base = OTHER; note = 2'-O-methylcytidine-3'-phosphorothioate
  modified_base 3: mod_base = OTHER; note = 2'-O-methyladenosine-3'-phosphate
  modified_base 4: mod_base = OTHER; note = 2'-O-methyluridine-3'-phosphate
  modified_base 5: mod_base = OTHER; note = 2'-O-methyladenosine-3'-phosphate
  modified_base 6: mod_base = OTHER; note (2R,3S,4S,5R)-5-(6-amino-9H-purin-9-yl)-4-(docosyloxy)-2-(h ydroxymethyl)tetrahydrofuran-3-ol
  modified_base 7: mod_base = OTHER; note = 2'-fluorouridine-3'-phosphate
  modified_base 8: mod_base = OTHER; note = 2'-O-methyladenosine-3'-phosphate
  modified_base 9: mod_base = OTHER; note = 2'-fluoroadenosine-3'-phosphate
  modified_base 10: mod_base = OTHER; note = 2'-fluorocytidine-3'-phosphate
  modified_base 11: mod_base = OTHER; note = 2'-fluorouridine-3'-phosphate
  modified_base 12: mod_base = OTHER; note = 2'-O-methyladenosine-3'-phosphate
  modified_base 13: mod_base = OTHER; note = 2'-O-methylcytidine-3'-phosphate
  modified_base 14: mod_base = OTHER; note = 2'-O-methyluridine-3'-phosphate
  modified_base 15: mod_base = OTHER; note = 2'-O-methylguanosine-3'-phosphate
  modified_base 16: mod_base = OTHER; note = 2'-O-methylcytidine-3'-phosphate
  modified_base 17: mod_base = OTHER; note = 2'-O-methyladenosine-3'-phosphate
  modified_base 18: mod_base = OTHER; note = 2'-O-methyluridine-3'-phosphate
  modified_base 19: mod_base = OTHER; note = 2'-O-methyladenosine-3'-phosphorothioate
  modified_base 20: mod_base = OTHER; note = 2'-O-methyladenosine-3'-phosphorothioate
  modified_base 21: mod_base = OTHER; note = 2'-O-methyladenosine-3'-phosphate
acataataactactgcataaa

SEQ ID NO: 2701 - RNA, 21 nt, synthetic construct
  source 1..21: mol_type = other RNA
  modified_base 1: mod_base = OTHER; note = 2'-O-methyluridine-3'-phosphorothioate
  modified_base 2: mod_base = OTHER; note = 2'-O-methyladenosine-3'-phosphorothioate
  modified_base 3: mod_base = OTHER; note = 2'-O-methylcytidine-3'-phosphate
  modified_base 4: mod_base = OTHER; note = 2'-O-methyluridine-3'-phosphate
  modified_base 5: mod_base = OTHER; note = 2'-O-methyladenosine-3'-phosphate
  modified_base 6: mod_base = OTHER; note 2-amino-9-((2R,3S,4S,5R)-3-(docosyloxy)-4-hydroxy-5-(hydrox ymethyl)tetrahydrofuran-2-yl)-1,9-dihydro-6H-purin-6-one
  modified_base 7: mod_base = OTHER; note = 2'-fluorouridine-3'-phosphate
  modified_base 8: mod_base = OTHER; note = 2'-O-methylguanosine-3'-phosphate
  modified_base 9: mod_base = OTHER; note = 2'-fluorouridine-3'-phosphate
  modified_base 10: mod_base = OTHER; note = 2'-fluorocytidine-3'-phosphate
  modified_base 11: mod_base = OTHER; note = 2'-fluoroadenosine-3'-phosphate
  modified_base 12: mod_base = OTHER; note = 2'-O-methylcytidine-3'-phosphate
  modified_base 13: mod_base = OTHER; note = 2'-O-methyluridine-3'-phosphate
  modified_base 14: mod_base = OTHER; note = 2'-O-methyluridine-3'-phosphate
  modified_base 15: mod_base = OTHER; note = 2'-O-methyluridine-3'-phosphate
  modified_base 16: mod_base = OTHER; note = 2'-O-methylcytidine-3'-phosphate
  modified_base 17: mod_base = OTHER; note = 2'-O-methyluridine-3'-phosphate
  modified_base 18: mod_base = OTHER; note = 2'-O-methylguanosine-3'-phosphate
  modified_base 19: mod_base = OTHER; note = 2'-O-methyladenosine-3'-phosphorothioate
  modified_base 20: mod_base = OTHER; note = 2'-O-methylguanosine-3'-phosphorothioate
  modified_base 21: mod_base = OTHER; note = 2'-O-methyladenosine-3'-phosphate
tactagtgtcactttctgaga

SEQ ID NO: 2702 - RNA, 21 nt, synthetic construct
  source 1..21: mol_type = other RNA
  modified_base 1: mod_base = OTHER; note = 2'-O-methylcytidine-3'-phosphorothioate
  modified_base 2: mod_base = OTHER; note = 2'-O-methyladenosine-3'-phosphorothioate
  modified_base 3: mod_base = OTHER; note = 2'-O-methyladenosine-3'-phosphate
  modified_base 4: mod_base = OTHER; note = 2'-O-methyluridine-3'-phosphate
  modified_base 5: mod_base = OTHER; note = 2'-O-methylcytidine-3'-phosphate
  modified_base 6: mod_base = OTHER; note (2R,3S,4S,5R)-5-(6-amino-9H-purin-9-yl)-4-(docosyloxy)-2-(h ydroxymethyl)tetrahydrofuran-3-ol
  modified_base 7: mod_base = OTHER; note = 2'-fluoroguanosine-3'-phosphate
  modified_base 8: mod_base = OTHER; note = 2'-O-methyladenosine-3'-phosphate
  modified_base 9: mod_base = OTHER; note = 2'-fluorouridine-3'-phosphate
  modified_base 10: mod_base = OTHER; note = 2'-fluoroguanosine-3'-phosphate
  modified_base 11: mod_base = OTHER; note = 2'-fluorocytidine-3'-phosphate
  modified_base 12: mod_base = OTHER; note = 2'-O-methyladenosine-3'-phosphate
  modified_base 13: mod_base = OTHER; note = 2'-O-methyladenosine-3'-phosphate
  modified_base 14: mod_base = OTHER; note = 2'-O-methyladenosine-3'-phosphate
  modified_base 15: mod_base = OTHER; note = 2'-O-methyladenosine-3'-phosphate
  modified_base 16: mod_base = OTHER; note = 2'-O-methylguanosine-3'-phosphate
  modified_base 17: mod_base = OTHER; note = 2'-O-methylcytidine-3'-phosphate
  modified_base 18: mod_base = OTHER; note = 2'-O-methyluridine-3'-phosphate
  modified_base 19: mod_base = OTHER; note = 2'-O-methylcytidine-3'-phosphorothioate
  modified_base 20: mod_base = OTHER; note = 2'-O-methyluridine-3'-phosphorothioate
  modified_base 21: mod_base = OTHER; note = 2'-O-methyladenosine-3'-phosphate
caatcagatgcaaaagctcta

SEQ ID NO: 2703 - RNA, 21 nt, synthetic construct
  source 1..21: mol_type = other RNA
  modified_base 1: mod_base = OTHER; note = 2'-O-methyluridine-3'-phosphorothioate
  modified_base 2: mod_base = OTHER; note = 2'-O-methyladenosine-3'-phosphorothioate
  modified_base 3: mod_base = OTHER; note = 2'-O-methyladenosine-3'-phosphate
  modified_base 4: mod_base = OTHER; note = 2'-O-methylguanosine-3'-phosphate
  modified_base 5: mod_base = OTHER; note = 2'-O-methyladenosine-3'-phosphate
  modified_base 6: mod_base = OTHER; note 2-amino-9-((2R,3S,4S,5R)-3-(docosyloxy)-4-hydroxy-5-(hydrox ymethyl)tetrahydrofuran-2-yl)-1,9-dihydro-6H-purin-6-one
  modified_base 7: mod_base = OTHER; note = 2'-fluorouridine-3'-phosphate
  modified_base 8: mod_base = OTHER; note = 2'-O-methyladenosine-3'-phosphate
  modified_base 9: mod_base = OTHER; note = 2'-fluoroadenosine-3'-phosphate
  modified_base 10: mod_base = OTHER; note = 2'-fluorouridine-3'-phosphate
  modified_base 11: mod_base = OTHER; note = 2'-fluorouridine-3'-phosphate
  modified_base 12: mod_base = OTHER; note = 2'-O-methylguanosine-3'-phosphate
  modified_base 13: mod_base = OTHER; note = 2'-O-methylcytidine-3'-phosphate
  modified_base 14: mod_base = OTHER; note = 2'-O-methylcytidine-3'-phosphate
  modified_base 15: mod_base = OTHER; note = 2'-O-methyluridine-3'-phosphate
  modified_base 16: mod_base = OTHER; note = 2'-O-methyladenosine-3'-phosphate
  modified_base 17: mod_base = OTHER; note = 2'-O-methyladenosine-3'-phosphate
  modified_base 18: mod_base = OTHER; note = 2'-O-methylcytidine-3'-phosphate
  modified_base 19: mod_base = OTHER; note = 2'-O-methyluridine-3'-phosphorothioate
  modified_base 20: mod_base = OTHER; note = 2'-O-methyluridine-3'-phosphorothioate
  modified_base 21: mod_base = OTHER; note = 2'-O-methyladenosine-3'-phosphate
taagagtaattgcctaactta

SEQ ID NO: 2704 - RNA, 21 nt, synthetic construct
  source 1..21: mol_type = other RNA
  modified_base 1: mod_base = OTHER; note = 2'-O-methylguanosine-3'-phosphorothioate
  modified_base 2: mod_base = OTHER; note = 2'-O-methylguanosine-3'-phosphorothioate
  modified_base 3: mod_base = OTHER; note = 2'-O-methylcytidine-3'-phosphate
  modified_base 4: mod_base = OTHER; note = 2'-O-methyluridine-3'-phosphate
  modified_base 5: mod_base = OTHER; note = 2'-O-methyluridine-3'-phosphate
  modified_base 6: mod_base = OTHER; note 2-amino-9-((2R,3S,4S,5R)-3-(docosyloxy)-4-hydroxy-5-(hydrox ymethyl)tetrahydrofuran-2-yl)-1,9-dihydro-6H-purin-6-one
  modified_base 7: mod_base = OTHER; note = 2'-fluorouridine-3'-phosphate
  modified_base 8: mod_base = OTHER; note = 2'-O-methyluridine-3'-phosphate
  modified_base 9: mod_base = OTHER; note = 2'-fluorouridine-3'-phosphate
  modified_base 10: mod_base = OTHER; note = 2'-fluoroadenosine-3'-phosphate
  modified_base 11: mod_base = OTHER; note = 2'-fluorouridine-3'-phosphate
  modified_base 12: mod_base = OTHER; note = 2'-O-methylguanosine-3'-phosphate
  modified_base 13: mod_base = OTHER; note = 2'-O-methyladenosine-3'-phosphate
  modified_base 14: mod_base = OTHER; note = 2'-O-methyladenosine-3'-phosphate
  modified_base 15: mod_base = OTHER; note = 2'-O-methylcytidine-3'-phosphate
  modified_base 16: mod_base = OTHER; note = 2'-O-methyladenosine-3'-phosphate
  modified_base 17: mod_base = OTHER; note = 2'-O-methyluridine-3'-phosphate
  modified_base 18: mod_base = OTHER; note = 2'-O-methyluridine-3'-phosphate
  modified_base 19: mod_base = OTHER; note = 2'-O-methyladenosine-3'-phosphorothioate
  modified_base 20: mod_base = OTHER; note = 2'-O-methyladenosine-3'-phosphorothioate
  modified_base 21: mod_base = OTHER; note = 2'-O-methyladenosine-3'-phosphate
ggcttgtttatgaacattaaa

SEQ ID NO: 2705 - RNA, 21 nt, synthetic construct
  source 1..21: mol_type = other RNA
  modified_base 1: mod_base = OTHER; note = 2'-O-methyluridine-3'-phosphorothioate
  modified_base 2: mod_base = OTHER; note = 2'-O-methyluridine-3'-phosphorothioate
  modified_base 3: mod_base = OTHER; note = 2'-O-methyluridine-3'-phosphate
  modified_base 4: mod_base = OTHER; note = 2'-O-methyluridine-3'-phosphate
  modified_base 5: mod_base = OTHER; note = 2'-O-methyluridine-3'-phosphate
  modified_base 6: mod_base = OTHER; note 2-amino-9-((2R,3S,4S,5R)-3-(docosyloxy)-4-hydroxy-5-(hydrox ymethyl)tetrahydrofuran-2-yl)-1,9-dihydro-6H-purin-6-one
  modified_base 7: mod_base = OTHER; note = 2'-fluorocytidine-3'-phosphate
  modified_base 8: mod_base = OTHER; note = 2'-O-methyluridine-3'-phosphate
  modified_base 9: mod_base = OTHER; note = 2'-fluoroadenosine-3'-phosphate
  modified_base 10: mod_base = OTHER; note = 2'-fluorocytidine-3'-phosphate
  modified_base 11: mod_base = OTHER; note = 2'-fluorouridine-3'-phosphate
  modified_base 12: mod_base = OTHER; note = 2'-O-methylguanosine-3'-phosphate
  modified_base 13: mod_base = OTHER; note = 2'-O-methylcytidine-3'-phosphate
  modified_base 14: mod_base = OTHER; note = 2'-O-methyladenosine-3'-phosphate
  modified_base 15: mod_base = OTHER; note = 2'-O-methyladenosine-3'-phosphate
  modified_base 16: mod_base = OTHER; note = 2'-O-methyladenosine-3'-phosphate
  modified_base 17: mod_base = OTHER; note = 2'-O-methylcytidine-3'-phosphate
  modified_base 18: mod_base = OTHER; note = 2'-O-methylguanosine-3'-phosphate
  modified_base 19: mod_base = OTHER; note = 2'-O-methyladenosine-3'-phosphorothioate
  modified_base 20: mod_base = OTHER; note = 2'-O-methyluridine-3'-phosphorothioate
  modified_base 21: mod_base = OTHER; note = 2'-O-methyladenosine-3'-phosphate
tttttgctactgcaaacgata

SEQ ID NO: 2706 - RNA, 21 nt, synthetic construct
  source 1..21: mol_type = other RNA
  modified_base 1: mod_base = OTHER; note = 2'-O-methyladenosine-3'-phosphorothioate
  modified_base 2: mod_base = OTHER; note = 2'-O-methyladenosine-3'-phosphorothioate
  modified_base 3: mod_base = OTHER; note = 2'-O-methylcytidine-3'-phosphate
  modified_base 4: mod_base = OTHER; note = 2'-O-methylguanosine-3'-phosphate
  modified_base 5: mod_base = OTHER; note = 2'-O-methyladenosine-3'-phosphate
  modified_base 6: mod_base = OTHER; note 1-((2R,3R,4R,5R)-3-(docosyloxy)-4-hydroxy-5-(hydroxymethyl) tetrahydrofuran-2-yl)pyrimidine-2,4(1H,3H)-dione
  modified_base 7: mod_base = OTHER; note = 2'-fluoroguanosine-3'-phosphate
  modified_base 8: mod_base = OTHER; note = 2'-O-methylcytidine-3'-phosphate
  modified_base 9: mod_base = OTHER; note = 2'-fluorouridine-3'-phosphate
  modified_base 10: mod_base = OTHER; note = 2'-fluoroadenosine-3'-phosphate
  modified_base 11: mod_base = OTHER; note = 2'-fluorouridine-3'-phosphate
  modified_base 12: mod_base = OTHER; note = 2'-O-methyladenosine-3'-phosphate
  modified_base 13: mod_base = OTHER; note = 2'-O-methyladenosine-3'-phosphate
  modified_base 14: mod_base = OTHER; note = 2'-O-methyluridine-3'-phosphate
  modified_base 15: mod_base = OTHER; note = 2'-O-methyladenosine-3'-phosphate
  modified_base 16: mod_base = OTHER; note = 2'-O-methyladenosine-3'-phosphate
  modified_base 17: mod_base = OTHER; note = 2'-O-methyladenosine-3'-phosphate
  modified_base 18: mod_base = OTHER; note = 2'-O-methyluridine-3'-phosphate
  modified_base 19: mod_base = OTHER; note = 2'-O-methylguanosine-3'-phosphorothioate
  modified_base 20: mod_base = OTHER; note = 2'-O-methyluridine-3'-phosphorothioate
  modified_base 21: mod_base = OTHER; note = 2'-O-methyladenosine-3'-phosphate
aacgatgctataataaatgta

SEQ ID NO: 2707 - RNA, 21 nt, synthetic construct
  source 1..21: mol_type = other RNA
  modified_base 1: mod_base = OTHER; note = 2'-O-methyluridine-3'-phosphorothioate
  modified_base 2: mod_base = OTHER; note = 2'-O-methylguanosine-3'-phosphorothioate
  modified_base 3: mod_base = OTHER; note = 2'-O-methylguanosine-3'-phosphate
  modified_base 4: mod_base = OTHER; note = 2'-O-methyluridine-3'-phosphate
  modified_base 5: mod_base = OTHER; note = 2'-O-methyluridine-3'-phosphate
  modified_base 6: mod_base = OTHER; note 2-amino-9-((2R,3S,4S,5R)-3-(docosyloxy)-4-hydroxy-5-(hydrox ymethyl)tetrahydrofuran-2-yl)-1,9-dihydro-6H-purin-6-one
  modified_base 7: mod_base = OTHER; note = 2'-fluorouridine-3'-phosphate
  modified_base 8: mod_base = OTHER; note = 2'-O-methyluridine-3'-phosphate
  modified_base 9: mod_base = OTHER; note = 2'-fluoroadenosine-3'-phosphate
  modified_base 10: mod_base = OTHER; note = 2'-fluorocytidine-3'-phosphate
  modified_base 11: mod_base = OTHER; note = 2'-fluorouridine-3'-phosphate
  modified_base 12: mod_base = OTHER; note = 2'-O-methyladenosine-3'-phosphate
  modified_base 13: mod_base = OTHER; note = 2'-O-methyluridine-3'-phosphate
  modified_base 14: mod_base = OTHER; note = 2'-O-methyladenosine-3'-phosphate
  modified_base 15: mod_base = OTHER; note = 2'-O-methyladenosine-3'-phosphate
  modified_base 16: mod_base = OTHER; note = 2'-O-methylguanosine-3'-phosphate
  modified_base 17: mod_base = OTHER; note = 2'-O-methyladenosine-3'-phosphate
  modified_base 18: mod_base = OTHER; note = 2'-O-methylguanosine-3'-phosphate
  modified_base 19: mod_base = OTHER; note = 2'-O-methyluridine-3'-phosphorothioate
  modified_base 20: mod_base = OTHER; note = 2'-O-methyladenosine-3'-phosphorothioate
  modified_base 21: mod_base = OTHER; note = 2'-O-methyladenosine-3'-phosphate
tggttgttactataagagtaa

SEQ ID NO: 2708 - RNA, 21 nt, synthetic construct
  source 1..21: mol_type = other RNA
  modified_base 1: mod_base = OTHER; note = 2'-O-methylcytidine-3'-phosphorothioate
  modified_base 2: mod_base = OTHER; note = 2'-O-methyluridine-3'-phosphorothioate
  modified_base 3: mod_base = OTHER; note = 2'-O-methylguanosine-3'-phosphate
  modified_base 4: mod_base = OTHER; note = 2'-O-methyladenosine-3'-phosphate
  modified_base 5: mod_base = OTHER; note = 2'-O-methyluridine-3'-phosphate
  modified_base 6: mod_base = OTHER; note 2-amino-9-((2R,3S,4S,5R)-3-(docosyloxy)-4-hydroxy-5-(hydrox ymethyl)tetrahydrofuran-2-yl)-1,9-dihydro-6H-purin-6-one
  modified_base 7: mod_base = OTHER; note = 2'-fluoroadenosine-3'-phosphate
  modified_base 8: mod_base = OTHER; note = 2'-O-methyladenosine-3'-phosphate
  modified_base 9: mod_base = OTHER; note = 2'-fluorocytidine-3'-phosphate
  modified_base 10: mod_base = OTHER; note = 2'-fluoroadenosine-3'-phosphate
  modified_base 11: mod_base = OTHER; note = 2'-fluorouridine-3'-phosphate
  modified_base 12: mod_base = OTHER; note = 2'-O-methylcytidine-3'-phosphate
  modified_base 13: mod_base = OTHER; note = 2'-O-methylcytidine-3'-phosphate
  modified_base 14: mod_base = OTHER; note = 2'-O-methyluridine-3'-phosphate
  modified_base 15: mod_base = OTHER; note = 2'-O-methylcytidine-3'-phosphate
  modified_base 16: mod_base = OTHER; note = 2'-O-methyluridine-3'-phosphate
  modified_base 17: mod_base = OTHER; note = 2'-O-methylguanosine-3'-phosphate
  modified_base 18: mod_base = OTHER; note = 2'-O-methyladenosine-3'-phosphate
  modified_base 19: mod_base = OTHER; note = 2'-O-methyluridine-3'-phosphorothioate
  modified_base 20: mod_base = OTHER; note = 2'-O-methylguanosine-3'-phosphorothioate
  modified_base 21: mod_base = OTHER; note = 2'-O-methyladenosine-3'-phosphate
ctgatgaacatcctctgatga

SEQ ID NO: 2709 - RNA, 21 nt, synthetic construct
  source 1..21: mol_type = other RNA
  modified_base 1: mod_base = OTHER; note = 2'-O-methylcytidine-3'-phosphorothioate
  modified_base 2: mod_base = OTHER; note = 2'-O-methyluridine-3'-phosphorothioate
  modified_base 3: mod_base = OTHER; note = 2'-O-methylguanosine-3'-phosphate
  modified_base 4: mod_base = OTHER; note = 2'-O-methylcytidine-3'-phosphate
  modified_base 5: mod_base = OTHER; note = 2'-O-methylguanosine-3'-phosphate
  modified_base 6: mod_base = OTHER; note 2-amino-9-((2R,3S,4S,5R)-3-(docosyloxy)-4-hydroxy-5-(hydrox ymethyl)tetrahydrofuran-2-yl)-1,9-dihydro-6H-purin-6-one
  modified_base 7: mod_base = OTHER; note = 2'-fluoroadenosine-3'-phosphate
  modified_base 8: mod_base = OTHER; note = 2'-O-methyluridine-3'-phosphate
  modified_base 9: mod_base = OTHER; note = 2'-fluoroadenosine-3'-phosphate
  modified_base 10: mod_base = OTHER; note = 2'-fluoroadenosine-3'-phosphate
  modified_base 11: mod_base = OTHER; note = 2'-fluoroadenosine-3'-phosphate
  modified_base 12: mod_base = OTHER; note = 2'-O-methyluridine-3'-phosphate
  modified_base 13: mod_base = OTHER; note = 2'-O-methyladenosine-3'-phosphate
  modified_base 14: mod_base = OTHER; note = 2'-O-methyluridine-3'-phosphate
  modified_base 15: mod_base = OTHER; note = 2'-O-methyluridine-3'-phosphate
  modified_base 16: mod_base = OTHER; note = 2'-O-methyluridine-3'-phosphate
  modified_base 17: mod_base = OTHER; note = 2'-O-methylguanosine-3'-phosphate
  modified_base 18: mod_base = OTHER; note = 2'-O-methylcytidine-3'-phosphate
  modified_base 19: mod_base = OTHER; note = 2'-O-methylcytidine-3'-phosphorothioate
  modified_base 20: mod_base = OTHER; note = 2'-O-methyladenosine-3'-phosphorothioate
  modified_base 21: mod_base = OTHER; note = 2'-O-methyladenosine-3'-phosphate
ctgcggataaatatttgccaa

SEQ ID NO: 2710 - RNA, 21 nt, synthetic construct
  source 1..21: mol_type = other RNA
  modified_base 1: mod_base = OTHER; note = 2'-O-methylcytidine-3'-phosphorothioate
  modified_base 2: mod_base = OTHER; note = 2'-O-methylcytidine-3'-phosphorothioate
  modified_base 3: mod_base = OTHER; note = 2'-O-methyladenosine-3'-phosphate
  modified_base 4: mod_base = OTHER; note = 2'-O-methyladenosine-3'-phosphate
  modified_base 5: mod_base = OTHER; note = 2'-O-methyladenosine-3'-phosphate
  modified_base 6: mod_base = OTHER; note (2R,3S,4S,5R)-5-(6-amino-9H-purin-9-yl)-4-(docosyloxy)-2-(h ydroxymethyl)tetrahydrofuran-3-ol
  modified_base 7: mod_base = OTHER; note = 2'-fluorouridine-3'-phosphate
  modified_base 8: mod_base = OTHER; note = 2'-O-methyluridine-3'-phosphate
  modified_base 9: mod_base = OTHER; note = 2'-fluorocytidine-3'-phosphate
  modified_base 10: mod_base = OTHER; note = 2'-fluoroadenosine-3'-phosphate
  modified_base 11: mod_base = OTHER; note = 2'-fluoroguanosine-3'-phosphate
  modified_base 12: mod_base = OTHER; note = 2'-O-methyladenosine-3'-phosphate
  modified_base 13: mod_base = OTHER; note = 2'-O-methyluridine-3'-phosphate
  modified_base 14: mod_base = OTHER; note = 2'-O-methyluridine-3'-phosphate
  modified_base 15: mod_base = OTHER; note = 2'-O-methylcytidine-3'-phosphate
  modified_base 16: mod_base = OTHER; note = 2'-O-methyluridine-3'-phosphate
  modified_base 17: mod_base = OTHER; note = 2'-O-methylguanosine-3'-phosphate
  modified_base 18: mod_base = OTHER; note = 2'-O-methylcytidine-3'-phosphate
  modified_base 19: mod_base = OTHER; note = 2'-O-methylcytidine-3'-phosphorothioate
  modified_base 20: mod_base = OTHER; note = 2'-O-methyluridine-3'-phosphorothioate
  modified_base 21: mod_base = OTHER; note = 2'-O-methyladenosine-3'-phosphate
ccaaaattcagattctgccta

SEQ ID NO: 2711 - RNA, 21 nt, synthetic construct
  source 1..21: mol_type = other RNA
  modified_base 1: mod_base = OTHER; note = 2'-O-methyladenosine-3'-phosphorothioate
  modified_base 2: mod_base = OTHER; note = 2'-O-methyladenosine-3'-phosphorothioate
  modified_base 3: mod_base = OTHER; note = 2'-O-methylguanosine-3'-phosphate
  modified_base 4: mod_base = OTHER; note = 2'-O-methylguanosine-3'-phosphate
  modified_base 5: mod_base = OTHER; note = 2'-O-methyladenosine-3'-phosphate
  modified_base 6: mod_base = OTHER; note 1-((2R,3R,4R,5R)-3-(docosyloxy)-4-hydroxy-5-(hydroxymethyl) tetrahydrofuran-2-yl)pyrimidine-2,4(1H,3H)-dione
  modified_base 7: mod_base = OTHER; note = 2'-fluoroguanosine-3'-phosphate
  modified_base 8: mod_base = OTHER; note = 2'-O-methyluridine-3'-phosphate
  modified_base 9: mod_base = OTHER; note = 2'-fluoroguanosine-3'-phosphate
  modified_base 10: mod_base = OTHER; note = 2'-fluorouridine-3'-phosphate
  modified_base 11: mod_base = OTHER; note = 2'-fluoroguanosine-3'-phosphate
  modified_base 12: mod_base = OTHER; note = 2'-O-methyluridine-3'-phosphate
  modified_base 13: mod_base = OTHER; note = 2'-O-methylcytidine-3'-phosphate
  modified_base 14: mod_base = OTHER; note = 2'-O-methyluridine-3'-phosphate
  modified_base 15: mod_base = OTHER; note = 2'-O-methyluridine-3'-phosphate
  modified_base 16: mod_base = OTHER; note = 2'-O-methyluridine-3'-phosphate
  modified_base 17: mod_base = OTHER; note = 2'-O-methylcytidine-3'-phosphate
  modified_base 18: mod_base = OTHER; note = 2'-O-methyluridine-3'-phosphate
  modified_base 19: mod_base = OTHER; note = 2'-O-methylcytidine-3'-phosphorothioate
  modified_base 20: mod_base = OTHER; note = 2'-O-methylcytidine-3'-phosphorothioate
  modified_base 21: mod_base = OTHER; note = 2'-O-methyladenosine-3'-phosphate
aaggatgtgtgtctttctcca

SEQ ID NO: 2712 - RNA, 21 nt, synthetic construct
  source 1..21: mol_type = other RNA
  modified_base 1: mod_base = OTHER; note = 2'-O-methyluridine-3'-phosphorothioate
  modified_base 2: mod_base = OTHER; note = 2'-O-methylguanosine-3'-phosphorothioate
  modified_base 3: mod_base = OTHER; note = 2'-O-methylcytidine-3'-phosphate
  modified_base 4: mod_base = OTHER; note = 2'-O-methylguanosine-3'-phosphate
  modified_base 5: mod_base = OTHER; note = 2'-O-methyladenosine-3'-phosphate
  modified_base 6: mod_base = OTHER; note (2R,3S,4S,5R)-5-(6-amino-9H-purin-9-yl)-4-(docosyloxy)-2-(h ydroxymethyl)tetrahydrofuran-3-ol
  modified_base 7: mod_base = OTHER; note = 2'-fluorouridine-3'-phosphate
  modified_base 8: mod_base = OTHER; note = 2'-O-methylguanosine-3'-phosphate
  modified_base 9: mod_base = OTHER; note = 2'-fluorocytidine-3'-phosphate
  modified_base 10: mod_base = OTHER; note = 2'-fluorouridine-3'-phosphate
  modified_base 11: mod_base = OTHER; note = 2'-fluorouridine-3'-phosphate
  modified_base 12: mod_base = OTHER; note = 2'-O-methylcytidine-3'-phosphate
  modified_base 13: mod_base = OTHER; note = 2'-O-methylcytidine-3'-phosphate
  modified_base 14: mod_base = OTHER; note = 2'-O-methyladenosine-3'-phosphate
  modified_base 15: mod_base = OTHER; note = 2'-O-methylguanosine-3'-phosphate
  modified_base 16: mod_base = OTHER; note = 2'-O-methyladenosine-3'-phosphate
  modified_base 17: mod_base = OTHER; note = 2'-O-methyladenosine-3'-phosphate
  modified_base 18: mod_base = OTHER; note = 2'-O-methylguanosine-3'-phosphate
  modified_base 19: mod_base = OTHER; note = 2'-O-methyladenosine-3'-phosphorothioate
  modified_base 20: mod_base = OTHER; note = 2'-O-methylcytidine-3'-phosphorothioate
  modified_base 21: mod_base = OTHER; note = 2'-O-methyladenosine-3'-phosphate
tgcgaatgcttccagaagaca

SEQ ID NO: 2713 - RNA, 21 nt, synthetic construct
  source 1..21: mol_type = other RNA
  modified_base 1: mod_base = OTHER; note = 2'-O-methylcytidine-3'-phosphorothioate
  modified_base 2: mod_base = OTHER; note = 2'-O-methylguanosine-3'-phosphorothioate
  modified_base 3: mod_base = OTHER; note = 2'-O-methyladenosine-3'-phosphate
  modified_base 4: mod_base = OTHER; note = 2'-O-methyladenosine-3'-phosphate
  modified_base 5: mod_base = OTHER; note = 2'-O-methyluridine-3'-phosphate
  modified_base 6: mod_base = OTHER; note 2-amino-9-((2R,3S,4S,5R)-3-(docosyloxy)-4-hydroxy-5-(hydrox ymethyl)tetrahydrofuran-2-yl)-1,9-dihydro-6H-purin-6-one
  modified_base 7: mod_base = OTHER; note = 2'-fluoroadenosine-3'-phosphate
  modified_base 8: mod_base = OTHER; note = 2'-O-methylguanosine-3'-phosphate
  modified_base 9: mod_base = OTHER; note = 2'-fluorouridine-3'-phosphate
  modified_base 10: mod_base = OTHER; note = 2'-fluoroadenosine-3'-phosphate
  modified_base 11: mod_base = OTHER; note = 2'-fluoroadenosine-3'-phosphate
  modified_base 12: mod_base = OTHER; note = 2'-O-methylcytidine-3'-phosphate
  modified_base 13: mod_base = OTHER; note = 2'-O-methyluridine-3'-phosphate
  modified_base 14: mod_base = OTHER; note = 2'-O-methylcytidine-3'-phosphate
  modified_base 15: mod_base = OTHER; note = 2'-O-methylcytidine-3'-phosphate
  modified_base 16: mod_base = OTHER; note = 2'-O-methyluridine-3'-phosphate
  modified_base 17: mod_base = OTHER; note = 2'-O-methylguanosine-3'-phosphate
  modified_base 18: mod_base = OTHER; note = 2'-O-methyluridine-3'-phosphate
  modified_base 19: mod_base = OTHER; note = 2'-O-methylcytidine-3'-phosphorothioate
  modified_base 20: mod_base = OTHER; note = 2'-O-methyladenosine-3'-phosphorothioate
  modified_base 21: mod_base = OTHER; note = 2'-O-methyladenosine-3'-phosphate
cgaatgagtaactcctgtcaa

SEQ ID NO: 2714 - RNA, 21 nt, synthetic construct
  source 1..21: mol_type = other RNA
  modified_base 1: mod_base = OTHER; note = 2'-O-methyluridine-3'-phosphorothioate
  modified_base 2: mod_base = OTHER; note = 2'-O-methylguanosine-3'-phosphorothioate
  modified_base 3: mod_base = OTHER; note = 2'-O-methylguanosine-3'-phosphate
  modified_base 4: mod_base = OTHER; note = 2'-O-methylguanosine-3'-phosphate
  modified_base 5: mod_base = OTHER; note = 2'-O-methyluridine-3'-phosphate
  modified_base 6: mod_base = OTHER; note 2-amino-9-((2R,3S,4S,5R)-3-(docosyloxy)-4-hydroxy-5-(hydrox ymethyl)tetrahydrofuran-2-yl)-1,9-dihydro-6H-purin-6-one
  modified_base 7: mod_base = OTHER; note = 2'-fluorouridine-3'-phosphate
  modified_base 8: mod_base = OTHER; note = 2'-O-methyluridine-3'-phosphate
  modified_base 9: mod_base = OTHER; note = 2'-fluorouridine-3'-phosphate
  modified_base 10: mod_base = OTHER; note = 2'-fluoroadenosine-3'-phosphate
  modified_base 11: mod_base = OTHER; note = 2'-fluorouridine-3'-phosphate
  modified_base 12: mod_base = OTHER; note = 2'-O-methyluridine-3'-phosphate
  modified_base 13: mod_base = OTHER; note = 2'-O-methyluridine-3'-phosphate
  modified_base 14: mod_base = OTHER; note = 2'-O-methyladenosine-3'-phosphate
  modified_base 15: mod_base = OTHER; note = 2'-O-methyladenosine-3'-phosphate
  modified_base 16: mod_base = OTHER; note = 2'-O-methyladenosine-3'-phosphate
  modified_base 17: mod_base = OTHER; note = 2'-O-methyladenosine-3'-phosphate
  modified_base 18: mod_base = OTHER; note = 2'-O-methyluridine-3'-phosphate
  modified_base 19: mod_base = OTHER; note = 2'-O-methyladenosine-3'-phosphorothioate
  modified_base 20: mod_base = OTHER; note = 2'-O-methylcytidine-3'-phosphorothioate
  modified_base 21: mod_base = OTHER; note = 2'-O-methyladenosine-3'-phosphate
tgggtgtttatttaaaataca

SEQ ID NO: 2715 - RNA, 21 nt, synthetic construct
  source 1..21: mol_type = other RNA
  modified_base 1: mod_base = OTHER; note = 2'-O-methylcytidine-3'-phosphorothioate
  modified_base 2: mod_base = OTHER; note = 2'-O-methyladenosine-3'-phosphorothioate
  modified_base 3: mod_base = OTHER; note = 2'-O-methyladenosine-3'-phosphate
  modified_base 4: mod_base = OTHER; note = 2'-O-methyladenosine-3'-phosphate
  modified_base 5: mod_base = OTHER; note = 2'-O-methyladenosine-3'-phosphate
  modified_base 6: mod_base = OTHER; note 2-amino-9-((2R,3S,4S,5R)-3-(docosyloxy)-4-hydroxy-5-(hydrox ymethyl)tetrahydrofuran-2-yl)-1,9-dihydro-6H-purin-6-one
  modified_base 7: mod_base = OTHER; note = 2'-fluoroadenosine-3'-phosphate
  modified_base 8: mod_base = OTHER; note = 2'-O-methyluridine-3'-phosphate
  modified_base 9: mod_base = OTHER; note = 2'-fluoroadenosine-3'-phosphate
  modified_base 10: mod_base = OTHER; note = 2'-fluorouridine-3'-phosphate
  modified_base 11: mod_base = OTHER; note = 2'-fluorouridine-3'-phosphate
  modified_base 12: mod_base = OTHER; note = 2'-O-methyluridine-3'-phosphate
  modified_base 13: mod_base = OTHER; note = 2'-O-methylguanosine-3'-phosphate
  modified_base 14: mod_base = OTHER; note = 2'-O-methyladenosine-3'-phosphate
  modified_base 15: mod_base = OTHER; note = 2'-O-methylcytidine-3'-phosphate
  modified_base 16: mod_base = OTHER; note = 2'-O-methylcytidine-3'-phosphate
  modified_base 17: mod_base = OTHER; note = 2'-O-methylguanosine-3'-phosphate
  modified_base 18: mod_base = OTHER; note = 2'-O-methyluridine-3'-phosphate
  modified_base 19: mod_base = OTHER; note = 2'-O-methyluridine-3'-phosphorothioate
  modified_base 20: mod_base = OTHER; note = 2'-O-methyluridine-3'-phosphorothioate
  modified_base 21: mod_base = OTHER; note = 2'-O-methyladenosine-3'-phosphate
caaaagatatttgaccgttta

SEQ ID NO: 2716 - RNA, 21 nt, synthetic construct
  source 1..21: mol_type = other RNA
  modified_base 1: mod_base = OTHER; note = 2'-O-methyladenosine-3'-phosphorothioate
  modified_base 2: mod_base = OTHER; note = 2'-O-methyluridine-3'-phosphorothioate
  modified_base 3: mod_base = OTHER; note = 2'-O-methyladenosine-3'-phosphate
  modified_base 4: mod_base = OTHER; note = 2'-O-methylcytidine-3'-phosphate
  modified_base 5: mod_base = OTHER; note = 2'-O-methyladenosine-3'-phosphate
  modified_base 6: mod_base = OTHER; note 2-amino-9-((2R,3S,4S,5R)-3-(docosyloxy)-4-hydroxy-5-(hydrox ymethyl)tetrahydrofuran-2-yl)-1,9-dihydro-6H-purin-6-one
  modified_base 7: mod_base = OTHER; note = 2'-fluorocytidine-3'-phosphate
  modified_base 8: mod_base = OTHER; note = 2'-O-methyluridine-3'-phosphate
  modified_base 9: mod_base = OTHER; note = 2'-fluorouridine-3'-phosphate
  modified_base 10: mod_base = OTHER; note = 2'-fluoroguanosine-3'-phosphate
  modified_base 11: mod_base = OTHER; note = 2'-fluoroguanosine-3'-phosphate
  modified_base 12: mod_base = OTHER; note = 2'-O-methyladenosine-3'-phosphate
  modified_base 13: mod_base = OTHER; note = 2'-O-methylguanosine-3'-phosphate
  modified_base 14: mod_base = OTHER; note = 2'-O-methyladenosine-3'-phosphate
  modified_base 15: mod_base = OTHER; note = 2'-O-methylguanosine-3'-phosphate
  modified_base 16: mod_base = OTHER; note = 2'-O-methyladenosine-3'-phosphate
  modified_base 17: mod_base = OTHER; note = 2'-O-methyluridine-3'-phosphate
  modified_base 18: mod_base = OTHER; note = 2'-O-methyluridine-3'-phosphate
  modified_base 19: mod_base = OTHER; note = 2'-O-methyluridine-3'-phosphorothioate
  modified_base 20: mod_base = OTHER; note = 2'-O-methyluridine-3'-phosphorothioate
  modified_base 21: mod_base = OTHER; note = 2'-O-methyladenosine-3'-phosphate
atacagcttggagagatttta

SEQ ID NO: 2717 - RNA, 21 nt, synthetic construct
  source 1..21: mol_type = other RNA
  modified_base 1: mod_base = OTHER; note = 2'-O-methyladenosine-3'-phosphorothioate
  modified_base 2: mod_base = OTHER; note = 2'-O-methyladenosine-3'-phosphorothioate
  modified_base 3: mod_base = OTHER; note = 2'-O-methyladenosine-3'-phosphate
  modified_base 4: mod_base = OTHER; note = 2'-O-methyluridine-3'-phosphate
  modified_base 5: mod_base = OTHER; note = 2'-O-methylguanosine-3'-phosphate
  modified_base 6: mod_base = OTHER; note 4-amino-1-((2R,3R,4R,5R)-3-(docosyloxy)-4-hydroxy-5-(hydrox ymethyl)tetrahydrofuran-2-yl)pyrimidin-2(1H)-one
  modified_base 7: mod_base = OTHER; note = 2'-fluoroadenosine-3'-phosphate
  modified_base 8: mod_base = OTHER; note = 2'-O-methyluridine-3'-phosphate
  modified_base 9: mod_base = OTHER; note = 2'-fluorouridine-3'-phosphate
  modified_base 10: mod_base = OTHER; note = 2'-fluorocytidine-3'-phosphate
  modified_base 11: mod_base = OTHER; note = 2'-fluoroadenosine-3'-phosphate
  modified_base 12: mod_base = OTHER; note = 2'-O-methyluridine-3'-phosphate
  modified_base 13: mod_base = OTHER; note = 2'-O-methyladenosine-3'-phosphate
  modified_base 14: mod_base = OTHER; note = 2'-O-methylcytidine-3'-phosphate
  modified_base 15: mod_base = OTHER; note = 2'-O-methyladenosine-3'-phosphate
  modified_base 16: mod_base = OTHER; note = 2'-O-methyladenosine-3'-phosphate
  modified_base 17: mod_base = OTHER; note = 2'-O-methyluridine-3'-phosphate
  modified_base 18: mod_base = OTHER; note = 2'-O-methyluridine-3'-phosphate
  modified_base 19: mod_base = OTHER; note = 2'-O-methyladenosine-3'-phosphorothioate
  modified_base 20: mod_base = OTHER; note = 2'-O-methylcytidine-3'-phosphorothioate
  modified_base 21: mod_base = OTHER; note = 2'-O-methyladenosine-3'-phosphate
aaatgcattcatacaattaca

SEQ ID NO: 2718 - RNA, 21 nt, synthetic construct
  source 1..21: mol_type = other RNA
  modified_base 1: mod_base = OTHER; note = 2'-O-methyluridine-3'-phosphorothioate
  modified_base 2: mod_base = OTHER; note = 2'-O-methylcytidine-3'-phosphorothioate
  modified_base 3: mod_base = OTHER; note = 2'-O-methylcytidine-3'-phosphate
  modified_base 4: mod_base = OTHER; note = 2'-O-methylcytidine-3'-phosphate
  modified_base 5: mod_base = OTHER; note = 2'-O-methyladenosine-3'-phosphate
  modified_base 6: mod_base = OTHER; note 4-amino-1-((2R,3R,4R,5R)-3-(docosyloxy)-4-hydroxy-5-(hydrox ymethyl)tetrahydrofuran-2-yl)pyrimidin-2(1H)-one
  modified_base 7: mod_base = OTHER; note = 2'-fluorouridine-3'-phosphate
  modified_base 8: mod_base = OTHER; note = 2'-O-methylcytidine-3'-phosphate
  modified_base 9: mod_base = OTHER; note = 2'-fluoroguanosine-3'-phosphate
  modified_base 10: mod_base = OTHER; note = 2'-fluorocytidine-3'-phosphate
  modified_base 11: mod_base = OTHER; note = 2'-fluorouridine-3'-phosphate
  modified_base 12: mod_base = OTHER; note = 2'-O-methylcytidine-3'-phosphate
  modified_base 13: mod_base = OTHER; note = 2'-O-methyluridine-3'-phosphate
  modified_base 14: mod_base = OTHER; note = 2'-O-methyluridine-3'-phosphate
  modified_base 15: mod_base = OTHER; note = 2'-O-methyluridine-3'-phosphate
  modified_base 16: mod_base = OTHER; note = 2'-O-methyluridine-3'-phosphate
  modified_base 17: mod_base = OTHER; note = 2'-O-methyluridine-3'-phosphate
  modified_base 18: mod_base = OTHER; note = 2'-O-methylguanosine-3'-phosphate
  modified_base 19: mod_base = OTHER; note = 2'-O-methyladenosine-3'-phosphorothioate
  modified_base 20: mod_base = OTHER; note = 2'-O-methyluridine-3'-phosphorothioate
  modified_base 21: mod_base = OTHER; note = 2'-O-methyladenosine-3'-phosphate
tcccactcgctctttttgata

SEQ ID NO: 2719 - RNA, 21 nt, synthetic construct
  source 1..21: mol_type = other RNA
  modified_base 1: mod_base = OTHER; note = 2'-O-methylguanosine-3'-phosphorothioate
  modified_base 2: mod_base = OTHER; note = 2'-O-methylcytidine-3'-phosphorothioate
  modified_base 3: mod_base = OTHER; note = 2'-O-methyluridine-3'-phosphate
  modified_base 4: mod_base = OTHER; note = 2'-O-methyluridine-3'-phosphate
  modified_base 5: mod_base = OTHER; note = 2'-O-methylguanosine-3'-phosphate
  modified_base 6: mod_base = OTHER; note 1-((2R,3R,4R,5R)-3-(docosyloxy)-4-hydroxy-5-(hydroxymethyl) tetrahydrofuran-2-yl)pyrimidine-2,4(1H,3H)-dione
  modified_base 7: mod_base = OTHER; note = 2'-fluoroguanosine-3'-phosphate
  modified_base 8: mod_base = OTHER; note = 2'-O-methyluridine-3'-phosphate
  modified_base 9: mod_base = OTHER; note = 2'-fluorouridine-3'-phosphate
  modified_base 10: mod_base = OTHER; note = 2'-fluorouridine-3'-phosphate
  modified_base 11: mod_base = OTHER; note = 2'-fluoroadenosine-3'-phosphate
  modified_base 12: mod_base = OTHER; note = 2'-O-methylcytidine-3'-phosphate
  modified_base 13: mod_base = OTHER; note = 2'-O-methyladenosine-3'-phosphate
  modified_base 14: mod_base = OTHER; note = 2'-O-methylcytidine-3'-phosphate
  modified_base 15: mod_base = OTHER; note = 2'-O-methyladenosine-3'-phosphate
  modified_base 16: mod_base = OTHER; note = 2'-O-methyladenosine-3'-phosphate
  modified_base 17: mod_base = OTHER; note = 2'-O-methylguanosine-3'-phosphate
  modified_base 18: mod_base = OTHER; note = 2'-O-methylcytidine-3'-phosphate
  modified_base 19: mod_base = OTHER; note = 2'-O-methyluridine-3'-phosphorothioate
  modified_base 20: mod_base = OTHER; note = 2'-O-methylguanosine-3'-phosphorothioate
  modified_base 21: mod_base = OTHER; note = 2'-O-methyladenosine-3'-phosphate
gcttgtgtttacacaagctga

SEQ ID NO: 2720 - RNA, 21 nt, synthetic construct
  source 1..21: mol_type = other RNA
  modified_base 1: mod_base = OTHER; note = 2'-O-methylcytidine-3'-phosphorothioate
  modified_base 2: mod_base = OTHER; note = 2'-O-methylcytidine-3'-phosphorothioate
  modified_base 3: mod_base = OTHER; note = 2'-O-methyluridine-3'-phosphate
  modified_base 4: mod_base = OTHER; note = 2'-O-methylguanosine-3'-phosphate
  modified_base 5: mod_base = OTHER; note = 2'-O-methylcytidine-3'-phosphate
  modified_base 6: mod_base = OTHER; note 4-amino-1-((2R,3R,4R,5R)-3-(docosyloxy)-4-hydroxy-5-(hydrox ymethyl)tetrahydrofuran-2-yl)pyrimidin-2(1H)-one
  modified_base 7: mod_base = OTHER; note = 2'-fluorouridine-3'-phosphate
  modified_base 8: mod_base = OTHER; note = 2'-O-methyluridine-3'-phosphate
  modified_base 9: mod_base = OTHER; note = 2'-fluoroadenosine-3'-phosphate
  modified_base 10: mod_base = OTHER; note = 2'-fluorocytidine-3'-phosphate
  modified_base 11: mod_base = OTHER; note = 2'-fluoroadenosine-3'-phosphate
  modified_base 12: mod_base = OTHER; note = 2'-O-methyluridine-3'-phosphate
  modified_base 13: mod_base = OTHER; note = 2'-O-methylguanosine-3'-phosphate
  modified_base 14: mod_base = OTHER; note = 2'-O-methylguanosine-3'-phosphate
  modified_base 15: mod_base = OTHER; note = 2'-O-methylcytidine-3'-phosphate
  modified_base 16: mod_base = OTHER; note = 2'-O-methyluridine-3'-phosphate
  modified_base 17: mod_base = OTHER; note = 2'-O-methyluridine-3'-phosphate
  modified_base 18: mod_base = OTHER; note = 2'-O-methylguanosine-3'-phosphate
  modified_base 19: mod_base = OTHER; note = 2'-O-methyluridine-3'-phosphorothioate
  modified_base 20: mod_base = OTHER; note = 2'-O-methyluridine-3'-phosphorothioate
  modified_base 21: mod_base = OTHER; note = 2'-O-methyladenosine-3'-phosphate
cctgccttacatggcttgtta

SEQ ID NO: 2721 - RNA, 21 nt, synthetic construct
  source 1..21: mol_type = other RNA
  modified_base 1: mod_base = OTHER; note = 2'-O-methylguanosine-3'-phosphorothioate
  modified_base 2: mod_base = OTHER; note = 2'-O-methyladenosine-3'-phosphorothioate
  modified_base 3: mod_base = OTHER; note = 2'-O-methylguanosine-3'-phosphate
  modified_base 4: mod_base = OTHER; note = 2'-O-methyladenosine-3'-phosphate
  modified_base 5: mod_base = OTHER; note = 2'-O-methyluridine-3'-phosphate
  modified_base 6: mod_base = OTHER; note 1-((2R,3R,4R,5R)-3-(docosyloxy)-4-hydroxy-5-(hydroxymethyl) tetrahydrofuran-2-yl)pyrimidine-2,4(1H,3H)-dione
  modified_base 7: mod_base = OTHER; note = 2'-fluorouridine-3'-phosphate
  modified_base 8: mod_base = OTHER; note = 2'-O-methyluridine-3'-phosphate
  modified_base 9: mod_base = OTHER; note = 2'-fluorouridine-3'-phosphate
  modified_base 10: mod_base = OTHER; note = 2'-fluoroguanosine-3'-phosphate
  modified_base 11: mod_base = OTHER; note = 2'-fluorouridine-3'-phosphate
  modified_base 12: mod_base = OTHER; note = 2'-O-methyladenosine-3'-phosphate
  modified_base 13: mod_base = OTHER; note = 2'-O-methyluridine-3'-phosphate
  modified_base 14: mod_base = OTHER; note = 2'-O-methylcytidine-3'-phosphate
  modified_base 15: mod_base = OTHER; note = 2'-O-methyladenosine-3'-phosphate
  modified_base 16: mod_base = OTHER; note = 2'-O-methylcytidine-3'-phosphate
  modified_base 17: mod_base = OTHER; note = 2'-O-methyladenosine-3'-phosphate
  modified_base 18: mod_base = OTHER; note = 2'-O-methyluridine-3'-phosphate
  modified_base 19: mod_base = OTHER; note = 2'-O-methyluridine-3'-phosphorothioate
  modified_base 20: mod_base = OTHER; note = 2'-O-methyladenosine-3'-phosphorothioate
  modified_base 21: mod_base = OTHER; note = 2'-O-methyladenosine-3'-phosphate
gagatttttgtatcacattaa

SEQ ID NO: 2722 - RNA, 21 nt, synthetic construct
  source 1..21: mol_type = other RNA
  modified_base 1: mod_base = OTHER; note = 2'-O-methyladenosine-3'-phosphorothioate
  modified_base 2: mod_base = OTHER; note = 2'-O-methylguanosine-3'-phosphorothioate
  modified_base 3: mod_base = OTHER; note = 2'-O-methylcytidine-3'-phosphate
  modified_base 4: mod_base = OTHER; note = 2'-O-methyladenosine-3'-phosphate
  modified_base 5: mod_base = OTHER; note = 2'-O-methylcytidine-3'-phosphate
  modified_base 6: mod_base = OTHER; note 1-((2R,3R,4R,5R)-3-(docosyloxy)-4-hydroxy-5-(hydroxymethyl) tetrahydrofuran-2-yl)pyrimidine-2,4(1H,3H)-dione
  modified_base 7: mod_base = OTHER; note = 2'-fluorouridine-3'-phosphate
  modified_base 8: mod_base = OTHER; note = 2'-O-methylcytidine-3'-phosphate
  modified_base 9: mod_base = OTHER; note = 2'-fluoroadenosine-3'-phosphate
  modified_base 10: mod_base = OTHER; note = 2'-fluoroguanosine-3'-phosphate
  modified_base 11: mod_base = OTHER; note = 2'-fluoroadenosine-3'-phosphate
  modified_base 12: mod_base = OTHER; note = 2'-O-methylcytidine-3'-phosphate
  modified_base 13: mod_base = OTHER; note = 2'-O-methyladenosine-3'-phosphate
  modified_base 14: mod_base = OTHER; note = 2'-O-methyladenosine-3'-phosphate
  modified_base 15: mod_base = OTHER; note = 2'-O-methylguanosine-3'-phosphate
  modified_base 16: mod_base = OTHER; note = 2'-O-methylguanosine-3'-phosphate
  modified_base 17: mod_base = OTHER; note = 2'-O-methyluridine-3'-phosphate
  modified_base 18: mod_base = OTHER; note = 2'-O-methylcytidine-3'-phosphate
  modified_base 19: mod_base = OTHER; note = 2'-O-methylcytidine-3'-phosphorothioate
  modified_base 20: mod_base = OTHER; note = 2'-O-methyluridine-3'-phosphorothioate
  modified_base 21: mod_base = OTHER; note = 2'-O-methyladenosine-3'-phosphate
agcacttcagacaaggtccta

SEQ ID NO: 2723 - RNA, 21 nt, synthetic construct
  source 1..21: mol_type = other RNA
  modified_base 1: mod_base = OTHER; note = 2'-O-methyluridine-3'-phosphorothioate
  modified_base 2: mod_base = OTHER; note = 2'-O-methylcytidine-3'-phosphorothioate
  modified_base 3: mod_base = OTHER; note = 2'-O-methyladenosine-3'-phosphate
  modified_base 4: mod_base = OTHER; note = 2'-O-methylcytidine-3'-phosphate
  modified_base 5: mod_base = OTHER; note = 2'-O-methyluridine-3'-phosphate
  modified_base 6: mod_base = OTHER; note 4-amino-1-((2R,3R,4R,5R)-3-(docosyloxy)-4-hydroxy-5-(hydrox ymethyl)tetrahydrofuran-2-yl)pyrimidin-2(1H)-one
  modified_base 7: mod_base = OTHER; note = 2'-fluorouridine-3'-phosphate
  modified_base 8: mod_base = OTHER; note = 2'-O-methylcytidine-3'-phosphate
  modified_base 9: mod_base = OTHER; note = 2'-fluoroadenosine-3'-phosphate
  modified_base 10: mod_base = OTHER; note = 2'-fluoroguanosine-3'-phosphate
  modified_base 11: mod_base = OTHER; note = 2'-fluoroadenosine-3'-phosphate
  modified_base 12: mod_base = OTHER; note = 2'-O-methylguanosine-3'-phosphate
  modified_base 13: mod_base = OTHER; note = 2'-O-methylcytidine-3'-phosphate
  modified_base 14: mod_base = OTHER; note = 2'-O-methylcytidine-3'-phosphate
  modified_base 15: mod_base = OTHER; note = 2'-O-methyladenosine-3'-phosphate
  modified_base 16: mod_base = OTHER; note = 2'-O-methylguanosine-3'-phosphate
  modified_base 17: mod_base = OTHER; note = 2'-O-methyluridine-3'-phosphate
  modified_base 18: mod_base = OTHER; note = 2'-O-methyluridine-3'-phosphate
  modified_base 19: mod_base = OTHER; note = 2'-O-methyluridine-3'-phosphorothioate
  modified_base 20: mod_base = OTHER; note = 2'-O-methyluridine-3'-phosphorothioate
  modified_base 21: mod_base = OTHER; note = 2'-O-methyladenosine-3'-phosphate
tcactctcagagccagtttta

SEQ ID NO: 2724 - RNA, 21 nt, synthetic construct
  source 1..21: mol_type = other RNA
  modified_base 1: mod_base = OTHER; note = 2'-O-methyladenosine-3'-phosphorothioate
  modified_base 2: mod_base = OTHER; note = 2'-O-methylcytidine-3'-phosphorothioate
  modified_base 3: mod_base = OTHER; note = 2'-O-methyluridine-3'-phosphate
  modified_base 4: mod_base = OTHER; note = 2'-O-methylguanosine-3'-phosphate
  modified_base 5: mod_base = OTHER; note = 2'-O-methyladenosine-3'-phosphate
  modified_base 6: mod_base = OTHER; note (2R,3S,4S,5R)-5-(6-amino-9H-purin-9-yl)-4-(docosyloxy)-2-(h ydroxymethyl)tetrahydrofuran-3-ol
  modified_base 7: mod_base = OTHER; note = 2'-fluorocytidine-3'-phosphate
  modified_base 8: mod_base = OTHER; note = 2'-O-methyluridine-3'-phosphate
  modified_base 9: mod_base = OTHER; note = 2'-fluorocytidine-3'-phosphate
  modified_base 10: mod_base = OTHER; note = 2'-fluorocytidine-3'-phosphate
  modified_base 11: mod_base = OTHER; note = 2'-fluorouridine-3'-phosphate
  modified_base 12: mod_base = OTHER; note = 2'-O-methylcytidine-3'-phosphate
  modified_base 13: mod_base = OTHER; note = 2'-O-methyluridine-3'-phosphate
  modified_base 14: mod_base = OTHER; note = 2'-O-methylguanosine-3'-phosphate
  modified_base 15: mod_base = OTHER; note = 2'-O-methyluridine-3'-phosphate
  modified_base 16: mod_base = OTHER; note = 2'-O-methylguanosine-3'-phosphate
  modified_base 17: mod_base = OTHER; note = 2'-O-methyladenosine-3'-phosphate
  modified_base 18: mod_base = OTHER; note = 2'-O-methyluridine-3'-phosphate
  modified_base 19: mod_base = OTHER; note = 2'-O-methylcytidine-3'-phosphorothioate
  modified_base 20: mod_base = OTHER; note = 2'-O-methyluridine-3'-phosphorothioate
  modified_base 21: mod_base = OTHER; note = 2'-O-methyladenosine-3'-phosphate
actgaactcctctgtgatcta

SEQ ID NO: 2725 - RNA, 21 nt, synthetic construct
  source 1..21: mol_type = other RNA
  modified_base 1: mod_base = OTHER; note = 2'-O-methyluridine-3'-phosphorothioate
  modified_base 2: mod_base = OTHER; note = 2'-O-methyladenosine-3'-phosphorothioate
  modified_base 3: mod_base = OTHER; note = 2'-O-methylguanosine-3'-phosphate
  modified_base 4: mod_base = OTHER; note = 2'-O-methyluridine-3'-phosphate
  modified_base 5: mod_base = OTHER; note = 2'-O-methyluridine-3'-phosphate
  modified_base 6: mod_base = OTHER; note 4-amino-1-((2R,3R,4R,5R)-3-(docosyloxy)-4-hydroxy-5-(hydrox ymethyl)tetrahydrofuran-2-yl)pyrimidin-2(1H)-one
  modified_base 7: mod_base = OTHER; note = 2'-fluorocytidine-3'-phosphate
  modified_base 8: mod_base = OTHER; note = 2'-O-methylcytidine-3'-phosphate
  modified_base 9: mod_base = OTHER; note = 2'-fluorouridine-3'-phosphate
  modified_base 10: mod_base = OTHER; note = 2'-fluoroadenosine-3'-phosphate
  modified_base 11: mod_base = OTHER; note = 2'-fluoroadenosine-3'-phosphate
  modified_base 12: mod_base = OTHER; note = 2'-O-methyluridine-3'-phosphate
  modified_base 13: mod_base = OTHER; note = 2'-O-methylguanosine-3'-phosphate
  modified_base 14: mod_base = OTHER; note = 2'-O-methyladenosine-3'-phosphate
  modified_base 15: mod_base = OTHER; note = 2'-O-methyluridine-3'-phosphate
  modified_base 16: mod_base = OTHER; note = 2'-O-methylguanosine-3'-phosphate
  modified_base 17: mod_base = OTHER; note = 2'-O-methylguanosine-3'-phosphate
  modified_base 18: mod_base = OTHER; note = 2'-O-methyladenosine-3'-phosphate
  modified_base 19: mod_base = OTHER; note = 2'-O-methylcytidine-3'-phosphorothioate
  modified_base 20: mod_base = OTHER; note = 2'-O-methyluridine-3'-phosphorothioate
  modified_base 21: mod_base = OTHER; note = 2'-O-methyladenosine-3'-phosphate
tagttccctaatgatggacta

SEQ ID NO: 2726 - RNA, 21 nt, synthetic construct
  source 1..21: mol_type = other RNA
  modified_base 1: mod_base = OTHER; note = 2'-O-methylguanosine-3'-phosphorothioate
  modified_base 2: mod_base = OTHER; note = 2'-O-methylguanosine-3'-phosphorothioate
  modified_base 3: mod_base = OTHER; note = 2'-O-methylcytidine-3'-phosphate
  modified_base 4: mod_base = OTHER; note = 2'-O-methylguanosine-3'-phosphate
  modified_base 5: mod_base = OTHER; note = 2'-O-methyluridine-3'-phosphate
  modified_base 6: mod_base = OTHER; note 1-((2R,3R,4R,5R)-3-(docosyloxy)-4-hydroxy-5-(hydroxymethyl) tetrahydrofuran-2-yl)pyrimidine-2,4(1H,3H)-dione
  modified_base 7: mod_base = OTHER; note = 2'-fluoroadenosine-3'-phosphate
  modified_base 8: mod_base = OTHER; note = 2'-O-methylcytidine-3'-phosphate
  modified_base 9: mod_base = OTHER; note = 2'-fluorouridine-3'-phosphate
  modified_base 10: mod_base = OTHER; note = 2'-fluoroguanosine-3'-phosphate
  modified_base 11: mod_base = OTHER; note = 2'-fluoroadenosine-3'-phosphate
  modified_base 12: mod_base = OTHER; note = 2'-O-methylcytidine-3'-phosphate
  modified_base 13: mod_base = OTHER; note = 2'-O-methyladenosine-3'-phosphate
  modified_base 14: mod_base = OTHER; note = 2'-O-methyladenosine-3'-phosphate
  modified_base 15: mod_base = OTHER; note = 2'-O-methylcytidine-3'-phosphate
  modified_base 16: mod_base = OTHER; note = 2'-O-methylguanosine-3'-phosphate
  modified_base 17: mod_base = OTHER; note = 2'-O-methyluridine-3'-phosphate
  modified_base 18: mod_base = OTHER; note = 2'-O-methylguanosine-3'-phosphate
  modified_base 19: mod_base = OTHER; note = 2'-O-methylguanosine-3'-phosphorothioate
  modified_base 20: mod_base = OTHER; note = 2'-O-methyluridine-3'-phosphorothioate
  modified_base 21: mod_base = OTHER; note = 2'-O-methyladenosine-3'-phosphate
ggcgttactgacaacgtggta

SEQ ID NO: 2727 - RNA, 21 nt, synthetic construct
  source 1..21: mol_type = other RNA
  modified_base 1: mod_base = OTHER; note = 2'-O-methyluridine-3'-phosphorothioate
  modified_base 2: mod_base = OTHER; note = 2'-O-methylguanosine-3'-phosphorothioate
  modified_base 3: mod_base = OTHER; note = 2'-O-methyladenosine-3'-phosphate
  modified_base 4: mod_base = OTHER; note = 2'-O-methyluridine-3'-phosphate
  modified_base 5: mod_base = OTHER; note = 2'-O-methylcytidine-3'-phosphate
  modified_base 6: mod_base = OTHER; note 1-((2R,3R,4R,5R)-3-(docosyloxy)-4-hydroxy-5-(hydroxymethyl) tetrahydrofuran-2-yl)pyrimidine-2,4(1H,3H)-dione
  modified_base 7: mod_base = OTHER; note = 2'-fluoroadenosine-3'-phosphate
  modified_base 8: mod_base = OTHER; note = 2'-O-methylguanosine-3'-phosphate
  modified_base 9: mod_base = OTHER; note = 2'-fluoroguanosine-3'-phosphate
  modified_base 10: mod_base = OTHER; note = 2'-fluoroadenosine-3'-phosphate
  modified_base 11: mod_base = OTHER; note = 2'-fluorouridine-3'-phosphate
  modified_base 12: mod_base = OTHER; note = 2'-O-methylguanosine-3'-phosphate
  modified_base 13: mod_base = OTHER; note = 2'-O-methyladenosine-3'-phosphate
  modified_base 14: mod_base = OTHER; note = 2'-O-methyluridine-3'-phosphate
  modified_base 15: mod_base = OTHER; note = 2'-O-methylcytidine-3'-phosphate
  modified_base 16: mod_base = OTHER; note = 2'-O-methyluridine-3'-phosphate
  modified_base 17: mod_base = OTHER; note = 2'-O-methylguanosine-3'-phosphate
  modified_base 18: mod_base = OTHER; note = 2'-O-methyluridine-3'-phosphate
  modified_base 19: mod_base = OTHER; note = 2'-O-methyluridine-3'-phosphorothioate
  modified_base 20: mod_base = OTHER; note = 2'-O-methylcytidine-3'-phosphorothioate
  modified_base 21: mod_base = OTHER; note = 2'-O-methyladenosine-3'-phosphate
tgatctaggatgatctgttca

SEQ ID NO: 2728 - RNA, 21 nt, synthetic construct
  source 1..21: mol_type = other RNA
  modified_base 1: mod_base = OTHER; note = 2'-O-methylguanosine-3'-phosphorothioate
  modified_base 2: mod_base = OTHER; note = 2'-O-methyluridine-3'-phosphorothioate
  modified_base 3: mod_base = OTHER; note = 2'-O-methylguanosine-3'-phosphate
  modified_base 4: mod_base = OTHER; note = 2'-O-methyladenosine-3'-phosphate
  modified_base 5: mod_base = OTHER; note = 2'-O-methyluridine-3'-phosphate
  modified_base 6: mod_base = OTHER; note 2-amino-9-((2R,3S,4S,5R)-3-(docosyloxy)-4-hydroxy-5-(hydrox ymethyl)tetrahydrofuran-2-yl)-1,9-dihydro-6H-purin-6-one
  modified_base 7: mod_base = OTHER; note = 2'-fluoroadenosine-3'-phosphate
  modified_base 8: mod_base = OTHER; note = 2'-O-methyluridine-3'-phosphate
  modified_base 9: mod_base = OTHER; note = 2'-fluoroadenosine-3'-phosphate
  modified_base 10: mod_base = OTHER; note = 2'-fluorouridine-3'-phosphate
  modified_base 11: mod_base = OTHER; note = 2'-fluoroadenosine-3'-phosphate
  modified_base 12: mod_base = OTHER; note = 2'-O-methyluridine-3'-phosphate
  modified_base 13: mod_base = OTHER; note = 2'-O-methyladenosine-3'-phosphate
  modified_base 14: mod_base = OTHER; note = 2'-O-methylguanosine-3'-phosphate
  modified_base 15: mod_base = OTHER; note = 2'-O-methyladenosine-3'-phosphate
  modified_base 16: mod_base = OTHER; note = 2'-O-methylcytidine-3'-phosphate
  modified_base 17: mod_base = OTHER; note = 2'-O-methyluridine-3'-phosphate
  modified_base 18: mod_base = OTHER; note = 2'-O-methyluridine-3'-phosphate
  modified_base 19: mod_base = OTHER; note = 2'-O-methyluridine-3'-phosphorothioate
  modified_base 20: mod_base = OTHER; note = 2'-O-methyladenosine-3'-phosphorothioate
  modified_base 21: mod_base = OTHER; note = 2'-O-methyladenosine-3'-phosphate
gtgatgatatatagactttaa

SEQ ID NO: 2729 - RNA, 21 nt, synthetic construct
  source 1..21: mol_type = other RNA
  modified_base 1: mod_base = OTHER; note = 2'-O-methylguanosine-3'-phosphorothioate
  modified_base 2: mod_base = OTHER; note = 2'-O-methylguanosine-3'-phosphorothioate
  modified_base 3: mod_base = OTHER; note = 2'-O-methylcytidine-3'-phosphate
  modified_base 4: mod_base = OTHER; note = 2'-O-methyluridine-3'-phosphate
  modified_base 5: mod_base = OTHER; note = 2'-O-methyladenosine-3'-phosphate
  modified_base 6: mod_base = OTHER; note 4-amino-1-((2R,3R,4R,5R)-3-(docosyloxy)-4-hydroxy-5-(hydrox ymethyl)tetrahydrofuran-2-yl)pyrimidin-2(1H)-one
  modified_base 7: mod_base = OTHER; note = 2'-fluorouridine-3'-phosphate
  modified_base 8: mod_base = OTHER; note = 2'-O-methyluridine-3'-phosphate
  modified_base 9: mod_base = OTHER; note = 2'-fluorouridine-3'-phosphate
  modified_base 10: mod_base = OTHER; note = 2'-fluoroguanosine-3'-phosphate
  modified_base 11: mod_base = OTHER; note = 2'-fluoroadenosine-3'-phosphate
  modified_base 12: mod_base = OTHER; note = 2'-O-methyladenosine-3'-phosphate
  modified_base 13: mod_base = OTHER; note = 2'-O-methylguanosine-3'-phosphate
  modified_base 14: mod_base = OTHER; note = 2'-O-methylguanosine-3'-phosphate
  modified_base 15: mod_base = OTHER; note = 2'-O-methylguanosine-3'-phosphate
  modified_base 16: mod_base = OTHER; note = 2'-O-methyladenosine-3'-phosphate
  modified_base 17: mod_base = OTHER; note = 2'-O-methyladenosine-3'-phosphate
  modified_base 18: mod_base = OTHER; note = 2'-O-methylcytidine-3'-phosphate
  modified_base 19: mod_base = OTHER; note = 2'-O-methyladenosine-3'-phosphorothioate
  modified_base 20: mod_base = OTHER; note = 2'-O-methyladenosine-3'-phosphorothioate
  modified_base 21: mod_base = OTHER; note = 2'-O-methyladenosine-3'-phosphate
ggctactttgaagggaacaaa

SEQ ID NO: 2730 - RNA, 21 nt, synthetic construct
  source 1..21: mol_type = other RNA
  modified_base 1: mod_base = OTHER; note = 2'-O-methylcytidine-3'-phosphorothioate
  modified_base 2: mod_base = OTHER; note = 2'-O-methyluridine-3'-phosphorothioate
  modified_base 3: mod_base = OTHER; note = 2'-O-methylguanosine-3'-phosphate
  modified_base 4: mod_base = OTHER; note = 2'-O-methylcytidine-3'-phosphate
  modified_base 5: mod_base = OTHER; note = 2'-O-methyluridine-3'-phosphate
  modified_base 6: mod_base = OTHER; note 4-amino-1-((2R,3R,4R,5R)-3-(docosyloxy)-4-hydroxy-5-(hydrox ymethyl)tetrahydrofuran-2-yl)pyrimidin-2(1H)-one
  modified_base 7: mod_base = OTHER; note = 2'-fluorouridine-3'-phosphate
  modified_base 8: mod_base = OTHER; note = 2'-O-methylguanosine-3'-phosphate
  modified_base 9: mod_base = OTHER; note = 2'-fluoroadenosine-3'-phosphate
  modified_base 10: mod_base = OTHER; note = 2'-fluorouridine-3'-phosphate
  modified_base 11: mod_base = OTHER; note = 2'-fluorouridine-3'-phosphate
  modified_base 12: mod_base = OTHER; note = 2'-O-methylcytidine-3'-phosphate
  modified_base 13: mod_base = OTHER; note = 2'-O-methyluridine-3'-phosphate
  modified_base 14: mod_base = OTHER; note = 2'-O-methyladenosine-3'-phosphate
  modified_base 15: mod_base = OTHER; note = 2'-O-methyluridine-3'-phosphate
  modified_base 16: mod_base = OTHER; note = 2'-O-methylguanosine-3'-phosphate
  modified_base 17: mod_base = OTHER; note = 2'-O-methylguanosine-3'-phosphate
  modified_base 18: mod_base = OTHER; note = 2'-O-methylcytidine-3'-phosphate
  modified_base 19: mod_base = OTHER; note = 2'-O-methyluridine-3'-phosphorothioate
  modified_base 20: mod_base = OTHER; note = 2'-O-methyluridine-3'-phosphorothioate
  modified_base 21: mod_base = OTHER; note = 2'-O-methyladenosine-3'-phosphate
ctgctctgattctatggctta

SEQ ID NO: 2731 - RNA, 21 nt, synthetic construct
  source 1..21: mol_type = other RNA
  modified_base 1: mod_base = OTHER; note = 2'-O-methyladenosine-3'-phosphorothioate
  modified_base 2: mod_base = OTHER; note = 2'-O-methylguanosine-3'-phosphorothioate
  modified_base 3: mod_base = OTHER; note = 2'-O-methyladenosine-3'-phosphate
  modified_base 4: mod_base = OTHER; note = 2'-O-methyluridine-3'-phosphate
  modified_base 5: mod_base = OTHER; note = 2'-O-methyluridine-3'-phosphate
  modified_base 6: mod_base = OTHER; note 2-amino-9-((2R,3S,4S,5R)-3-(docosyloxy)-4-hydroxy-5-(hydrox ymethyl)tetrahydrofuran-2-yl)-1,9-dihydro-6H-purin-6-one
  modified_base 7: mod_base = OTHER; note = 2'-fluorocytidine-3'-phosphate
  modified_base 8: mod_base = OTHER; note = 2'-O-methyluridine-3'-phosphate
  modified_base 9: mod_base = OTHER; note = 2'-fluorouridine-3'-phosphate
  modified_base 10: mod_base = OTHER; note = 2'-fluorocytidine-3'-phosphate
  modified_base 11: mod_base = OTHER; note = 2'-fluorouridine-3'-phosphate
  modified_base 12: mod_base = OTHER; note = 2'-O-methylguanosine-3'-phosphate
  modified_base 13: mod_base = OTHER; note = 2'-O-methyladenosine-3'-phosphate
  modified_base 14: mod_base = OTHER; note = 2'-O-methylguanosine-3'-phosphate
  modified_base 15: mod_base = OTHER; note = 2'-O-methylcytidine-3'-phosphate
  modified_base 16: mod_base = OTHER; note = 2'-O-methyluridine-3'-phosphate
  modified_base 17: mod_base = OTHER; note = 2'-O-methylguanosine-3'-phosphate
  modified_base 18: mod_base = OTHER; note = 2'-O-methyladenosine-3'-phosphate
  modified_base 19: mod_base = OTHER; note = 2'-O-methyladenosine-3'-phosphorothioate
  modified_base 20: mod_base = OTHER; note = 2'-O-methylguanosine-3'-phosphorothioate
  modified_base 21: mod_base = OTHER; note = 2'-O-methyladenosine-3'-phosphate
agattgcttctgagctgaaga

SEQ ID NO: 2732 - RNA, 21 nt, synthetic construct
  source 1..21: mol_type = other RNA
  modified_base 1: mod_base = OTHER; note = 2'-O-methylguanosine-3'-phosphorothioate
  modified_base 2: mod_base = OTHER; note = 2'-O-methylcytidine-3'-phosphorothioate
  modified_base 3: mod_base = OTHER; note = 2'-O-methylcytidine-3'-phosphate
  modified_base 4: mod_base = OTHER; note = 2'-O-methyladenosine-3'-phosphate
  modified_base 5: mod_base = OTHER; note = 2'-O-methyluridine-3'-phosphate
  modified_base 6: mod_base = OTHER; note 4-amino-1-((2R,3R,4R,5R)-3-(docosyloxy)-4-hydroxy-5-(hydrox ymethyl)tetrahydrofuran-2-yl)pyrimidin-2(1H)-one
  modified_base 7: mod_base = OTHER; note = 2'-fluorouridine-3'-phosphate
  modified_base 8: mod_base = OTHER; note = 2'-O-methylcytidine-3'-phosphate
  modified_base 9: mod_base = OTHER; note = 2'-fluorouridine-3'-phosphate
  modified_base 10: mod_base = OTHER; note = 2'-fluorouridine-3'-phosphate
  modified_base 11: mod_base = OTHER; note = 2'-fluoroguanosine-3'-phosphate
  modified_base 12: mod_base = OTHER; note = 2'-O-methyluridine-3'-phosphate
  modified_base 13: mod_base = OTHER; note = 2'-O-methylguanosine-3'-phosphate
  modified_base 14: mod_base = OTHER; note = 2'-O-methyluridine-3'-phosphate
  modified_base 15: mod_base = OTHER; note = 2'-O-methyladenosine-3'-phosphate
  modified_base 16: mod_base = OTHER; note = 2'-O-methyluridine-3'-phosphate
  modified_base 17: mod_base = OTHER; note = 2'-O-methylguanosine-3'-phosphate
  modified_base 18: mod_base = OTHER; note = 2'-O-methylcytidine-3'-phosphate
  modified_base 19: mod_base = OTHER; note = 2'-O-methyladenosine-3'-phosphorothioate
  modified_base 20: mod_base = OTHER; note = 2'-O-methylguanosine-3'-phosphorothioate
  modified_base 21: mod_base = OTHER; note = 2'-O-methyladenosine-3'-phosphate
gccatctcttgtgtatgcaga

SEQ ID NO: 2733 - RNA, 21 nt, synthetic construct
  source 1..21: mol_type = other RNA
  modified_base 1: mod_base = OTHER; note = 2'-O-methyladenosine-3'-phosphorothioate
  modified_base 2: mod_base = OTHER; note = 2'-O-methylguanosine-3'-phosphorothioate
  modified_base 3: mod_base = OTHER; note = 2'-O-methylcytidine-3'-phosphate
  modified_base 4: mod_base = OTHER; note = 2'-O-methylcytidine-3'-phosphate
  modified_base 5: mod_base = OTHER; note = 2'-O-methyladenosine-3'-phosphate
  modified_base 6: mod_base = OTHER; note 4-amino-1-((2R,3R,4R,5R)-3-(docosyloxy)-4-hydroxy-5-(hydrox ymethyl)tetrahydrofuran-2-yl)pyrimidin-2(1H)-one
  modified_base 7: mod_base = OTHER; note = 2'-fluoroadenosine-3'-phosphate
  modified_base 8: mod_base = OTHER; note = 2'-O-methyluridine-3'-phosphate
  modified_base 9: mod_base = OTHER; note = 2'-fluorouridine-3'-phosphate
  modified_base 10: mod_base = OTHER; note = 2'-fluorouridine-3'-phosphate
  modified_base 11: mod_base = OTHER; note = 2'-fluorocytidine-3'-phosphate
  modified_base 12: mod_base = OTHER; note = 2'-O-methylcytidine-3'-phosphate
  modified_base 13: mod_base = OTHER; note = 2'-O-methyladenosine-3'-phosphate
  modified_base 14: mod_base = OTHER; note = 2'-O-methyluridine-3'-phosphate
  modified_base 15: mod_base = OTHER; note = 2'-O-methyluridine-3'-phosphate
  modified_base 16: mod_base = OTHER; note = 2'-O-methyluridine-3'-phosphate
  modified_base 17: mod_base = OTHER; note = 2'-O-methylguanosine-3'-phosphate
  modified_base 18: mod_base = OTHER; note = 2'-O-methylcytidine-3'-phosphate
  modified_base 19: mod_base = OTHER; note = 2'-O-methyladenosine-3'-phosphorothioate
  modified_base 20: mod_base = OTHER; note = 2'-O-methyluridine-3'-phosphorothioate
  modified_base 21: mod_base = OTHER; note = 2'-O-methyladenosine-3'-phosphate
agccacatttccatttgcata

SEQ ID NO: 2734 - RNA, 21 nt, synthetic construct
  source 1..21: mol_type = other RNA
  modified_base 1: mod_base = OTHER; note = 2'-O-methyluridine-3'-phosphorothioate
  modified_base 2: mod_base = OTHER; note = 2'-O-methylcytidine-3'-phosphorothioate
  modified_base 3: mod_base = OTHER; note = 2'-O-methylcytidine-3'-phosphate
  modified_base 4: mod_base = OTHER; note = 2'-O-methyladenosine-3'-phosphate
  modified_base 5: mod_base = OTHER; note = 2'-O-methylguanosine-3'-phosphate
  modified_base 6: mod_base = OTHER; note (2R,3S,4S,5R)-5-(6-amino-9H-purin-9-yl)-4-(docosyloxy)-2-(h ydroxymethyl)tetrahydrofuran-3-ol
  modified_base 7: mod_base = OTHER; note = 2'-fluorocytidine-3'-phosphate
  modified_base 8: mod_base = OTHER; note = 2'-O-methyladenosine-3'-phosphate
  modified_base 9: mod_base = OTHER; note = 2'-fluoroguanosine-3'-phosphate
  modified_base 10: mod_base = OTHER; note = 2'-fluoroadenosine-3'-phosphate
  modified_base 11: mod_base = OTHER; note = 2'-fluoroadenosine-3'-phosphate
  modified_base 12: mod_base = OTHER; note = 2'-O-methylguanosine-3'-phosphate
  modified_base 13: mod_base = OTHER; note = 2'-O-methylguanosine-3'-phosphate
  modified_base 14: mod_base = OTHER; note = 2'-O-methyluridine-3'-phosphate
  modified_base 15: mod_base = OTHER; note = 2'-O-methyluridine-3'-phosphate
  modified_base 16: mod_base = OTHER; note = 2'-O-methyluridine-3'-phosphate
  modified_base 17: mod_base = OTHER; note = 2'-O-methyluridine-3'-phosphate
  modified_base 18: mod_base = OTHER; note = 2'-O-methylguanosine-3'-phosphate
  modified_base 19: mod_base = OTHER; note = 2'-O-methyladenosine-3'-phosphorothioate
  modified_base 20: mod_base = OTHER; note = 2'-O-methylcytidine-3'-phosphorothioate
  modified_base 21: mod_base = OTHER; note = 2'-O-methyladenosine-3'-phosphate
tccagacagaaggttttgaca

SEQ ID NO: 2735 - RNA, 21 nt, synthetic construct
  source 1..21: mol_type = other RNA
  modified_base 1: mod_base = OTHER; note = 2'-O-methylcytidine-3'-phosphorothioate
  modified_base 2: mod_base = OTHER; note = 2'-O-methyluridine-3'-phosphorothioate
  modified_base 3: mod_base = OTHER; note = 2'-O-methylcytidine-3'-phosphate
  modified_base 4: mod_base = OTHER; note = 2'-O-methyluridine-3'-phosphate
  modified_base 5: mod_base = OTHER; note = 2'-O-methylcytidine-3'-phosphate
  modified_base 6: mod_base = OTHER; note 2-amino-9-((2R,3S,4S,5R)-3-(docosyloxy)-4-hydroxy-5-(hydrox ymethyl)tetrahydrofuran-2-yl)-1,9-dihydro-6H-purin-6-one
  modified_base 7: mod_base = OTHER; note = 2'-fluoroadenosine-3'-phosphate
  modified_base 8: mod_base = OTHER; note = 2'-O-methyluridine-3'-phosphate
  modified_base 9: mod_base = OTHER; note = 2'-fluoroadenosine-3'-phosphate
  modified_base 10: mod_base = OTHER; note = 2'-fluorocytidine-3'-phosphate
  modified_base 11: mod_base = OTHER; note = 2'-fluoroadenosine-3'-phosphate
  modified_base 12: mod_base = OTHER; note = 2'-O-methylcytidine-3'-phosphate
  modified_base 13: mod_base = OTHER; note = 2'-O-methylcytidine-3'-phosphate
  modified_base 14: mod_base = OTHER; note = 2'-O-methylguanosine-3'-phosphate
  modified_base 15: mod_base = OTHER; note = 2'-O-methyluridine-3'-phosphate
  modified_base 16: mod_base = OTHER; note = 2'-O-methylguanosine-3'-phosphate
  modified_base 17: mod_base = OTHER; note = 2'-O-methylcytidine-3'-phosphate
  modified_base 18: mod_base = OTHER; note = 2'-O-methyladenosine-3'-phosphate
  modified_base 19: mod_base = OTHER; note = 2'-O-methylguanosine-3'-phosphorothioate
  modified_base 20: mod_base = OTHER; note = 2'-O-methyladenosine-3'-phosphorothioate
  modified_base 21: mod_base = OTHER; note = 2'-O-methyladenosine-3'-phosphate
ctctcgatacaccgtgcagaa

SEQ ID NO: 2736 - RNA, 21 nt, synthetic construct
  source 1..21: mol_type = other RNA
  modified_base 1: mod_base = OTHER; note = 2'-O-methylguanosine-3'-phosphorothioate
  modified_base 2: mod_base = OTHER; note = 2'-O-methylguanosine-3'-phosphorothioate
  modified_base 3: mod_base = OTHER; note = 2'-O-methylcytidine-3'-phosphate
  modified_base 4: mod_base = OTHER; note = 2'-O-methylguanosine-3'-phosphate
  modified_base 5: mod_base = OTHER; note = 2'-O-methylcytidine-3'-phosphate
  modified_base 6: mod_base = OTHER; note (2R,3S,4S,5R)-5-(6-amino-9H-purin-9-yl)-4-(docosyloxy)-2-(h ydroxymethyl)tetrahydrofuran-3-ol
  modified_base 7: mod_base = OTHER; note = 2'-fluorocytidine-3'-phosphate
  modified_base 8: mod_base = OTHER; note = 2'-O-methyluridine-3'-phosphate
  modified_base 9: mod_base = OTHER; note = 2'-fluorouridine-3'-phosphate
  modified_base 10: mod_base = OTHER; note = 2'-fluorouridine-3'-phosphate
  modified_base 11: mod_base = OTHER; note = 2'-fluorouridine-3'-phosphate
  modified_base 12: mod_base = OTHER; note = 2'-O-methyluridine-3'-phosphate
  modified_base 13: mod_base = OTHER; note = 2'-O-methyladenosine-3'-phosphate
  modified_base 14: mod_base = OTHER; note = 2'-O-methyluridine-3'-phosphate
  modified_base 15: mod_base = OTHER; note = 2'-O-methyluridine-3'-phosphate
  modified_base 16: mod_base = OTHER; note = 2'-O-methyluridine-3'-phosphate
  modified_base 17: mod_base = OTHER; note = 2'-O-methyluridine-3'-phosphate
  modified_base 18: mod_base = OTHER; note = 2'-O-methyluridine-3'-phosphate
  modified_base 19: mod_base = OTHER; note = 2'-O-methyladenosine-3'-phosphorothioate
  modified_base 20: mod_base = OTHER; note = 2'-O-methyluridine-3'-phosphorothioate
  modified_base 21: mod_base = OTHER; note = 2'-O-methyladenosine-3'-phosphate
ggcgcactttttatttttata

SEQ ID NO: 2737 - RNA, 21 nt, synthetic construct
  source 1..21: mol_type = other RNA
  modified_base 1: mod_base = OTHER; note = 2'-O-methylguanosine-3'-phosphorothioate
  modified_base 2: mod_base = OTHER; note = 2'-O-methyladenosine-3'-phosphorothioate
  modified_base 3: mod_base = OTHER; note = 2'-O-methylguanosine-3'-phosphate
  modified_base 4: mod_base = OTHER; note = 2'-O-methylcytidine-3'-phosphate
  modified_base 5: mod_base = OTHER; note = 2'-O-methylguanosine-3'-phosphate
  modified_base 6: mod_base = OTHER; note 1-((2R,3R,4R,5R)-3-(docosyloxy)-4-hydroxy-5-(hydroxymethyl) tetrahydrofuran-2-yl)pyrimidine-2,4(1H,3H)-dione
  modified_base 7: mod_base = OTHER; note = 2'-fluorouridine-3'-phosphate
  modified_base 8: mod_base = OTHER; note = 2'-O-methylguanosine-3'-phosphate
  modified_base 9: mod_base = OTHER; note = 2'-fluorocytidine-3'-phosphate
  modified_base 10: mod_base = OTHER; note = 2'-fluorocytidine-3'-phosphate
  modified_base 11: mod_base = OTHER; note = 2'-fluoroadenosine-3'-phosphate
  modified_base 12: mod_base = OTHER; note = 2'-O-methylcytidine-3'-phosphate
  modified_base 13: mod_base = OTHER; note = 2'-O-methyluridine-3'-phosphate
  modified_base 14: mod_base = OTHER; note = 2'-O-methyluridine-3'-phosphate
  modified_base 15: mod_base = OTHER; note = 2'-O-methyluridine-3'-phosphate
  modified_base 16: mod_base = OTHER; note = 2'-O-methylcytidine-3'-phosphate
  modified_base 17: mod_base = OTHER; note = 2'-O-methyladenosine-3'-phosphate
  modified_base 18: mod_base = OTHER; note = 2'-O-methyladenosine-3'-phosphate
  modified_base 19: mod_base = OTHER; note = 2'-O-methyladenosine-3'-phosphorothioate
  modified_base 20: mod_base = OTHER; note = 2'-O-methylguanosine-3'-phosphorothioate
  modified_base 21: mod_base = OTHER; note = 2'-O-methyladenosine-3'-phosphate
gagcgttgccactttcaaaga

SEQ ID NO: 2738 - RNA, 21 nt, synthetic construct
  source 1..21: mol_type = other RNA
  modified_base 1: mod_base = OTHER; note = 2'-O-methyluridine-3'-phosphorothioate
  modified_base 2: mod_base = OTHER; note = 2'-O-methyluridine-3'-phosphorothioate
  modified_base 3: mod_base = OTHER; note = 2'-O-methylguanosine-3'-phosphate
  modified_base 4: mod_base = OTHER; note = 2'-O-methylcytidine-3'-phosphate
  modified_base 5: mod_base = OTHER; note = 2'-O-methyladenosine-3'-phosphate
  modified_base 6: mod_base = OTHER; note 1-((2R,3R,4R,5R)-3-(docosyloxy)-4-hydroxy-5-(hydroxymethyl) tetrahydrofuran-2-yl)pyrimidine-2,4(1H,3H)-dione
  modified_base 7: mod_base = OTHER; note = 2'-fluorocytidine-3'-phosphate
  modified_base 8: mod_base = OTHER; note = 2'-O-methyladenosine-3'-phosphate
  modified_base 9: mod_base = OTHER; note = 2'-fluorouridine-3'-phosphate
  modified_base 10: mod_base = OTHER; note = 2'-fluorouridine-3'-phosphate
  modified_base 11: mod_base = OTHER; note = 2'-fluoroadenosine-3'-phosphate
  modified_base 12: mod_base = OTHER; note = 2'-O-methylcytidine-3'-phosphate
  modified_base 13: mod_base = OTHER; note = 2'-O-methyluridine-3'-phosphate
  modified_base 14: mod_base = OTHER; note = 2'-O-methylguanosine-3'-phosphate
  modified_base 15: mod_base = OTHER; note = 2'-O-methylcytidine-3'-phosphate
  modified_base 16: mod_base = OTHER; note = 2'-O-methylcytidine-3'-phosphate
  modified_base 17: mod_base = OTHER; note = 2'-O-methyluridine-3'-phosphate
  modified_base 18: mod_base = OTHER; note = 2'-O-methyluridine-3'-phosphate
  modified_base 19: mod_base = OTHER; note = 2'-O-methylcytidine-3'-phosphorothioate
  modified_base 20: mod_base = OTHER; note = 2'-O-methyladenosine-3'-phosphorothioate
  modified_base 21: mod_base = OTHER; note = 2'-O-methyladenosine-3'-phosphate
ttgcatcattactgccttcaa

SEQ ID NO: 2739 - RNA, 21 nt, synthetic construct
  source 1..21: mol_type = other RNA
  modified_base 1: mod_base = OTHER; note = 2'-O-methylguanosine-3'-phosphorothioate
  modified_base 2: mod_base = OTHER; note = 2'-O-methylcytidine-3'-phosphorothioate
  modified_base 3: mod_base = OTHER; note = 2'-O-methylguanosine-3'-phosphate
  modified_base 4: mod_base = OTHER; note = 2'-O-methylcytidine-3'-phosphate
  modified_base 5: mod_base = OTHER; note = 2'-O-methyladenosine-3'-phosphate
  modified_base 6: mod_base = OTHER; note (2R,3S,4S,5R)-5-(6-amino-9H-purin-9-yl)-4-(docosyloxy)-2-(h ydroxymethyl)tetrahydrofuran-3-ol
  modified_base 7: mod_base = OTHER; note = 2'-fluoroguanosine-3'-phosphate
  modified_base 8: mod_base = OTHER; note = 2'-O-methyladenosine-3'-phosphate
  modified_base 9: mod_base = OTHER; note = 2'-fluoroadenosine-3'-phosphate
  modified_base 10: mod_base = OTHER; note = 2'-fluoroguanosine-3'-phosphate
  modified_base 11: mod_base = OTHER; note = 2'-fluoroadenosine-3'-phosphate
  modified_base 12: mod_base = OTHER; note = 2'-O-methylguanosine-3'-phosphate
  modified_base 13: mod_base = OTHER; note = 2'-O-methylcytidine-3'-phosphate
  modified_base 14: mod_base = OTHER; note = 2'-O-methyluridine-3'-phosphate
  modified_base 15: mod_base = OTHER; note = 2'-O-methylguanosine-3'-phosphate
  modified_base 16: mod_base = OTHER; note = 2'-O-methyladenosine-3'-phosphate
  modified_base 17: mod_base = OTHER; note = 2'-O-methylguanosine-3'-phosphate
  modified_base 18: mod_base = OTHER; note = 2'-O-methyluridine-3'-phosphate
  modified_base 19: mod_base = OTHER; note = 2'-O-methylcytidine-3'-phosphorothioate
  modified_base 20: mod_base = OTHER; note = 2'-O-methylguanosine-3'-phosphorothioate
  modified_base 21: mod_base = OTHER; note = 2'-O-methyladenosine-3'-phosphate
gcgcaagaagagctgagtcga

SEQ ID NO: 2740 - RNA, 21 nt, synthetic construct
  source 1..21: mol_type = other RNA
  modified_base 1: mod_base = OTHER; note = 2'-O-methyluridine-3'-phosphorothioate
  modified_base 2: mod_base = OTHER; note = 2'-O-methylguanosine-3'-phosphorothioate
  modified_base 3: mod_base = OTHER; note = 2'-O-methylcytidine-3'-phosphate
  modified_base 4: mod_base = OTHER; note = 2'-O-methylguanosine-3'-phosphate
  modified_base 5: mod_base = OTHER; note = 2'-O-methylguanosine-3'-phosphate
  modified_base 6: mod_base = OTHER; note (2R,3S,4S,5R)-5-(6-amino-9H-purin-9-yl)-4-(docosyloxy)-2-(h ydroxymethyl)tetrahydrofuran-3-ol
  modified_base 7: mod_base = OTHER; note = 2'-fluoroadenosine-3'-phosphate
  modified_base 8: mod_base = OTHER; note = 2'-O-methyluridine-3'-phosphate
  modified_base 9: mod_base = OTHER; note = 2'-fluorouridine-3'-phosphate
  modified_base 10: mod_base = OTHER; note = 2'-fluorouridine-3'-phosphate
  modified_base 11: mod_base = OTHER; note = 2'-fluoroguanosine-3'-phosphate
  modified_base 12: mod_base = OTHER; note = 2'-O-methylcytidine-3'-phosphate
  modified_base 13: mod_base = OTHER; note = 2'-O-methyluridine-3'-phosphate
  modified_base 14: mod_base = OTHER; note = 2'-O-methylguanosine-3'-phosphate
  modified_base 15: mod_base = OTHER; note = 2'-O-methylcytidine-3'-phosphate
  modified_base 16: mod_base = OTHER; note = 2'-O-methylcytidine-3'-phosphate
  modified_base 17: mod_base = OTHER; note = 2'-O-methyladenosine-3'-phosphate
  modified_base 18: mod_base = OTHER; note = 2'-O-methyladenosine-3'-phosphate
  modified_base 19: mod_base = OTHER; note = 2'-O-methylcytidine-3'-phosphorothioate
  modified_base 20: mod_base = OTHER; note = 2'-O-methyladenosine-3'-phosphorothioate
  modified_base 21: mod_base = OTHER; note = 2'-O-methyladenosine-3'-phosphate
tgcggaatttgctgccaacaa

SEQ ID NO: 2741 - RNA, 21 nt, synthetic construct
  source 1..21: mol_type = other RNA
  modified_base 1: mod_base = OTHER; note = 2'-O-methylguanosine-3'-phosphorothioate
  modified_base 2: mod_base = OTHER; note = 2'-O-methyluridine-3'-phosphorothioate
  modified_base 3: mod_base = OTHER; note = 2'-O-methylguanosine-3'-phosphate
  modified_base 4: mod_base = OTHER; note = 2'-O-methyluridine-3'-phosphate
  modified_base 5: mod_base = OTHER; note = 2'-O-methylguanosine-3'-phosphate
  modified_base 6: mod_base = OTHER; note 4-amino-1-((2R,3R,4R,5R)-3-(docosyloxy)-4-hydroxy-5-(hydrox ymethyl)tetrahydrofuran-2-yl)pyrimidin-2(1H)-one
  modified_base 7: mod_base = OTHER; note = 2'-fluoroadenosine-3'-phosphate
  modified_base 8: mod_base = OTHER; note = 2'-O-methyladenosine-3'-phosphate
  modified_base 9: mod_base = OTHER; note = 2'-fluorouridine-3'-phosphate
  modified_base 10: mod_base = OTHER; note = 2'-fluoroguanosine-3'-phosphate
  modified_base 11: mod_base = OTHER; note = 2'-fluorocytidine-3'-phosphate
  modified_base 12: mod_base = OTHER; note = 2'-O-methylcytidine-3'-phosphate
  modified_base 13: mod_base = OTHER; note = 2'-O-methyluridine-3'-phosphate
  modified_base 14: mod_base = OTHER; note = 2'-O-methyladenosine-3'-phosphate
  modified_base 15: mod_base = OTHER; note = 2'-O-methyluridine-3'-phosphate
  modified_base 16: mod_base = OTHER; note = 2'-O-methylguanosine-3'-phosphate
  modified_base 17: mod_base = OTHER; note = 2'-O-methyladenosine-3'-phosphate
  modified_base 18: mod_base = OTHER; note = 2'-O-methylguanosine-3'-phosphate
  modified_base 19: mod_base = OTHER; note = 2'-O-methyladenosine-3'-phosphorothioate
  modified_base 20: mod_base = OTHER; note = 2'-O-methyladenosine-3'-phosphorothioate
  modified_base 21: mod_base = OTHER; note = 2'-O-methyladenosine-3'-phosphate
gtgtgcaatgcctatgagaaa

SEQ ID NO: 2742 - RNA, 21 nt, synthetic construct
  source 1..21: mol_type = other RNA
  modified_base 1: mod_base = OTHER; note = 2'-O-methylguanosine-3'-phosphorothioate
  modified_base 2: mod_base = OTHER; note = 2'-O-methyladenosine-3'-phosphorothioate
  modified_base 3: mod_base = OTHER; note = 2'-O-methyladenosine-3'-phosphate
  modified_base 4: mod_base = OTHER; note = 2'-O-methyluridine-3'-phosphate
  modified_base 5: mod_base = OTHER; note = 2'-O-methyluridine-3'-phosphate
  modified_base 6: mod_base = OTHER; note 4-amino-1-((2R,3R,4R,5R)-3-(docosyloxy)-4-hydroxy-5-(hydrox ymethyl)tetrahydrofuran-2-yl)pyrimidin-2(1H)-one
  modified_base 7: mod_base = OTHER; note = 2'-fluoroadenosine-3'-phosphate
  modified_base 8: mod_base = OTHER; note = 2'-O-methyladenosine-3'-phosphate
  modified_base 9: mod_base = OTHER; note = 2'-fluoroadenosine-3'-phosphate
  modified_base 10: mod_base = OTHER; note = 2'-fluorouridine-3'-phosphate
  modified_base 11: mod_base = OTHER; note = 2'-fluoroadenosine-3'-phosphate
  modified_base 12: mod_base = OTHER; note = 2'-O-methyluridine-3'-phosphate
  modified_base 13: mod_base = OTHER; note = 2'-O-methyluridine-3'-phosphate
  modified_base 14: mod_base = OTHER; note = 2'-O-methylguanosine-3'-phosphate
  modified_base 15: mod_base = OTHER; note = 2'-O-methylcytidine-3'-phosphate
  modified_base 16: mod_base = OTHER; note = 2'-O-methyladenosine-3'-phosphate
  modified_base 17: mod_base = OTHER; note = 2'-O-methyladenosine-3'-phosphate
  modified_base 18: mod_base = OTHER; note = 2'-O-methyladenosine-3'-phosphate
  modified_base 19: mod_base = OTHER; note = 2'-O-methyladenosine-3'-phosphorothioate
  modified_base 20: mod_base = OTHER; note = 2'-O-methylguanosine-3'-phosphorothioate
  modified_base 21: mod_base = OTHER; note = 2'-O-methyladenosine-3'-phosphate
gaattcaaatattgcaaaaga

SEQ ID NO: 2743 - RNA, 21 nt, synthetic construct
  source 1..21: mol_type = other RNA
  modified_base 1: mod_base = OTHER; note = 2'-O-methylcytidine-3'-phosphorothioate
  modified_base 2: mod_base = OTHER; note = 2'-O-methylcytidine-3'-phosphorothioate
  modified_base 3: mod_base = OTHER; note = 2'-O-methyluridine-3'-phosphate
  modified_base 4: mod_base = OTHER; note = 2'-O-methylguanosine-3'-phosphate
  modified_base 5: mod_base = OTHER; note = 2'-O-methyluridine-3'-phosphate
  modified_base 6: mod_base = OTHER; note 2-amino-9-((2R,3S,4S,5R)-3-(docosyloxy)-4-hydroxy-5-(hydrox ymethyl)tetrahydrofuran-2-yl)-1,9-dihydro-6H-purin-6-one
  modified_base 7: mod_base = OTHER; note = 2'-fluorouridine-3'-phosphate
  modified_base 8: mod_base = OTHER; note = 2'-O-methylguanosine-3'-phosphate
  modified_base 9: mod_base = OTHER; note = 2'-fluorocytidine-3'-phosphate
  modified_base 10: mod_base = OTHER; note = 2'-fluorouridine-3'-phosphate
  modified_base 11: mod_base = OTHER; note = 2'-fluorouridine-3'-phosphate
  modified_base 12: mod_base = OTHER; note = 2'-O-methyluridine-3'-phosphate
  modified_base 13: mod_base = OTHER; note = 2'-O-methylguanosine-3'-phosphate
  modified_base 14: mod_base = OTHER; note = 2'-O-methyluridine-3'-phosphate
  modified_base 15: mod_base = OTHER; note = 2'-O-methyladenosine-3'-phosphate
  modified_base 16: mod_base = OTHER; note = 2'-O-methylguanosine-3'-phosphate
  modified_base 17: mod_base = OTHER; note = 2'-O-methyladenosine-3'-phosphate
  modified_base 18: mod_base = OTHER; note = 2'-O-methylguanosine-3'-phosphate
  modified_base 19: mod_base = OTHER; note = 2'-O-methylcytidine-3'-phosphorothioate
  modified_base 20: mod_base = OTHER; note = 2'-O-methylcytidine-3'-phosphorothioate
  modified_base 21: mod_base = OTHER; note = 2'-O-methyladenosine-3'-phosphate
cctgtgtgctttgtagagcca

SEQ ID NO: 2744 - RNA, 21 nt, synthetic construct
  source 1..21: mol_type = other RNA
  modified_base 1: mod_base = OTHER; note = 2'-O-methyluridine-3'-phosphorothioate
  modified_base 2: mod_base = OTHER; note = 2'-O-methylcytidine-3'-phosphorothioate
  modified_base 3: mod_base = OTHER; note = 2'-O-methylcytidine-3'-phosphate
  modified_base 4: mod_base = OTHER; note = 2'-O-methyladenosine-3'-phosphate
  modified_base 5: mod_base = OTHER; note = 2'-O-methylguanosine-3'-phosphate
  modified_base 6: mod_base = OTHER; note (2R,3S,4S,5R)-5-(6-amino-9H-purin-9-yl)-4-(docosyloxy)-2-(h ydroxymethyl)tetrahydrofuran-3-ol
  modified_base 7: mod_base = OTHER; note = 2'-fluorocytidine-3'-phosphate
  modified_base 8: mod_base = OTHER; note = 2'-O-methyladenosine-3'-phosphate
  modified_base 9: mod_base = OTHER; note = 2'-fluoroadenosine-3'-phosphate
  modified_base 10: mod_base = OTHER; note = 2'-fluoroguanosine-3'-phosphate
  modified_base 11: mod_base = OTHER; note = 2'-fluoroguanosine-3'-phosphate
  modified_base 12: mod_base = OTHER; note = 2'-O-methyladenosine-3'-phosphate
  modified_base 13: mod_base = OTHER; note = 2'-O-methyladenosine-3'-phosphate
  modified_base 14: mod_base = OTHER; note = 2'-O-methylguanosine-3'-phosphate
  modified_base 15: mod_base = OTHER; note = 2'-O-methyladenosine-3'-phosphate
  modified_base 16: mod_base = OTHER; note = 2'-O-methylguanosine-3'-phosphate
  modified_base 17: mod_base = OTHER; note = 2'-O-methyluridine-3'-phosphate
  modified_base 18: mod_base = OTHER; note = 2'-O-methylcytidine-3'-phosphate
  modified_base 19: mod_base = OTHER; note = 2'-O-methyladenosine-3'-phosphorothioate
  modified_base 20: mod_base = OTHER; note = 2'-O-methylguanosine-3'-phosphorothioate
  modified_base 21: mod_base = OTHER; note = 2'-O-methyladenosine-3'-phosphate
tccagacaaggaagagtcaga

SEQ ID NO: 2745 - RNA, 21 nt, synthetic construct
  source 1..21: mol_type = other RNA
  modified_base 1: mod_base = OTHER; note = 2'-O-methyluridine-3'-phosphorothioate
  modified_base 2: mod_base = OTHER; note = 2'-O-methylguanosine-3'-phosphorothioate
  modified_base 3: mod_base = OTHER; note = 2'-O-methylcytidine-3'-phosphate
  modified_base 4: mod_base = OTHER; note = 2'-O-methylcytidine-3'-phosphate
  modified_base 5: mod_base = OTHER; note = 2'-O-methyladenosine-3'-phosphate
  modified_base 6: mod_base = OTHER; note 2-amino-9-((2R,3S,4S,5R)-3-(docosyloxy)-4-hydroxy-5-(hydrox ymethyl)tetrahydrofuran-2-yl)-1,9-dihydro-6H-purin-6-one
  modified_base 7: mod_base = OTHER; note = 2'-fluoroadenosine-3'-phosphate
  modified_base 8: mod_base = OTHER; note = 2'-O-methyladenosine-3'-phosphate
  modified_base 9: mod_base = OTHER; note = 2'-fluoroadenosine-3'-phosphate
  modified_base 10: mod_base = OTHER; note = 2'-fluorocytidine-3'-phosphate
  modified_base 11: mod_base = OTHER; note = 2'-fluoroadenosine-3'-phosphate
  modified_base 12: mod_base = OTHER; note = 2'-O-methylguanosine-3'-phosphate
  modified_base 13: mod_base = OTHER; note = 2'-O-methylcytidine-3'-phosphate
  modified_base 14: mod_base = OTHER; note = 2'-O-methyladenosine-3'-phosphate
  modified_base 15: mod_base = OTHER; note = 2'-O-methyluridine-3'-phosphate
  modified_base 16: mod_base = OTHER; note = 2'-O-methylcytidine-3'-phosphate
  modified_base 17: mod_base = OTHER; note = 2'-O-methyladenosine-3'-phosphate
  modified_base 18: mod_base = OTHER; note = 2'-O-methylguanosine-3'-phosphate
  modified_base 19: mod_base = OTHER; note = 2'-O-methylcytidine-3'-phosphorothioate
  modified_base 20: mod_base = OTHER; note = 2'-O-methylguanosine-3'-phosphorothioate
  modified_base 21: mod_base = OTHER; note = 2'-O-methyladenosine-3'-phosphate
tgccagaaacagcatcagcga

SEQ ID NO: 2746 - RNA, 21 nt, synthetic construct
  source 1..21: mol_type = other RNA
  modified_base 1: mod_base = OTHER; note = 2'-O-methylguanosine-3'-phosphorothioate
  modified_base 2: mod_base = OTHER; note = 2'-O-methylcytidine-3'-phosphorothioate
  modified_base 3: mod_base = OTHER; note = 2'-O-methyladenosine-3'-phosphate
  modified_base 4: mod_base = OTHER; note = 2'-O-methyluridine-3'-phosphate
  modified_base 5: mod_base = OTHER; note = 2'-O-methyladenosine-3'-phosphate
  modified_base 6: mod_base = OTHER; note (2R,3S,4S,5R)-5-(6-amino-9H-purin-9-yl)-4-(docosyloxy)-2-(h ydroxymethyl)tetrahydrofuran-3-ol
  modified_base 7: mod_base = OTHER; note = 2'-fluorouridine-3'-phosphate
  modified_base 8: mod_base = OTHER; note = 2'-O-methyladenosine-3'-phosphate
  modified_base 9: mod_base = OTHER; note = 2'-fluorouridine-3'-phosphate
  modified_base 10: mod_base = OTHER; note = 2'-fluoroguanosine-3'-phosphate
  modified_base 11: mod_base = OTHER; note = 2'-fluoroguanosine-3'-phosphate
  modified_base 12: mod_base = OTHER; note = 2'-O-methyladenosine-3'-phosphate
  modified_base 13: mod_base = OTHER; note = 2'-O-methyluridine-3'-phosphate
  modified_base 14: mod_base = OTHER; note = 2'-O-methyladenosine-3'-phosphate
  modified_base 15: mod_base = OTHER; note = 2'-O-methylcytidine-3'-phosphate
  modified_base 16: mod_base = OTHER; note = 2'-O-methylguanosine-3'-phosphate
  modified_base 17: mod_base = OTHER; note = 2'-O-methylcytidine-3'-phosphate
  modified_base 18: mod_base = OTHER; note = 2'-O-methylcytidine-3'-phosphate
  modified_base 19: mod_base = OTHER; note = 2'-O-methyluridine-3'-phosphorothioate
  modified_base 20: mod_base = OTHER; note = 2'-O-methyluridine-3'-phosphorothioate
  modified_base 21: mod_base = OTHER; note = 2'-O-methyladenosine-3'-phosphate
gcataatatggatacgcctta

SEQ ID NO: 2747 - RNA, 21 nt, synthetic construct
  source 1..21: mol_type = other RNA
  modified_base 1: mod_base = OTHER; note = 2'-O-methyladenosine-3'-phosphorothioate
  modified_base 2: mod_base = OTHER; note = 2'-O-methylguanosine-3'-phosphorothioate
  modified_base 3: mod_base = OTHER; note = 2'-O-methylcytidine-3'-phosphate
  modified_base 4: mod_base = OTHER; note = 2'-O-methylcytidine-3'-phosphate
  modified_base 5: mod_base = OTHER; note = 2'-O-methyluridine-3'-phosphate
  modified_base 6: mod_base = OTHER; note 4-amino-1-((2R,3R,4R,5R)-3-(docosyloxy)-4-hydroxy-5-(hydrox ymethyl)tetrahydrofuran-2-yl)pyrimidin-2(1H)-one
  modified_base 7: mod_base = OTHER; note = 2'-fluoroadenosine-3'-phosphate
  modified_base 8: mod_base = OTHER; note = 2'-O-methyluridine-3'-phosphate
  modified_base 9: mod_base = OTHER; note = 2'-fluorocytidine-3'-phosphate
  modified_base 10: mod_base = OTHER; note = 2'-fluorocytidine-3'-phosphate
  modified_base 11: mod_base = OTHER; note = 2'-fluorouridine-3'-phosphate
  modified_base 12: mod_base = OTHER; note = 2'-O-methylguanosine-3'-phosphate
  modified_base 13: mod_base = OTHER; note = 2'-O-methyladenosine-3'-phosphate
  modified_base 14: mod_base = OTHER; note = 2'-O-methyluridine-3'-phosphate
  modified_base 15: mod_base = OTHER; note = 2'-O-methylguanosine-3'-phosphate
  modified_base 16: mod_base = OTHER; note = 2'-O-methyladenosine-3'-phosphate
  modified_base 17: mod_base = OTHER; note = 2'-O-methyluridine-3'-phosphate
  modified_base 18: mod_base = OTHER; note = 2'-O-methylguanosine-3'-phosphate
  modified_base 19: mod_base = OTHER; note = 2'-O-methylcytidine-3'-phosphorothioate
  modified_base 20: mod_base = OTHER; note = 2'-O-methyluridine-3'-phosphorothioate
  modified_base 21: mod_base = OTHER; note = 2'-O-methyladenosine-3'-phosphate
agcctcatcctgatgatgcta

SEQ ID NO: 2748 - RNA, 21 nt, synthetic construct
  source 1..21: mol_type = other RNA
  modified_base 1: mod_base = OTHER; note = 2'-O-methyladenosine-3'-phosphorothioate
  modified_base 2: mod_base = OTHER; note = 2'-O-methyladenosine-3'-phosphorothioate
  modified_base 3: mod_base = OTHER; note = 2'-O-methylguanosine-3'-phosphate
  modified_base 4: mod_base = OTHER; note = 2'-O-methylcytidine-3'-phosphate
  modified_base 5: mod_base = OTHER; note = 2'-O-methylcytidine-3'-phosphate
  modified_base 6: mod_base = OTHER; note 1-((2R,3R,4R,5R)-3-(docosyloxy)-4-hydroxy-5-(hydroxymethyl) tetrahydrofuran-2-yl)pyrimidine-2,4(1H,3H)-dione
  modified_base 7: mod_base = OTHER; note = 2'-fluorocytidine-3'-phosphate
  modified_base 8: mod_base = OTHER; note = 2'-O-methyluridine-3'-phosphate
  modified_base 9: mod_base = OTHER; note = 2'-fluorouridine-3'-phosphate
  modified_base 10: mod_base = OTHER; note = 2'-fluoroguanosine-3'-phosphate
  modified_base 11: mod_base = OTHER; note = 2'-fluoroadenosine-3'-phosphate
  modified_base 12: mod_base = OTHER; note = 2'-O-methylguanosine-3'-phosphate
  modified_base 13: mod_base = OTHER; note = 2'-O-methylcytidine-3'-phosphate
  modified_base 14: mod_base = OTHER; note = 2'-O-methyladenosine-3'-phosphate
  modified_base 15: mod_base = OTHER; note = 2'-O-methylguanosine-3'-phosphate
  modified_base 16: mod_base = OTHER; note = 2'-O-methylguanosine-3'-phosphate
  modified_base 17: mod_base = OTHER; note = 2'-O-methylguanosine-3'-phosphate
  modified_base 18: mod_base = OTHER; note = 2'-O-methyluridine-3'-phosphate
  modified_base 19: mod_base = OTHER; note = 2'-O-methyluridine-3'-phosphorothioate
  modified_base 20: mod_base = OTHER; note = 2'-O-methylguanosine-3'-phosphorothioate
  modified_base 21: mod_base = OTHER; note = 2'-O-methyladenosine-3'-phosphate
aagcctcttgagcagggttga

SEQ ID NO: 2749 - RNA, 21 nt, synthetic construct
  source 1..21: mol_type = other RNA
  modified_base 1: mod_base = OTHER; note = 2'-O-methyluridine-3'-phosphorothioate
  modified_base 2: mod_base = OTHER; note = 2'-O-methyladenosine-3'-phosphorothioate
  modified_base 3: mod_base = OTHER; note = 2'-O-methyladenosine-3'-phosphate
  modified_base 4: mod_base = OTHER; note = 2'-O-methyladenosine-3'-phosphate
  modified_base 5: mod_base = OTHER; note = 2'-O-methylguanosine-3'-phosphate
  modified_base 6: mod_base = OTHER; note 2-amino-9-((2R,3S,4S,5R)-3-(docosyloxy)-4-hydroxy-5-(hydrox ymethyl)tetrahydrofuran-2-yl)-1,9-dihydro-6H-purin-6-one
  modified_base 7: mod_base = OTHER; note = 2'-fluoroguanosine-3'-phosphate
  modified_base 8: mod_base = OTHER; note = 2'-O-methyladenosine-3'-phosphate
  modified_base 9: mod_base = OTHER; note = 2'-fluoroadenosine-3'-phosphate
  modified_base 10: mod_base = OTHER; note = 2'-fluoroguanosine-3'-phosphate
  modified_base 11: mod_base = OTHER; note = 2'-fluoroadenosine-3'-phosphate
  modified_base 12: mod_base = OTHER; note = 2'-O-methyladenosine-3'-phosphate
  modified_base 13: mod_base = OTHER; note = 2'-O-methylguanosine-3'-phosphate
  modified_base 14: mod_base = OTHER; note = 2'-O-methyluridine-3'-phosphate
  modified_base 15: mod_base = OTHER; note = 2'-O-methyluridine-3'-phosphate
  modified_base 16: mod_base = OTHER; note = 2'-O-methylguanosine-3'-phosphate
  modified_base 17: mod_base = OTHER; note = 2'-O-methyladenosine-3'-phosphate
  modified_base 18: mod_base = OTHER; note = 2'-O-methyladenosine-3'-phosphate
  modified_base 19: mod_base = OTHER; note = 2'-O-methylguanosine-3'-phosphorothioate
  modified_base 20: mod_base = OTHER; note = 2'-O-methylcytidine-3'-phosphorothioate
  modified_base 21: mod_base = OTHER; note = 2'-O-methyladenosine-3'-phosphate
taaagggaagaagttgaagca

SEQ ID NO: 2750 - RNA, 21 nt, synthetic construct
  source 1..21: mol_type = other RNA
  modified_base 1: mod_base = OTHER; note = 2'-O-methylguanosine-3'-phosphorothioate
  modified_base 2: mod_base = OTHER; note = 2'-O-methylguanosine-3'-phosphorothioate
  modified_base 3: mod_base = OTHER; note = 2'-O-methylcytidine-3'-phosphate
  modified_base 4: mod_base = OTHER; note = 2'-O-methyladenosine-3'-phosphate
  modified_base 5: mod_base = OTHER; note = 2'-O-methylguanosine-3'-phosphate
  modified_base 6: mod_base = OTHER; note 4-amino-1-((2R,3R,4R,5R)-3-(docosyloxy)-4-hydroxy-5-(hydrox ymethyl)tetrahydrofuran-2-yl)pyrimidin-2(1H)-one
  modified_base 7: mod_base = OTHER; note = 2'-fluoroadenosine-3'-phosphate
  modified_base 8: mod_base = OTHER; note = 2'-O-methyluridine-3'-phosphate
  modified_base 9: mod_base = OTHER; note = 2'-fluorouridine-3'-phosphate
  modified_base 10: mod_base = OTHER; note = 2'-fluoroguanosine-3'-phosphate
  modified_base 11: mod_base = OTHER; note = 2'-fluoroadenosine-3'-phosphate
  modified_base 12: mod_base = OTHER; note = 2'-O-methylguanosine-3'-phosphate
  modified_base 13: mod_base = OTHER; note = 2'-O-methyladenosine-3'-phosphate
  modified_base 14: mod_base = OTHER; note = 2'-O-methyladenosine-3'-phosphate
  modified_base 15: mod_base = OTHER; note = 2'-O-methylguanosine-3'-phosphate
  modified_base 16: mod_base = OTHER; note = 2'-O-methylguanosine-3'-phosphate
  modified_base 17: mod_base = OTHER; note = 2'-O-methyluridine-3'-phosphate
  modified_base 18: mod_base = OTHER; note = 2'-O-methylguanosine-3'-phosphate
  modified_base 19: mod_base = OTHER; note = 2'-O-methylguanosine-3'-phosphorothioate
  modified_base 20: mod_base = OTHER; note = 2'-O-methyluridine-3'-phosphorothioate
  modified_base 21: mod_base = OTHER; note = 2'-O-methyladenosine-3'-phosphate
ggcagcattgagaaggtggta

SEQ ID NO: 2751 - RNA, 21 nt, synthetic construct
  source 1..21: mol_type = other RNA
  modified_base 1: mod_base = OTHER; note = 2'-O-methylguanosine-3'-phosphorothioate
  modified_base 2: mod_base = OTHER; note = 2'-O-methyluridine-3'-phosphorothioate
  modified_base 3: mod_base = OTHER; note = 2'-O-methylcytidine-3'-phosphate
  modified_base 4: mod_base = OTHER; note = 2'-O-methyladenosine-3'-phosphate
  modified_base 5: mod_base = OTHER; note = 2'-O-methylguanosine-3'-phosphate
  modified_base 6: mod_base = OTHER; note 4-amino-1-((2R,3R,4R,5R)-3-(docosyloxy)-4-hydroxy-5-(hydrox ymethyl)tetrahydrofuran-2-yl)pyrimidin-2(1H)-one
  modified_base 7: mod_base = OTHER; note = 2'-fluoroguanosine-3'-phosphate
  modified_base 8: mod_base = OTHER; note = 2'-O-methyladenosine-3'-phosphate
  modified_base 9: mod_base = OTHER; note = 2'-fluorocytidine-3'-phosphate
  modified_base 10: mod_base = OTHER; note = 2'-fluoroadenosine-3'-phosphate
  modified_base 11: mod_base = OTHER; note = 2'-fluoroguanosine-3'-phosphate
  modified_base 12: mod_base = OTHER; note = 2'-O-methylcytidine-3'-phosphate
  modified_base 13: mod_base = OTHER; note = 2'-O-methyluridine-3'-phosphate
  modified_base 14: mod_base = OTHER; note = 2'-O-methyluridine-3'-phosphate
  modified_base 15: mod_base = OTHER; note = 2'-O-methylcytidine-3'-phosphate
  modified_base 16: mod_base = OTHER; note = 2'-O-methyluridine-3'-phosphate
  modified_base 17: mod_base = OTHER; note = 2'-O-methyluridine-3'-phosphate
  modified_base 18: mod_base = OTHER; note = 2'-O-methylcytidine-3'-phosphate
  modified_base 19: mod_base = OTHER; note = 2'-O-methylcytidine-3'-phosphorothioate
  modified_base 20: mod_base = OTHER; note = 2'-O-methylguanosine-3'-phosphorothioate
  modified_base 21: mod_base = OTHER; note = 2'-O-methyladenosine-3'-phosphate
gtcagcgacagcttcttccga

SEQ ID NO: 2752 - RNA, 21 nt, synthetic construct
  source 1..21: mol_type = other RNA
  modified_base 1: mod_base = OTHER; note = 2'-O-methylcytidine-3'-phosphorothioate
  modified_base 2: mod_base = OTHER; note = 2'-O-methyluridine-3'-phosphorothioate
  modified_base 3: mod_base = OTHER; note = 2'-O-methylguanosine-3'-phosphate
  modified_base 4: mod_base = OTHER; note = 2'-O-methylcytidine-3'-phosphate
  modified_base 5: mod_base = OTHER; note = 2'-O-methyluridine-3'-phosphate
  modified_base 6: mod_base = OTHER; note 2-amino-9-((2R,3S,4S,5R)-3-(docosyloxy)-4-hydroxy-5-(hydrox ymethyl)tetrahydrofuran-2-yl)-1,9-dihydro-6H-purin-6-one
  modified_base 7: mod_base = OTHER; note = 2'-fluorouridine-3'-phosphate
  modified_base 8: mod_base = OTHER; note = 2'-O-methylcytidine-3'-phosphate
  modified_base 9: mod_base = OTHER; note = 2'-fluorouridine-3'-phosphate
  modified_base 10: mod_base = OTHER; note = 2'-fluorocytidine-3'-phosphate
  modified_base 11: mod_base = OTHER; note = 2'-fluorocytidine-3'-phosphate
  modified_base 12: mod_base = OTHER; note = 2'-O-methyluridine-3'-phosphate
  modified_base 13: mod_base = OTHER; note = 2'-O-methylcytidine-3'-phosphate
  modified_base 14: mod_base = OTHER; note = 2'-O-methyladenosine-3'-phosphate
  modified_base 15: mod_base = OTHER; note = 2'-O-methyladenosine-3'-phosphate
  modified_base 16: mod_base = OTHER; note = 2'-O-methylcytidine-3'-phosphate
  modified_base 17: mod_base = OTHER; note = 2'-O-methylcytidine-3'-phosphate
  modified_base 18: mod_base = OTHER; note = 2'-O-methyladenosine-3'-phosphate
  modified_base 19: mod_base = OTHER; note = 2'-O-methyladenosine-3'-phosphorothioate
  modified_base 20: mod_base = OTHER; note = 2'-O-methylguanosine-3'-phosphorothioate
  modified_base 21: mod_base = OTHER; note = 2'-O-methyladenosine-3'-phosphate
ctgctgtctcctcaaccaaga

SEQ ID NO: 2753 - RNA, 21 nt, synthetic construct
  source 1..21: mol_type = other RNA
  modified_base 1: mod_base = OTHER; note = 2'-O-methyladenosine-3'-phosphorothioate
  modified_base 2: mod_base = OTHER; note = 2'-O-methylguanosine-3'-phosphorothioate
  modified_base 3: mod_base = OTHER; note = 2'-O-methylguanosine-3'-phosphate
  modified_base 4: mod_base = OTHER; note = 2'-O-methyladenosine-3'-phosphate
  modified_base 5: mod_base = OTHER; note = 2'-O-methylguanosine-3'-phosphate
  modified_base 6: mod_base = OTHER; note 2-amino-9-((2R,3S,4S,5R)-3-(docosyloxy)-4-hydroxy-5-(hydrox ymethyl)tetrahydrofuran-2-yl)-1,9-dihydro-6H-purin-6-one
  modified_base 7: mod_base = OTHER; note = 2'-fluoroadenosine-3'-phosphate
  modified_base 8: mod_base = OTHER; note = 2'-O-methyladenosine-3'-phosphate
  modified_base 9: mod_base = OTHER; note = 2'-fluoroguanosine-3'-phosphate
  modified_base 10: mod_base = OTHER; note = 2'-fluoroadenosine-3'-phosphate
  modified_base 11: mod_base = OTHER; note = 2'-fluoroadenosine-3'-phosphate
  modified_base 12: mod_base = OTHER; note = 2'-O-methyluridine-3'-phosphate
  modified_base 13: mod_base = OTHER; note = 2'-O-methyluridine-3'-phosphate
  modified_base 14: mod_base = OTHER; note = 2'-O-methylguanosine-3'-phosphate
  modified_base 15: mod_base = OTHER; note = 2'-O-methylguanosine-3'-phosphate
  modified_base 16: mod_base = OTHER; note = 2'-O-methyladenosine-3'-phosphate
  modified_base 17: mod_base = OTHER; note = 2'-O-methylguanosine-3'-phosphate
  modified_base 18: mod_base = OTHER; note = 2'-O-methyladenosine-3'-phosphate
  modified_base 19: mod_base = OTHER; note = 2'-O-methylcytidine-3'-phosphorothioate
  modified_base 20: mod_base = OTHER; note = 2'-O-methyluridine-3'-phosphorothioate
  modified_base 21: mod_base = OTHER; note = 2'-O-methyladenosine-3'-phosphate
aggaggaagaattggagacta

SEQ ID NO: 2754 - RNA, 21 nt, synthetic construct
  source 1..21: mol_type = other RNA
  modified_base 1: mod_base = OTHER; note = 2'-O-methylcytidine-3'-phosphorothioate
  modified_base 2: mod_base = OTHER; note = 2'-O-methylcytidine-3'-phosphorothioate
  modified_base 3: mod_base = OTHER; note = 2'-O-methyluridine-3'-phosphate
  modified_base 4: mod_base = OTHER; note = 2'-O-methylguanosine-3'-phosphate
  modified_base 5: mod_base = OTHER; note = 2'-O-methyluridine-3'-phosphate
  modified_base 6: mod_base = OTHER; note 4-amino-1-((2R,3R,4R,5R)-3-(docosyloxy)-4-hydroxy-5-(hydrox ymethyl)tetrahydrofuran-2-yl)pyrimidin-2(1H)-one
  modified_base 7: mod_base = OTHER; note = 2'-fluoroadenosine-3'-phosphate
  modified_base 8: mod_base = OTHER; note = 2'-O-methylcytidine-3'-phosphate
  modified_base 9: mod_base = OTHER; note = 2'-fluorocytidine-3'-phosphate
  modified_base 10: mod_base = OTHER; note = 2'-fluoroadenosine-3'-phosphate
  modified_base 11: mod_base = OTHER; note = 2'-fluorocytidine-3'-phosphate
  modified_base 12: mod_base = OTHER; note = 2'-O-methyluridine-3'-phosphate
  modified_base 13: mod_base = OTHER; note = 2'-O-methylcytidine-3'-phosphate
  modified_base 14: mod_base = OTHER; note = 2'-O-methyluridine-3'-phosphate
  modified_base 15: mod_base = OTHER; note = 2'-O-methylguanosine-3'-phosphate
  modified_base 16: mod_base = OTHER; note = 2'-O-methyladenosine-3'-phosphate
  modified_base 17: mod_base = OTHER; note = 2'-O-methyladenosine-3'-phosphate
  modified_base 18: mod_base = OTHER; note = 2'-O-methylguanosine-3'-phosphate
  modified_base 19: mod_base = OTHER; note = 2'-O-methylguanosine-3'-phosphorothioate
  modified_base 20: mod_base = OTHER; note = 2'-O-methyluridine-3'-phosphorothioate
  modified_base 21: mod_base = OTHER; note = 2'-O-methyladenosine-3'-phosphate
cctgtcaccactctgaaggta

SEQ ID NO: 2755 - RNA, 21 nt, synthetic construct
  source 1..21: mol_type = other RNA
  modified_base 1: mod_base = OTHER; note = 2'-O-methyladenosine-3'-phosphorothioate
  modified_base 2: mod_base = OTHER; note = 2'-O-methylguanosine-3'-phosphorothioate
  modified_base 3: mod_base = OTHER; note = 2'-O-methyladenosine-3'-phosphate
  modified_base 4: mod_base = OTHER; note = 2'-O-methylcytidine-3'-phosphate
  modified_base 5: mod_base = OTHER; note = 2'-O-methyluridine-3'-phosphate
  modified_base 6: mod_base = OTHER; note 1-((2R,3R,4R,5R)-3-(docosyloxy)-4-hydroxy-5-(hydroxymethyl) tetrahydrofuran-2-yl)pyrimidine-2,4(1H,3H)-dione
  modified_base 7: mod_base = OTHER; note = 2'-fluorouridine-3'-phosphate
  modified_base 8: mod_base = OTHER; note = 2'-O-methyladenosine-3'-phosphate
  modified_base 9: mod_base = OTHER; note = 2'-fluorouridine-3'-phosphate
  modified_base 10: mod_base = OTHER; note = 2'-fluoroguanosine-3'-phosphate
  modified_base 11: mod_base = OTHER; note = 2'-fluorouridine-3'-phosphate
  modified_base 12: mod_base = OTHER; note = 2'-O-methyladenosine-3'-phosphate
  modified_base 13: mod_base = OTHER; note = 2'-O-methyluridine-3'-phosphate
  modified_base 14: mod_base = OTHER; note = 2'-O-methyladenosine-3'-phosphate
  modified_base 15: mod_base = OTHER; note = 2'-O-methylguanosine-3'-phosphate
  modified_base 16: mod_base = OTHER; note = 2'-O-methylcytidine-3'-phosphate
  modified_base 17: mod_base = OTHER; note = 2'-O-methylcytidine-3'-phosphate
  modified_base 18: mod_base = OTHER; note = 2'-O-methyladenosine-3'-phosphate
  modified_base 19: mod_base = OTHER; note = 2'-O-methylcytidine-3'-phosphorothioate
  modified_base 20: mod_base = OTHER; note = 2'-O-methyladenosine-3'-phosphorothioate
  modified_base 21: mod_base = OTHER; note = 2'-O-methyladenosine-3'-phosphate
agactttatgtatagccacaa

SEQ ID NO: 2756 - RNA, 21 nt, synthetic construct
  source 1..21: mol_type = other RNA
  modified_base 1: mod_base = OTHER; note = 2'-O-methylguanosine-3'-phosphorothioate
  modified_base 2: mod_base = OTHER; note = 2'-O-methyluridine-3'-phosphorothioate
  modified_base 3: mod_base = OTHER; note = 2'-O-methyluridine-3'-phosphate
  modified_base 4: mod_base = OTHER; note = 2'-O-methyladenosine-3'-phosphate
  modified_base 5: mod_base = OTHER; note = 2'-O-methylcytidine-3'-phosphate
  modified_base 6: mod_base = OTHER; note 2-amino-9-((2R,3S,4S,5R)-3-(docosyloxy)-4-hydroxy-5-(hydrox ymethyl)tetrahydrofuran-2-yl)-1,9-dihydro-6H-purin-6-one
  modified_base 7: mod_base = OTHER; note = 2'-fluorocytidine-3'-phosphate
  modified_base 8: mod_base = OTHER; note = 2'-O-methyladenosine-3'-phosphate
  modified_base 9: mod_base = OTHER; note = 2'-fluorouridine-3'-phosphate
  modified_base 10: mod_base = OTHER; note = 2'-fluoroguanosine-3'-phosphate
  modified_base 11: mod_base = OTHER; note = 2'-fluorocytidine-3'-phosphate
  modified_base 12: mod_base = OTHER; note = 2'-O-methylcytidine-3'-phosphate
  modified_base 13: mod_base = OTHER; note = 2'-O-methyluridine-3'-phosphate
  modified_base 14: mod_base = OTHER; note = 2'-O-methylguanosine-3'-phosphate
  modified_base 15: mod_base = OTHER; note = 2'-O-methylcytidine-3'-phosphate
  modified_base 16: mod_base = OTHER; note = 2'-O-methyluridine-3'-phosphate
  modified_base 17: mod_base = OTHER; note = 2'-O-methyluridine-3'-phosphate
  modified_base 18: mod_base = OTHER; note = 2'-O-methyluridine-3'-phosphate
  modified_base 19: mod_base = OTHER; note = 2'-O-methyluridine-3'-phosphorothioate
  modified_base 20: mod_base = OTHER; note = 2'-O-methyluridine-3'-phosphorothioate
  modified_base 21: mod_base = OTHER; note = 2'-O-methyladenosine-3'-phosphate
gttacgcatgcctgcttttta

SEQ ID NO: 2757 - RNA, 21 nt, synthetic construct
  source 1..21: mol_type = other RNA
  modified_base 1: mod_base = OTHER; note = 2'-O-methylcytidine-3'-phosphorothioate
  modified_base 2: mod_base = OTHER; note = 2'-O-methylcytidine-3'-phosphorothioate
  modified_base 3: mod_base = OTHER; note = 2'-O-methyladenosine-3'-phosphate
  modified_base 4: mod_base = OTHER; note = 2'-O-methylguanosine-3'-phosphate
  modified_base 5: mod_base = OTHER; note = 2'-O-methyluridine-3'-phosphate
  modified_base 6: mod_base = OTHER; note 1-((2R,3R,4R,5R)-3-(docosyloxy)-4-hydroxy-5-(hydroxymethyl) tetrahydrofuran-2-yl)pyrimidine-2,4(1H,3H)-dione
  modified_base 7: mod_base = OTHER; note = 2'-fluorocytidine-3'-phosphate
  modified_base 8: mod_base = OTHER; note = 2'-O-methyladenosine-3'-phosphate
  modified_base 9: mod_base = OTHER; note = 2'-fluorocytidine-3'-phosphate
  modified_base 10: mod_base = OTHER; note = 2'-fluoroadenosine-3'-phosphate
  modified_base 11: mod_base = OTHER; note = 2'-fluoroguanosine-3'-phosphate
  modified_base 12: mod_base = OTHER; note = 2'-O-methylcytidine-3'-phosphate
  modified_base 13: mod_base = OTHER; note = 2'-O-methyluridine-3'-phosphate
  modified_base 14: mod_base = OTHER; note = 2'-O-methylguanosine-3'-phosphate
  modified_base 15: mod_base = OTHER; note = 2'-O-methylcytidine-3'-phosphate
  modified_base 16: mod_base = OTHER; note = 2'-O-methylcytidine-3'-phosphate
  modified_base 17: mod_base = OTHER; note = 2'-O-methyladenosine-3'-phosphate
  modified_base 18: mod_base = OTHER; note = 2'-O-methyladenosine-3'-phosphate
  modified_base 19: mod_base = OTHER; note = 2'-O-methyluridine-3'-phosphorothioate
  modified_base 20: mod_base = OTHER; note = 2'-O-methylguanosine-3'-phosphorothioate
  modified_base 21: mod_base = OTHER; note = 2'-O-methyladenosine-3'-phosphate
ccagttcacagctgccaatga

SEQ ID NO: 2758 - RNA, 21 nt, synthetic construct
  source 1..21: mol_type = other RNA
  modified_base 1: mod_base = OTHER; note = 2'-O-methylcytidine-3'-phosphorothioate
  modified_base 2: mod_base = OTHER; note = 2'-O-methyladenosine-3'-phosphorothioate
  modified_base 3: mod_base = OTHER; note = 2'-O-methylguanosine-3'-phosphate
  modified_base 4: mod_base = OTHER; note = 2'-O-methylguanosine-3'-phosphate
  modified_base 5: mod_base = OTHER; note = 2'-O-methylcytidine-3'-phosphate
  modified_base 6: mod_base = OTHER; note (2R,3S,4S,5R)-5-(6-amino-9H-purin-9-yl)-4-(docosyloxy)-2-(h ydroxymethyl)tetrahydrofuran-3-ol
  modified_base 7: mod_base = OTHER; note = 2'-fluorocytidine-3'-phosphate
  modified_base 8: mod_base = OTHER; note = 2'-O-methylguanosine-3'-phosphate
  modified_base 9: mod_base = OTHER; note = 2'-fluorouridine-3'-phosphate
  modified_base 10: mod_base = OTHER; note = 2'-fluoroguanosine-3'-phosphate
  modified_base 11: mod_base = OTHER; note = 2'-fluorouridine-3'-phosphate
  modified_base 12: mod_base = OTHER; note = 2'-O-methylguanosine-3'-phosphate
  modified_base 13: mod_base = OTHER; note = 2'-O-methyluridine-3'-phosphate
  modified_base 14: mod_base = OTHER; note = 2'-O-methyladenosine-3'-phosphate
  modified_base 15: mod_base = OTHER; note = 2'-O-methyluridine-3'-phosphate
  modified_base 16: mod_base = OTHER; note = 2'-O-methylguanosine-3'-phosphate
  modified_base 17: mod_base = OTHER; note = 2'-O-methylcytidine-3'-phosphate
  modified_base 18: mod_base = OTHER; note = 2'-O-methyladenosine-3'-phosphate
  modified_base 19: mod_base = OTHER; note = 2'-O-methylcytidine-3'-phosphorothioate
  modified_base 20: mod_base = OTHER; note = 2'-O-methyluridine-3'-phosphorothioate
  modified_base 21: mod_base = OTHER; note = 2'-O-methyladenosine-3'-phosphate
caggcacgtgtgtatgcacta

SEQ ID NO: 2759 - RNA, 21 nt, synthetic construct
  source 1..21: mol_type = other RNA
  modified_base 1: mod_base = OTHER; note = 2'-O-methyladenosine-3'-phosphorothioate
  modified_base 2: mod_base = OTHER; note = 2'-O-methyluridine-3'-phosphorothioate
  modified_base 3: mod_base = OTHER; note = 2'-O-methylguanosine-3'-phosphate
  modified_base 4: mod_base = OTHER; note = 2'-O-methylguanosine-3'-phosphate
  modified_base 5: mod_base = OTHER; note = 2'-O-methylcytidine-3'-phosphate
  modified_base 6: mod_base = OTHER; note (2R,3S,4S,5R)-5-(6-amino-9H-purin-9-yl)-4-(docosyloxy)-2-(h ydroxymethyl)tetrahydrofuran-3-ol
  modified_base 7: mod_base = OTHER; note = 2'-fluoroguanosine-3'-phosphate
  modified_base 8: mod_base = OTHER; note = 2'-O-methyluridine-3'-phosphate
  modified_base 9: mod_base = OTHER; note = 2'-fluorocytidine-3'-phosphate
  modified_base 10: mod_base = OTHER; note = 2'-fluoroadenosine-3'-phosphate
  modified_base 11: mod_base = OTHER; note = 2'-fluoroadenosine-3'-phosphate
  modified_base 12: mod_base = OTHER; note = 2'-O-methylcytidine-3'-phosphate
  modified_base 13: mod_base = OTHER; note = 2'-O-methyladenosine-3'-phosphate
  modified_base 14: mod_base = OTHER; note = 2'-O-methyladenosine-3'-phosphate
  modified_base 15: mod_base = OTHER; note = 2'-O-methyladenosine-3'-phosphate
  modified_base 16: mod_base = OTHER; note = 2'-O-methylguanosine-3'-phosphate
  modified_base 17: mod_base = OTHER; note = 2'-O-methylguanosine-3'-phosphate
  modified_base 18: mod_base = OTHER; note = 2'-O-methylcytidine-3'-phosphate
  modified_base 19: mod_base = OTHER; note = 2'-O-methylcytidine-3'-phosphorothioate
  modified_base 20: mod_base = OTHER; note = 2'-O-methyluridine-3'-phosphorothioate
  modified_base 21: mod_base = OTHER; note = 2'-O-methyladenosine-3'-phosphate
atggcagtcaacaaaggccta

SEQ ID NO: 2760 - RNA, 21 nt, synthetic construct
  source 1..21: mol_type = other RNA
  modified_base 1: mod_base = OTHER; note = 2'-O-methylcytidine-3'-phosphorothioate
  modified_base 2: mod_base = OTHER; note = 2'-O-methyladenosine-3'-phosphorothioate
  modified_base 3: mod_base = OTHER; note = 2'-O-methyladenosine-3'-phosphate
  modified_base 4: mod_base = OTHER; note = 2'-O-methyladenosine-3'-phosphate
  modified_base 5: mod_base = OTHER; note = 2'-O-methylcytidine-3'-phosphate
  modified_base 6: mod_base = OTHER; note 1-((2R,3R,4R,5R)-3-(docosyloxy)-4-hydroxy-5-(hydroxymethyl) tetrahydrofuran-2-yl)pyrimidine-2,4(1H,3H)-dione
  modified_base 7: mod_base = OTHER; note = 2'-fluorouridine-3'-phosphate
  modified_base 8: mod_base = OTHER; note = 2'-O-methylguanosine-3'-phosphate
  modified_base 9: mod_base = OTHER; note = 2'-fluorouridine-3'-phosphate
  modified_base 10: mod_base = OTHER; note = 2'-fluoroguanosine-3'-phosphate
  modified_base 11: mod_base = OTHER; note = 2'-fluoroguanosine-3'-phosphate
  modified_base 12: mod_base = OTHER; note = 2'-O-methylcytidine-3'-phosphate
  modified_base 13: mod_base = OTHER; note = 2'-O-methylcytidine-3'-phosphate
  modified_base 14: mod_base = OTHER; note = 2'-O-methyladenosine-3'-phosphate
  modified_base 15: mod_base = OTHER; note = 2'-O-methyladenosine-3'-phosphate
  modified_base 16: mod_base = OTHER; note = 2'-O-methyladenosine-3'-phosphate
  modified_base 17: mod_base = OTHER; note = 2'-O-methyladenosine-3'-phosphate
  modified_base 18: mod_base = OTHER; note = 2'-O-methylguanosine-3'-phosphate
  modified_base 19: mod_base = OTHER; note = 2'-O-methyladenosine-3'-phosphorothioate
  modified_base 20: mod_base = OTHER; note = 2'-O-methyluridine-3'-phosphorothioate
  modified_base 21: mod_base = OTHER; note = 2'-O-methyladenosine-3'-phosphate
caaacttgtggccaaaagata

SEQ ID NO: 2761 - RNA, 21 nt, synthetic construct
  source 1..21: mol_type = other RNA
  modified_base 1: mod_base = OTHER; note = 2'-O-methyluridine-3'-phosphorothioate
  modified_base 2: mod_base = OTHER; note = 2'-O-methylcytidine-3'-phosphorothioate
  modified_base 3: mod_base = OTHER; note = 2'-O-methyluridine-3'-phosphate
  modified_base 4: mod_base = OTHER; note = 2'-O-methylguanosine-3'-phosphate
  modified_base 5: mod_base = OTHER; note = 2'-O-methyladenosine-3'-phosphate
  modified_base 6: mod_base = OTHER; note 4-amino-1-((2R,3R,4R,5R)-3-(docosyloxy)-4-hydroxy-5-(hydrox ymethyl)tetrahydrofuran-2-yl)pyrimidin-2(1H)-one
  modified_base 7: mod_base = OTHER; note = 2'-fluorocytidine-3'-phosphate
  modified_base 8: mod_base = OTHER; note = 2'-O-methyladenosine-3'-phosphate
  modified_base 9: mod_base = OTHER; note = 2'-fluoroadenosine-3'-phosphate
  modified_base 10: mod_base = OTHER; note = 2'-fluorocytidine-3'-phosphate
  modified_base 11: mod_base = OTHER; note = 2'-fluoroadenosine-3'-phosphate
  modified_base 12: mod_base = OTHER; note = 2'-O-methylcytidine-3'-phosphate
  modified_base 13: mod_base = OTHER; note = 2'-O-methylcytidine-3'-phosphate
  modified_base 14: mod_base = OTHER; note = 2'-O-methylcytidine-3'-phosphate
  modified_base 15: mod_base = OTHER; note = 2'-O-methyluridine-3'-phosphate
  modified_base 16: mod_base = OTHER; note = 2'-O-methylcytidine-3'-phosphate
  modified_base 17: mod_base = OTHER; note = 2'-O-methyluridine-3'-phosphate
  modified_base 18: mod_base = OTHER; note = 2'-O-methylcytidine-3'-phosphate
  modified_base 19: mod_base = OTHER; note = 2'-O-methyluridine-3'-phosphorothioate
  modified_base 20: mod_base = OTHER; note = 2'-O-methylcytidine-3'-phosphorothioate
  modified_base 21: mod_base = OTHER; note = 2'-O-methyladenosine-3'-phosphate
tctgaccaacaccctctctca

SEQ ID NO: 2762 - RNA, 21 nt, synthetic construct
  source 1..21: mol_type = other RNA
  modified_base 1: mod_base = OTHER; note = 2'-O-methyluridine-3'-phosphorothioate
  modified_base 2: mod_base = OTHER; note = 2'-O-methylcytidine-3'-phosphorothioate
  modified_base 3: mod_base = OTHER; note = 2'-O-methyladenosine-3'-phosphate
  modified_base 4: mod_base = OTHER; note = 2'-O-methylcytidine-3'-phosphate
  modified_base 5: mod_base = OTHER; note = 2'-O-methyladenosine-3'-phosphate
  modified_base 6: mod_base = OTHER; note 1-((2R,3R,4R,5R)-3-(docosyloxy)-4-hydroxy-5-(hydroxymethyl) tetrahydrofuran-2-yl)pyrimidine-2,4(1H,3H)-dione
  modified_base 7: mod_base = OTHER; note = 2'-fluorouridine-3'-phosphate
  modified_base 8: mod_base = OTHER; note = 2'-O-methyladenosine-3'-phosphate
  modified_base 9: mod_base = OTHER; note = 2'-fluorouridine-3'-phosphate
  modified_base 10: mod_base = OTHER; note = 2'-fluoroadenosine-3'-phosphate
  modified_base 11: mod_base = OTHER; note = 2'-fluoroadenosine-3'-phosphate
  modified_base 12: mod_base = OTHER; note = 2'-O-methyladenosine-3'-phosphate
  modified_base 13: mod_base = OTHER; note = 2'-O-methyluridine-3'-phosphate
  modified_base 14: mod_base = OTHER; note = 2'-O-methylcytidine-3'-phosphate
  modified_base 15: mod_base = OTHER; note = 2'-O-methylcytidine-3'-phosphate
  modified_base 16: mod_base = OTHER; note = 2'-O-methylcytidine-3'-phosphate
  modified_base 17: mod_base = OTHER; note = 2'-O-methyladenosine-3'-phosphate
  modified_base 18: mod_base = OTHER; note = 2'-O-methylcytidine-3'-phosphate
  modified_base 19: mod_base = OTHER; note = 2'-O-methyluridine-3'-phosphorothioate
  modified_base 20: mod_base = OTHER; note = 2'-O-methylcytidine-3'-phosphorothioate
  modified_base 21: mod_base = OTHER; note = 2'-O-methyladenosine-3'-phosphate
tcacattataaatcccactca

SEQ ID NO: 2763 - RNA, 21 nt, synthetic construct
  source 1..21: mol_type = other RNA
  modified_base 1: mod_base = OTHER; note = 2'-O-methylguanosine-3'-phosphorothioate
  modified_base 2: mod_base = OTHER; note = 2'-O-methyladenosine-3'-phosphorothioate
  modified_base 3: mod_base = OTHER; note = 2'-O-methylguanosine-3'-phosphate
  modified_base 4: mod_base = OTHER; note = 2'-O-methylguanosine-3'-phosphate
  modified_base 5: mod_base = OTHER; note = 2'-O-methyladenosine-3'-phosphate
  modified_base 6: mod_base = OTHER; note 2-amino-9-((2R,3S,4S,5R)-3-(docosyloxy)-4-hydroxy-5-(hydrox ymethyl)tetrahydrofuran-2-yl)-1,9-dihydro-6H-purin-6-one
  modified_base 7: mod_base = OTHER; note = 2'-fluoroadenosine-3'-phosphate
  modified_base 8: mod_base = OTHER; note = 2'-O-methyladenosine-3'-phosphate
  modified_base 9: mod_base = OTHER; note = 2'-fluorocytidine-3'-phosphate
  modified_base 10: mod_base = OTHER; note = 2'-fluoroadenosine-3'-phosphate
  modified_base 11: mod_base = OTHER; note = 2'-fluoroadenosine-3'-phosphate
  modified_base 12: mod_base = OTHER; note = 2'-O-methylguanosine-3'-phosphate
  modified_base 13: mod_base = OTHER; note = 2'-O-methyluridine-3'-phosphate
  modified_base 14: mod_base = OTHER; note = 2'-O-methyluridine-3'-phosphate
  modified_base 15: mod_base = OTHER; note = 2'-O-methylcytidine-3'-phosphate
  modified_base 16: mod_base = OTHER; note = 2'-O-methyladenosine-3'-phosphate
  modified_base 17: mod_base = OTHER; note = 2'-O-methylguanosine-3'-phosphate
  modified_base 18: mod_base = OTHER; note = 2'-O-methyluridine-3'-phosphate
  modified_base 19: mod_base = OTHER; note = 2'-O-methylguanosine-3'-phosphorothioate
  modified_base 20: mod_base = OTHER; note = 2'-O-methyladenosine-3'-phosphorothioate
  modified_base 21: mod_base = OTHER; note = 2'-O-methyladenosine-3'-phosphate
gaggagaacaagttcagtgaa

SEQ ID NO: 2764 - RNA, 21 nt, synthetic construct
  source 1..21: mol_type = other RNA
  modified_base 1: mod_base = OTHER; note = 2'-O-methylguanosine-3'-phosphorothioate
  modified_base 2: mod_base = OTHER; note = 2'-O-methyladenosine-3'-phosphorothioate
  modified_base 3: mod_base = OTHER; note = 2'-O-methylguanosine-3'-phosphate
  modified_base 4: mod_base = OTHER; note = 2'-O-methylcytidine-3'-phosphate
  modified_base 5: mod_base = OTHER; note = 2'-O-methyladenosine-3'-phosphate
  modified_base 6: mod_base = OTHER; note 2-amino-9-((2R,3S,4S,5R)-3-(docosyloxy)-4-hydroxy-5-(hydrox ymethyl)tetrahydrofuran-2-yl)-1,9-dihydro-6H-purin-6-one
  modified_base 7: mod_base = OTHER; note = 2'-fluoroguanosine-3'-phosphate
  modified_base 8: mod_base = OTHER; note = 2'-O-methyladenosine-3'-phosphate
  modified_base 9: mod_base = OTHER; note = 2'-fluoroguanosine-3'-phosphate
  modified_base 10: mod_base = OTHER; note = 2'-fluoroadenosine-3'-phosphate
  modified_base 11: mod_base = OTHER; note = 2'-fluoroadenosine-3'-phosphate
  modified_base 12: mod_base = OTHER; note = 2'-O-methyluridine-3'-phosphate
  modified_base 13: mod_base = OTHER; note = 2'-O-methylguanosine-3'-phosphate
  modified_base 14: mod_base = OTHER; note = 2'-O-methyluridine-3'-phosphate
  modified_base 15: mod_base = OTHER; note = 2'-O-methylguanosine-3'-phosphate
  modified_base 16: mod_base = OTHER; note = 2'-O-methylcytidine-3'-phosphate
  modified_base 17: mod_base = OTHER; note = 2'-O-methyluridine-3'-phosphate
  modified_base 18: mod_base = OTHER; note = 2'-O-methylguanosine-3'-phosphate
  modified_base 19: mod_base = OTHER; note = 2'-O-methylcytidine-3'-phosphorothioate
  modified_base 20: mod_base = OTHER; note = 2'-O-methyladenosine-3'-phosphorothioate
  modified_base 21: mod_base = OTHER; note = 2'-O-methyladenosine-3'-phosphate
gagcaggagaatgtgctgcaa

SEQ ID NO: 2765 - RNA, 21 nt, synthetic construct
  source 1..21: mol_type = other RNA
  modified_base 1: mod_base = OTHER; note = 2'-O-methylguanosine-3'-phosphorothioate
  modified_base 2: mod_base = OTHER; note = 2'-O-methyladenosine-3'-phosphorothioate
  modified_base 3: mod_base = OTHER; note = 2'-O-methyladenosine-3'-phosphate
  modified_base 4: mod_base = OTHER; note = 2'-O-methylguanosine-3'-phosphate
  modified_base 5: mod_base = OTHER; note = 2'-O-methyladenosine-3'-phosphate
  modified_base 6: mod_base = OTHER; note 4-amino-1-((2R,3R,4R,5R)-3-(docosyloxy)-4-hydroxy-5-(hydrox ymethyl)tetrahydrofuran-2-yl)pyrimidin-2(1H)-one
  modified_base 7: mod_base = OTHER; note = 2'-fluorocytidine-3'-phosphate
  modified_base 8: mod_base = OTHER; note = 2'-O-methyluridine-3'-phosphate
  modified_base 9: mod_base = OTHER; note = 2'-fluoroadenosine-3'-phosphate
  modified_base 10: mod_base = OTHER; note = 2'-fluorocytidine-3'-phosphate
  modified_base 11: mod_base = OTHER; note = 2'-fluoroadenosine-3'-phosphate
  modified_base 12: mod_base = OTHER; note = 2'-O-methylcytidine-3'-phosphate
  modified_base 13: mod_base = OTHER; note = 2'-O-methylcytidine-3'-phosphate
  modified_base 14: mod_base = OTHER; note = 2'-O-methyladenosine-3'-phosphate
  modified_base 15: mod_base = OTHER; note = 2'-O-methylguanosine-3'-phosphate
  modified_base 16: mod_base = OTHER; note = 2'-O-methylcytidine-3'-phosphate
  modified_base 17: mod_base = OTHER; note = 2'-O-methyladenosine-3'-phosphate
  modified_base 18: mod_base = OTHER; note = 2'-O-methylcytidine-3'-phosphate
  modified_base 19: mod_base = OTHER; note = 2'-O-methyluridine-3'-phosphorothioate
  modified_base 20: mod_base = OTHER; note = 2'-O-methyladenosine-3'-phosphorothioate
  modified_base 21: mod_base = OTHER; note = 2'-O-methyladenosine-3'-phosphate
gaagacctacaccagcactaa

SEQ ID NO: 2766 - RNA, 21 nt, synthetic construct
  source 1..21: mol_type = other RNA
  modified_base 1: mod_base = OTHER; note = 2'-O-methyladenosine-3'-phosphorothioate
  modified_base 2: mod_base = OTHER; note = 2'-O-methylguanosine-3'-phosphorothioate
  modified_base 3: mod_base = OTHER; note = 2'-O-methylguanosine-3'-phosphate
  modified_base 4: mod_base = OTHER; note = 2'-O-methylcytidine-3'-phosphate
  modified_base 5: mod_base = OTHER; note = 2'-O-methylcytidine-3'-phosphate
  modified_base 6: mod_base = OTHER; note 1-((2R,3R,4R,5R)-3-(docosyloxy)-4-hydroxy-5-(hydroxymethyl) tetrahydrofuran-2-yl)pyrimidine-2,4(1H,3H)-dione
  modified_base 7: mod_base = OTHER; note = 2'-fluorocytidine-3'-phosphate
  modified_base 8: mod_base = OTHER; note = 2'-O-methyladenosine-3'-phosphate
  modified_base 9: mod_base = OTHER; note = 2'-fluorocytidine-3'-phosphate
  modified_base 10: mod_base = OTHER; note = 2'-fluorocytidine-3'-phosphate
  modified_base 11: mod_base = OTHER; note = 2'-fluorouridine-3'-phosphate
  modified_base 12: mod_base = OTHER; note = 2'-O-methyluridine-3'-phosphate
  modified_base 13: mod_base = OTHER; note = 2'-O-methylguanosine-3'-phosphate
  modified_base 14: mod_base = OTHER; note = 2'-O-methylcytidine-3'-phosphate
  modified_base 15: mod_base = OTHER; note = 2'-O-methyluridine-3'-phosphate
  modified_base 16: mod_base = OTHER; note = 2'-O-methylguanosine-3'-phosphate
  modified_base 17: mod_base = OTHER; note = 2'-O-methylguanosine-3'-phosphate
  modified_base 18: mod_base = OTHER; note = 2'-O-methyladenosine-3'-phosphate
  modified_base 19: mod_base = OTHER; note = 2'-O-methyluridine-3'-phosphorothioate
  modified_base 20: mod_base = OTHER; note = 2'-O-methylguanosine-3'-phosphorothioate
  modified_base 21: mod_base = OTHER; note = 2'-O-methyladenosine-3'-phosphate
aggcctcaccttgctggatga

SEQ ID NO: 2767 - RNA, 21 nt, synthetic construct
  source 1..21: mol_type = other RNA
  modified_base 1: mod_base = OTHER; note = 2'-O-methyladenosine-3'-phosphorothioate
  modified_base 2: mod_base = OTHER; note = 2'-O-methylguanosine-3'-phosphorothioate
  modified_base 3: mod_base = OTHER; note = 2'-O-methylcytidine-3'-phosphate
  modified_base 4: mod_base = OTHER; note = 2'-O-methylcytidine-3'-phosphate
  modified_base 5: mod_base = OTHER; note = 2'-O-methyladenosine-3'-phosphate
  modified_base 6: mod_base = OTHER; note 2-amino-9-((2R,3S,4S,5R)-3-(docosyloxy)-4-hydroxy-5-(hydrox ymethyl)tetrahydrofuran-2-yl)-1,9-dihydro-6H-purin-6-one
  modified_base 7: mod_base = OTHER; note = 2'-fluorocytidine-3'-phosphate
  modified_base 8: mod_base = OTHER; note = 2'-O-methyluridine-3'-phosphate
  modified_base 9: mod_base = OTHER; note = 2'-fluoroguanosine-3'-phosphate
  modified_base 10: mod_base = OTHER; note = 2'-fluorocytidine-3'-phosphate
  modified_base 11: mod_base = OTHER; note = 2'-fluorouridine-3'-phosphate
  modified_base 12: mod_base = OTHER; note = 2'-O-methyluridine-3'-phosphate
  modified_base 13: mod_base = OTHER; note = 2'-O-methylguanosine-3'-phosphate
  modified_base 14: mod_base = OTHER; note = 2'-O-methylcytidine-3'-phosphate
  modified_base 15: mod_base = OTHER; note = 2'-O-methyluridine-3'-phosphate
  modified_base 16: mod_base = OTHER; note = 2'-O-methylcytidine-3'-phosphate
  modified_base 17: mod_base = OTHER; note = 2'-O-methyladenosine-3'-phosphate
  modified_base 18: mod_base = OTHER; note = 2'-O-methylcytidine-3'-phosphate
  modified_base 19: mod_base = OTHER; note = 2'-O-methyladenosine-3'-phosphorothioate
  modified_base 20: mod_base = OTHER; note = 2'-O-methylguanosine-3'-phosphorothioate
  modified_base 21: mod_base = OTHER; note = 2'-O-methyladenosine-3'-phosphate
agccagctgcttgctcacaga

SEQ ID NO: 2768 - RNA, 21 nt, synthetic construct
  source 1..21: mol_type = other RNA
  modified_base 1: mod_base = OTHER; note = 2'-O-methylguanosine-3'-phosphorothioate
  modified_base 2: mod_base = OTHER; note = 2'-O-methylguanosine-3'-phosphorothioate
  modified_base 3: mod_base = OTHER; note = 2'-O-methylguanosine-3'-phosphate
  modified_base 4: mod_base = OTHER; note = 2'-O-methylcytidine-3'-phosphate
  modified_base 5: mod_base = OTHER; note = 2'-O-methyluridine-3'-phosphate
  modified_base 6: mod_base = OTHER; note 4-amino-1-((2R,3R,4R,5R)-3-(docosyloxy)-4-hydroxy-5-(hydrox ymethyl)tetrahydrofuran-2-yl)pyrimidin-2(1H)-one
  modified_base 7: mod_base = OTHER; note = 2'-fluorouridine-3'-phosphate
  modified_base 8: mod_base = OTHER; note = 2'-O-methylguanosine-3'-phosphate
  modified_base 9: mod_base = OTHER; note = 2'-fluorouridine-3'-phosphate
  modified_base 10: mod_base = OTHER; note = 2'-fluoroguanosine-3'-phosphate
  modified_base 11: mod_base = OTHER; note = 2'-fluoroadenosine-3'-phosphate
  modified_base 12: mod_base = OTHER; note = 2'-O-methylguanosine-3'-phosphate
  modified_base 13: mod_base = OTHER; note = 2'-O-methyladenosine-3'-phosphate
  modified_base 14: mod_base = OTHER; note = 2'-O-methylcytidine-3'-phosphate
  modified_base 15: mod_base = OTHER; note = 2'-O-methyluridine-3'-phosphate
  modified_base 16: mod_base = OTHER; note = 2'-O-methylguanosine-3'-phosphate
  modified_base 17: mod_base = OTHER; note = 2'-O-methyladenosine-3'-phosphate
  modified_base 18: mod_base = OTHER; note = 2'-O-methylguanosine-3'-phosphate
  modified_base 19: mod_base = OTHER; note = 2'-O-methylguanosine-3'-phosphorothioate
  modified_base 20: mod_base = OTHER; note = 2'-O-methyluridine-3'-phosphorothioate
  modified_base 21: mod_base = OTHER; note = 2'-O-methyladenosine-3'-phosphate
gggctctgtgagactgaggta

SEQ ID NO: 2769 - RNA, 21 nt, synthetic construct
  source 1..21: mol_type = other RNA
  modified_base 1: mod_base = OTHER; note = 2'-O-methylcytidine-3'-phosphorothioate
  modified_base 2: mod_base = OTHER; note = 2'-O-methylguanosine-3'-phosphorothioate
  modified_base 3: mod_base = OTHER; note = 2'-O-methyladenosine-3'-phosphate
  modified_base 4: mod_base = OTHER; note = 2'-O-methylguanosine-3'-phosphate
  modified_base 5: mod_base = OTHER; note = 2'-O-methyladenosine-3'-phosphate
  modified_base 6: mod_base = OTHER; note 2-amino-9-((2R,3S,4S,5R)-3-(docosyloxy)-4-hydroxy-5-(hydrox ymethyl)tetrahydrofuran-2-yl)-1,9-dihydro-6H-purin-6-one
  modified_base 7: mod_base = OTHER; note = 2'-fluorocytidine-3'-phosphate
  modified_base 8: mod_base = OTHER; note = 2'-O-methylguanosine-3'-phosphate
  modified_base 9: mod_base = OTHER; note = 2'-fluoroadenosine-3'-phosphate
  modified_base 10: mod_base = OTHER; note = 2'-fluoroadenosine-3'-phosphate
  modified_base 11: mod_base = OTHER; note = 2'-fluorouridine-3'-phosphate
  modified_base 12: mod_base = OTHER; note = 2'-O-methyluridine-3'-phosphate
  modified_base 13: mod_base = OTHER; note = 2'-O-methylcytidine-3'-phosphate
  modified_base 14: mod_base = OTHER; note = 2'-O-methylcytidine-3'-phosphate
  modified_base 15: mod_base = OTHER; note = 2'-O-methylguanosine-3'-phosphate
  modified_base 16: mod_base = OTHER; note = 2'-O-methylguanosine-3'-phosphate
  modified_base 17: mod_base = OTHER; note = 2'-O-methylguanosine-3'-phosphate
  modified_base 18: mod_base = OTHER; note = 2'-O-methyladenosine-3'-phosphate
  modified_base 19: mod_base = OTHER; note = 2'-O-methylcytidine-3'-phosphorothioate
  modified_base 20: mod_base = OTHER; note = 2'-O-methyladenosine-3'-phosphorothioate
  modified_base 21: mod_base = OTHER; note = 2'-O-methyladenosine-3'-phosphate
cgagagcgaattccgggacaa

SEQ ID NO: 2770 - RNA, 21 nt, synthetic construct
  source 1..21: mol_type = other RNA
  modified_base 1: mod_base = OTHER; note = 2'-O-methylguanosine-3'-phosphorothioate
  modified_base 2: mod_base = OTHER; note = 2'-O-methyluridine-3'-phosphorothioate
  modified_base 3: mod_base = OTHER; note = 2'-O-methylguanosine-3'-phosphate
  modified_base 4: mod_base = OTHER; note = 2'-O-methylguanosine-3'-phosphate
  modified_base 5: mod_base = OTHER; note = 2'-O-methylcytidine-3'-phosphate
  modified_base 6: mod_base = OTHER; note (2R,3S,4S,5R)-5-(6-amino-9H-purin-9-yl)-4-(docosyloxy)-2-(h ydroxymethyl)tetrahydrofuran-3-ol
  modified_base 7: mod_base = OTHER; note = 2'-fluorocytidine-3'-phosphate
  modified_base 8: mod_base = OTHER; note = 2'-O-methyladenosine-3'-phosphate
  modified_base 9: mod_base = OTHER; note = 2'-fluorouridine-3'-phosphate
  modified_base 10: mod_base = OTHER; note = 2'-fluoroadenosine-3'-phosphate
  modified_base 11: mod_base = OTHER; note = 2'-fluorocytidine-3'-phosphate
  modified_base 12: mod_base = OTHER; note = 2'-O-methylcytidine-3'-phosphate
  modified_base 13: mod_base = OTHER; note = 2'-O-methylcytidine-3'-phosphate
  modified_base 14: mod_base = OTHER; note = 2'-O-methyluridine-3'-phosphate
  modified_base 15: mod_base = OTHER; note = 2'-O-methylguanosine-3'-phosphate
  modified_base 16: mod_base = OTHER; note = 2'-O-methylcytidine-3'-phosphate
  modified_base 17: mod_base = OTHER; note = 2'-O-methyladenosine-3'-phosphate
  modified_base 18: mod_base = OTHER; note = 2'-O-methylguanosine-3'-phosphate
  modified_base 19: mod_base = OTHER; note = 2'-O-methyladenosine-3'-phosphorothioate
  modified_base 20: mod_base = OTHER; note = 2'-O-methyladenosine-3'-phosphorothioate
  modified_base 21: mod_base = OTHER; note = 2'-O-methyladenosine-3'-phosphate
gtggcacataccctgcagaaa

SEQ ID NO: 2771 - RNA, 21 nt, synthetic construct
  source 1..21: mol_type = other RNA
  modified_base 1: mod_base = OTHER; note = 2'-O-methylguanosine-3'-phosphorothioate
  modified_base 2: mod_base = OTHER; note = 2'-O-methyluridine-3'-phosphorothioate
  modified_base 3: mod_base = OTHER; note = 2'-O-methylguanosine-3'-phosphate
  modified_base 4: mod_base = OTHER; note = 2'-O-methylguanosine-3'-phosphate
  modified_base 5: mod_base = OTHER; note = 2'-O-methyladenosine-3'-phosphate
  modified_base 6: mod_base = OTHER; note 4-amino-1-((2R,3R,4R,5R)-3-(docosyloxy)-4-hydroxy-5-(hydrox ymethyl)tetrahydrofuran-2-yl)pyrimidin-2(1H)-one
  modified_base 7: mod_base = OTHER; note = 2'-fluoroadenosine-3'-phosphate
  modified_base 8: mod_base = OTHER; note = 2'-O-methylcytidine-3'-phosphate
  modified_base 9: mod_base = OTHER; note = 2'-fluoroadenosine-3'-phosphate
  modified_base 10: mod_base = OTHER; note = 2'-fluoroguanosine-3'-phosphate
  modified_base 11: mod_base = OTHER; note = 2'-fluorouridine-3'-phosphate
  modified_base 12: mod_base = OTHER; note = 2'-O-methylguanosine-3'-phosphate
  modified_base 13: mod_base = OTHER; note = 2'-O-methylguanosine-3'-phosphate
  modified_base 14: mod_base = OTHER; note = 2'-O-methyluridine-3'-phosphate
  modified_base 15: mod_base = OTHER; note = 2'-O-methylguanosine-3'-phosphate
  modified_base 16: mod_base = OTHER; note = 2'-O-methylcytidine-3'-phosphate
  modified_base 17: mod_base = OTHER; note = 2'-O-methyladenosine-3'-phosphate
  modified_base 18: mod_base = OTHER; note = 2'-O-methyluridine-3'-phosphate
  modified_base 19: mod_base = OTHER; note = 2'-O-methyluridine-3'-phosphorothioate
  modified_base 20: mod_base = OTHER; note = 2'-O-methyladenosine-3'-phosphorothioate
  modified_base 21: mod_base = OTHER; note = 2'-O-methyladenosine-3'-phosphate
gtggacacagtggtgcattaa

SEQ ID NO: 2772 - RNA, 21 nt, synthetic construct
  source 1..21: mol_type = other RNA
  modified_base 1: mod_base = OTHER; note = 2'-O-methyladenosine-3'-phosphorothioate
  modified_base 2: mod_base = OTHER; note = 2'-O-methyladenosine-3'-phosphorothioate
  modified_base 3: mod_base = OTHER; note = 2'-O-methylguanosine-3'-phosphate
  modified_base 4: mod_base = OTHER; note = 2'-O-methylcytidine-3'-phosphate
  modified_base 5: mod_base = OTHER; note = 2'-O-methylcytidine-3'-phosphate
  modified_base 6: mod_base = OTHER; note 4-amino-1-((2R,3R,4R,5R)-3-(docosyloxy)-4-hydroxy-5-(hydrox ymethyl)tetrahydrofuran-2-yl)pyrimidin-2(1H)-one
  modified_base 7: mod_base = OTHER; note = 2'-fluoroadenosine-3'-phosphate
  modified_base 8: mod_base = OTHER; note = 2'-O-methylguanosine-3'-phosphate
  modified_base 9: mod_base = OTHER; note = 2'-fluoroadenosine-3'-phosphate
  modified_base 10: mod_base = OTHER; note = 2'-fluoroadenosine-3'-phosphate
  modified_base 11: mod_base = OTHER; note = 2'-fluoroguanosine-3'-phosphate
  modified_base 12: mod_base = OTHER; note = 2'-O-methyluridine-3'-phosphate
  modified_base 13: mod_base = OTHER; note = 2'-O-methylcytidine-3'-phosphate
  modified_base 14: mod_base = OTHER; note = 2'-O-methyluridine-3'-phosphate
  modified_base 15: mod_base = OTHER; note = 2'-O-methylcytidine-3'-phosphate
  modified_base 16: mod_base = OTHER; note = 2'-O-methylcytidine-3'-phosphate
  modified_base 17: mod_base = OTHER; note = 2'-O-methylcytidine-3'-phosphate
  modified_base 18: mod_base = OTHER; note = 2'-O-methyladenosine-3'-phosphate
  modified_base 19: mod_base = OTHER; note = 2'-O-methyladenosine-3'-phosphorothioate
  modified_base 20: mod_base = OTHER; note = 2'-O-methylguanosine-3'-phosphorothioate
  modified_base 21: mod_base = OTHER; note = 2'-O-methyladenosine-3'-phosphate
aagcccagaagtctcccaaga

SEQ ID NO: 2773 - RNA, 21 nt, synthetic construct
  source 1..21: mol_type = other RNA
  modified_base 1: mod_base = OTHER; note = 2'-O-methylguanosine-3'-phosphorothioate
  modified_base 2: mod_base = OTHER; note = 2'-O-methylguanosine-3'-phosphorothioate
  modified_base 3: mod_base = OTHER; note = 2'-O-methylcytidine-3'-phosphate
  modified_base 4: mod_base = OTHER; note = 2'-O-methylcytidine-3'-phosphate
  modified_base 5: mod_base = OTHER; note = 2'-O-methyladenosine-3'-phosphate
  modified_base 6: mod_base = OTHER; note 1-((2R,3R,4R,5R)-3-(docosyloxy)-4-hydroxy-5-(hydroxymethyl) tetrahydrofuran-2-yl)pyrimidine-2,4(1H,3H)-dione
  modified_base 7: mod_base = OTHER; note = 2'-fluoroguanosine-3'-phosphate
  modified_base 8: mod_base = OTHER; note = 2'-O-methyluridine-3'-phosphate
  modified_base 9: mod_base = OTHER; note = 2'-fluorocytidine-3'-phosphate
  modified_base 10: mod_base = OTHER; note = 2'-fluorocytidine-3'-phosphate
  modified_base 11: mod_base = OTHER; note = 2'-fluorocytidine-3'-phosphate
  modified_base 12: mod_base = OTHER; note = 2'-O-methyluridine-3'-phosphate
  modified_base 13: mod_base = OTHER; note = 2'-O-methyladenosine-3'-phosphate
  modified_base 14: mod_base = OTHER; note = 2'-O-methyluridine-3'-phosphate
  modified_base 15: mod_base = OTHER; note = 2'-O-methylcytidine-3'-phosphate
  modified_base 16: mod_base = OTHER; note = 2'-O-methyladenosine-3'-phosphate
  modified_base 17: mod_base = OTHER; note = 2'-O-methylguanosine-3'-phosphate
  modified_base 18: mod_base = OTHER; note = 2'-O-methyladenosine-3'-phosphate
  modified_base 19: mod_base = OTHER; note = 2'-O-methyluridine-3'-phosphorothioate
  modified_base 20: mod_base = OTHER; note = 2'-O-methylguanosine-3'-phosphorothioate
  modified_base 21: mod_base = OTHER; note = 2'-O-methyladenosine-3'-phosphate
ggccatgtccctatcagatga

SEQ ID NO: 2774 - RNA, 21 nt, synthetic construct
  source 1..21: mol_type = other RNA
  modified_base 1: mod_base = OTHER; note = 2'-O-methylguanosine-3'-phosphorothioate
  modified_base 2: mod_base = OTHER; note = 2'-O-methylcytidine-3'-phosphorothioate
  modified_base 3: mod_base = OTHER; note = 2'-O-methylcytidine-3'-phosphate
  modified_base 4: mod_base = OTHER; note = 2'-O-methylguanosine-3'-phosphate
  modified_base 5: mod_base = OTHER; note = 2'-O-methylguanosine-3'-phosphate
  modified_base 6: mod_base = OTHER; note 4-amino-1-((2R,3R,4R,5R)-3-(docosyloxy)-4-hydroxy-5-(hydrox ymethyl)tetrahydrofuran-2-yl)pyrimidin-2(1H)-one
  modified_base 7: mod_base = OTHER; note = 2'-fluoroguanosine-3'-phosphate
  modified_base 8: mod_base = OTHER; note = 2'-O-methylguanosine-3'-phosphate
  modified_base 9: mod_base = OTHER; note = 2'-fluoroguanosine-3'-phosphate
  modified_base 10: mod_base = OTHER; note = 2'-fluorouridine-3'-phosphate
  modified_base 11: mod_base = OTHER; note = 2'-fluorouridine-3'-phosphate
  modified_base 12: mod_base = OTHER; note = 2'-O-methyluridine-3'-phosphate
  modified_base 13: mod_base = OTHER; note = 2'-O-methylcytidine-3'-phosphate
  modified_base 14: mod_base = OTHER; note = 2'-O-methyluridine-3'-phosphate
  modified_base 15: mod_base = OTHER; note = 2'-O-methylcytidine-3'-phosphate
  modified_base 16: mod_base = OTHER; note = 2'-O-methyluridine-3'-phosphate
  modified_base 17: mod_base = OTHER; note = 2'-O-methyladenosine-3'-phosphate
  modified_base 18: mod_base = OTHER; note = 2'-O-methyladenosine-3'-phosphate
  modified_base 19: mod_base = OTHER; note = 2'-O-methylcytidine-3'-phosphorothioate
  modified_base 20: mod_base = OTHER; note = 2'-O-methyladenosine-3'-phosphorothioate
  modified_base 21: mod_base = OTHER; note = 2'-O-methyladenosine-3'-phosphate
gccggcgggtttctctaacaa

SEQ ID NO: 2775 - RNA, 21 nt, synthetic construct
  source 1..21: mol_type = other RNA
  modified_base 1: mod_base = OTHER; note = 2'-O-methylcytidine-3'-phosphorothioate
  modified_base 2: mod_base = OTHER; note = 2'-O-methyluridine-3'-phosphorothioate
  modified_base 3: mod_base = OTHER; note = 2'-O-methylguanosine-3'-phosphate
  modified_base 4: mod_base = OTHER; note = 2'-O-methyladenosine-3'-phosphate
  modified_base 5: mod_base = OTHER; note = 2'-O-methyladenosine-3'-phosphate
  modified_base 6: mod_base = OTHER; note 2-amino-9-((2R,3S,4S,5R)-3-(docosyloxy)-4-hydroxy-5-(hydrox ymethyl)tetrahydrofuran-2-yl)-1,9-dihydro-6H-purin-6-one
  modified_base 7: mod_base = OTHER; note = 2'-fluoroguanosine-3'-phosphate
  modified_base 8: mod_base = OTHER; note = 2'-O-methyladenosine-3'-phosphate
  modified_base 9: mod_base = OTHER; note = 2'-fluorocytidine-3'-phosphate
  modified_base 10: mod_base = OTHER; note = 2'-fluoroadenosine-3'-phosphate
  modified_base 11: mod_base = OTHER; note = 2'-fluorocytidine-3'-phosphate
  modified_base 12: mod_base = OTHER; note = 2'-O-methylcytidine-3'-phosphate
  modified_base 13: mod_base = OTHER; note = 2'-O-methyladenosine-3'-phosphate
  modified_base 14: mod_base = OTHER; note = 2'-O-methyluridine-3'-phosphate
  modified_base 15: mod_base = OTHER; note = 2'-O-methylcytidine-3'-phosphate
  modified_base 16: mod_base = OTHER; note = 2'-O-methyluridine-3'-phosphate
  modified_base 17: mod_base = OTHER; note = 2'-O-methylcytidine-3'-phosphate
  modified_base 18: mod_base = OTHER; note = 2'-O-methylcytidine-3'-phosphate
  modified_base 19: mod_base = OTHER; note = 2'-O-methyladenosine-3'-phosphorothioate
  modified_base 20: mod_base = OTHER; note = 2'-O-methylcytidine-3'-phosphorothioate
  modified_base 21: mod_base = OTHER; note = 2'-O-methyladenosine-3'-phosphate
ctgaaggacaccatctccaca

SEQ ID NO: 2776 - RNA, 21 nt, synthetic construct
  source 1..21: mol_type = other RNA
  modified_base 1: mod_base = OTHER; note = 2'-O-methylguanosine-3'-phosphorothioate
  modified_base 2: mod_base = OTHER; note = 2'-O-methyladenosine-3'-phosphorothioate
  modified_base 3: mod_base = OTHER; note = 2'-O-methylcytidine-3'-phosphate
  modified_base 4: mod_base = OTHER; note = 2'-O-methylcytidine-3'-phosphate
  modified_base 5: mod_base = OTHER; note = 2'-O-methyladenosine-3'-phosphate
  modified_base 6: mod_base = OTHER; note 4-amino-1-((2R,3R,4R,5R)-3-(docosyloxy)-4-hydroxy-5-(hydrox ymethyl)tetrahydrofuran-2-yl)pyrimidin-2(1H)-one
  modified_base 7: mod_base = OTHER; note = 2'-fluorocytidine-3'-phosphate
  modified_base 8: mod_base = OTHER; note = 2'-O-methyladenosine-3'-phosphate
  modified_base 9: mod_base = OTHER; note = 2'-fluorouridine-3'-phosphate
  modified_base 10: mod_base = OTHER; note = 2'-fluorocytidine-3'-phosphate
  modified_base 11: mod_base = OTHER; note = 2'-fluorouridine-3'-phosphate
  modified_base 12: mod_base = OTHER; note = 2'-O-methylcytidine-3'-phosphate
  modified_base 13: mod_base = OTHER; note = 2'-O-methylguanosine-3'-phosphate
  modified_base 14: mod_base = OTHER; note = 2'-O-methylguanosine-3'-phosphate
  modified_base 15: mod_base = OTHER; note = 2'-O-methylcytidine-3'-phosphate
  modified_base 16: mod_base = OTHER; note = 2'-O-methyluridine-3'-phosphate
  modified_base 17: mod_base = OTHER; note = 2'-O-methylguanosine-3'-phosphate
  modified_base 18: mod_base = OTHER; note = 2'-O-methyluridine-3'-phosphate
  modified_base 19: mod_base = OTHER; note = 2'-O-methylguanosine-3'-phosphorothioate
  modified_base 20: mod_base = OTHER; note = 2'-O-methyladenosine-3'-phosphorothioate
  modified_base 21: mod_base = OTHER; note = 2'-O-methyladenosine-3'-phosphate
gaccaccatctcggctgtgaa

SEQ ID NO: 2777 - RNA, 21 nt, synthetic construct
  source 1..21: mol_type = other RNA
  modified_base 1: mod_base = OTHER; note = 2'-O-methylcytidine-3'-phosphorothioate
  modified_base 2: mod_base = OTHER; note = 2'-O-methylcytidine-3'-phosphorothioate
  modified_base 3: mod_base = OTHER; note = 2'-O-methyladenosine-3'-phosphate
  modified_base 4: mod_base = OTHER; note = 2'-O-methylguanosine-3'-phosphate
  modified_base 5: mod_base = OTHER; note = 2'-O-methyluridine-3'-phosphate
  modified_base 6: mod_base = OTHER; note 1-((2R,3R,4R,5R)-3-(docosyloxy)-4-hydroxy-5-(hydroxymethyl) tetrahydrofuran-2-yl)pyrimidine-2,4(1H,3H)-dione
  modified_base 7: mod_base = OTHER; note = 2'-fluorouridine-3'-phosphate
  modified_base 8: mod_base = OTHER; note = 2'-O-methyluridine-3'-phosphate
  modified_base 9: mod_base = OTHER; note = 2'-fluorouridine-3'-phosphate
  modified_base 10: mod_base = OTHER; note = 2'-fluoroadenosine-3'-phosphate
  modified_base 11: mod_base = OTHER; note = 2'-fluoroadenosine-3'-phosphate
  modified_base 12: mod_base = OTHER; note = 2'-O-methylguanosine-3'-phosphate
  modified_base 13: mod_base = OTHER; note = 2'-O-methylguanosine-3'-phosphate
  modified_base 14: mod_base = OTHER; note = 2'-O-methylguanosine-3'-phosphate
  modified_base 15: mod_base = OTHER; note = 2'-O-methyladenosine-3'-phosphate
  modified_base 16: mod_base = OTHER; note = 2'-O-methylcytidine-3'-phosphate
  modified_base 17: mod_base = OTHER; note = 2'-O-methyladenosine-3'-phosphate
  modified_base 18: mod_base = OTHER; note = 2'-O-methylcytidine-3'-phosphate
  modified_base 19: mod_base = OTHER; note = 2'-O-methylcytidine-3'-phosphorothioate
  modified_base 20: mod_base = OTHER; note = 2'-O-methyladenosine-3'-phosphorothioate
  modified_base 21: mod_base = OTHER; note = 2'-O-methyladenosine-3'-phosphate
ccagtttttaagggacaccaa

SEQ ID NO: 2778 - RNA, 21 nt, synthetic construct
  source 1..21: mol_type = other RNA
  modified_base 1: mod_base = OTHER; note = 2'-O-methylguanosine-3'-phosphorothioate
  modified_base 2: mod_base = OTHER; note = 2'-O-methylguanosine-3'-phosphorothioate
  modified_base 3: mod_base = OTHER; note = 2'-O-methylcytidine-3'-phosphate
  modified_base 4: mod_base = OTHER; note = 2'-O-methylcytidine-3'-phosphate
  modified_base 5: mod_base = OTHER; note = 2'-O-methyladenosine-3'-phosphate
  modified_base 6: mod_base = OTHER; note 2-amino-9-((2R,3S,4S,5R)-3-(docosyloxy)-4-hydroxy-5-(hydrox ymethyl)tetrahydrofuran-2-yl)-1,9-dihydro-6H-purin-6-one
  modified_base 7: mod_base = OTHER; note = 2'-fluoroadenosine-3'-phosphate
  modified_base 8: mod_base = OTHER; note = 2'-O-methylguanosine-3'-phosphate
  modified_base 9: mod_base = OTHER; note = 2'-fluoroadenosine-3'-phosphate
  modified_base 10: mod_base = OTHER; note = 2'-fluorocytidine-3'-phosphate
  modified_base 11: mod_base = OTHER; note = 2'-fluoroadenosine-3'-phosphate
  modified_base 12: mod_base = OTHER; note = 2'-O-methylcytidine-3'-phosphate
  modified_base 13: mod_base = OTHER; note = 2'-O-methyluridine-3'-phosphate
  modified_base 14: mod_base = OTHER; note = 2'-O-methylguanosine-3'-phosphate
  modified_base 15: mod_base = OTHER; note = 2'-O-methylcytidine-3'-phosphate
  modified_base 16: mod_base = OTHER; note = 2'-O-methylguanosine-3'-phosphate
  modified_base 17: mod_base = OTHER; note = 2'-O-methylguanosine-3'-phosphate
  modified_base 18: mod_base = OTHER; note = 2'-O-methyladenosine-3'-phosphate
  modified_base 19: mod_base = OTHER; note = 2'-O-methyladenosine-3'-phosphorothioate
  modified_base 20: mod_base = OTHER; note = 2'-O-methyluridine-3'-phosphorothioate
  modified_base 21: mod_base = OTHER; note = 2'-O-methyladenosine-3'-phosphate
ggccagagacactgcggaata

SEQ ID NO: 2779 - RNA, 21 nt, synthetic construct
  source 1..21: mol_type = other RNA
  modified_base 1: mod_base = OTHER; note = 2'-O-methylcytidine-3'-phosphorothioate
  modified_base 2: mod_base = OTHER; note = 2'-O-methylguanosine-3'-phosphorothioate
  modified_base 3: mod_base = OTHER; note = 2'-O-methyluridine-3'-phosphate
  modified_base 4: mod_base = OTHER; note = 2'-O-methyluridine-3'-phosphate
  modified_base 5: mod_base = OTHER; note = 2'-O-methylcytidine-3'-phosphate
  modified_base 6: mod_base = OTHER; note 4-amino-1-((2R,3R,4R,5R)-3-(docosyloxy)-4-hydroxy-5-(hydrox ymethyl)tetrahydrofuran-2-yl)pyrimidin-2(1H)-one
  modified_base 7: mod_base = OTHER; note = 2'-fluorocytidine-3'-phosphate
  modified_base 8: mod_base = OTHER; note = 2'-O-methyladenosine-3'-phosphate
  modified_base 9: mod_base = OTHER; note = 2'-fluorouridine-3'-phosphate
  modified_base 10: mod_base = OTHER; note = 2'-fluorocytidine-3'-phosphate
  modified_base 11: mod_base = OTHER; note = 2'-fluoroguanosine-3'-phosphate
  modified_base 12: mod_base = OTHER; note = 2'-O-methylcytidine-3'-phosphate
  modified_base 13: mod_base = OTHER; note = 2'-O-methylguanosine-3'-phosphate
  modified_base 14: mod_base = OTHER; note = 2'-O-methyladenosine-3'-phosphate
  modified_base 15: mod_base = OTHER; note = 2'-O-methylguanosine-3'-phosphate
  modified_base 16: mod_base = OTHER; note = 2'-O-methylcytidine-3'-phosphate
  modified_base 17: mod_base = OTHER; note = 2'-O-methyladenosine-3'-phosphate
  modified_base 18: mod_base = OTHER; note = 2'-O-methylcytidine-3'-phosphate
  modified_base 19: mod_base = OTHER; note = 2'-O-methyluridine-3'-phosphorothioate
  modified_base 20: mod_base = OTHER; note = 2'-O-methyluridine-3'-phosphorothioate
  modified_base 21: mod_base = OTHER; note = 2'-O-methyladenosine-3'-phosphate
cgttcccatcgcgagcactta

SEQ ID NO: 2780 - RNA, 21 nt, synthetic construct
  source 1..21: mol_type = other RNA
  modified_base 1: mod_base = OTHER; note = 2'-O-methylcytidine-3'-phosphorothioate
  modified_base 2: mod_base = OTHER; note = 2'-O-methylcytidine-3'-phosphorothioate
  modified_base 3: mod_base = OTHER; note = 2'-O-methylguanosine-3'-phosphate
  modified_base 4: mod_base = OTHER; note = 2'-O-methylguanosine-3'-phosphate
  modified_base 5: mod_base = OTHER; note = 2'-O-methylguanosine-3'-phosphate
  modified_base 6: mod_base = OTHER; note (2R,3S,4S,5R)-5-(6-amino-9H-purin-9-yl)-4-(docosyloxy)-2-(h ydroxymethyl)tetrahydrofuran-3-ol
  modified_base 7: mod_base = OTHER; note = 2'-fluorocytidine-3'-phosphate
  modified_base 8: mod_base = OTHER; note = 2'-O-methyladenosine-3'-phosphate
  modified_base 9: mod_base = OTHER; note = 2'-fluorouridine-3'-phosphate
  modified_base 10: mod_base = OTHER; note = 2'-fluorocytidine-3'-phosphate
  modified_base 11: mod_base = OTHER; note = 2'-fluoroguanosine-3'-phosphate
  modified_base 12: mod_base = OTHER; note = 2'-O-methyladenosine-3'-phosphate
  modified_base 13: mod_base = OTHER; note = 2'-O-methylcytidine-3'-phosphate
  modified_base 14: mod_base = OTHER; note = 2'-O-methyladenosine-3'-phosphate
  modified_base 15: mod_base = OTHER; note = 2'-O-methyladenosine-3'-phosphate
  modified_base 16: mod_base = OTHER; note = 2'-O-methylcytidine-3'-phosphate
  modified_base 17: mod_base = OTHER; note = 2'-O-methylcytidine-3'-phosphate
  modified_base 18: mod_base = OTHER; note = 2'-O-methylcytidine-3'-phosphate
  modified_base 19: mod_base = OTHER; note = 2'-O-methyladenosine-3'-phosphorothioate
  modified_base 20: mod_base = OTHER; note = 2'-O-methylcytidine-3'-phosphorothioate
  modified_base 21: mod_base = OTHER; note = 2'-O-methyladenosine-3'-phosphate
ccgggacatcgacaacccaca

SEQ ID NO: 2781 - RNA, 21 nt, synthetic construct
  source 1..21: mol_type = other RNA
  modified_base 1: mod_base = OTHER; note = 2'-O-methyluridine-3'-phosphorothioate
  modified_base 2: mod_base = OTHER; note = 2'-O-methylcytidine-3'-phosphorothioate
  modified_base 3: mod_base = OTHER; note = 2'-O-methyluridine-3'-phosphate
  modified_base 4: mod_base = OTHER; note = 2'-O-methylguanosine-3'-phosphate
  modified_base 5: mod_base = OTHER; note = 2'-O-methyladenosine-3'-phosphate
  modified_base 6: mod_base = OTHER; note 1-((2R,3R,4R,5R)-3-(docosyloxy)-4-hydroxy-5-(hydroxymethyl) tetrahydrofuran-2-yl)pyrimidine-2,4(1H,3H)-dione
  modified_base 7: mod_base = OTHER; note = 2'-fluoroguanosine-3'-phosphate
  modified_base 8: mod_base = OTHER; note = 2'-O-methyladenosine-3'-phosphate
  modified_base 9: mod_base = OTHER; note = 2'-fluorouridine-3'-phosphate
  modified_base 10: mod_base = OTHER; note = 2'-fluorocytidine-3'-phosphate
  modified_base 11: mod_base = OTHER; note = 2'-fluorouridine-3'-phosphate
  modified_base 12: mod_base = OTHER; note = 2'-O-methyladenosine-3'-phosphate
  modified_base 13: mod_base = OTHER; note = 2'-O-methylguanosine-3'-phosphate
  modified_base 14: mod_base = OTHER; note = 2'-O-methylguanosine-3'-phosphate
  modified_base 15: mod_base = OTHER; note = 2'-O-methylcytidine-3'-phosphate
  modified_base 16: mod_base = OTHER; note = 2'-O-methyluridine-3'-phosphate
  modified_base 17: mod_base = OTHER; note = 2'-O-methylcytidine-3'-phosphate
  modified_base 18: mod_base = OTHER; note = 2'-O-methylcytidine-3'-phosphate
  modified_base 19: mod_base = OTHER; note = 2'-O-methylcytidine-3'-phosphorothioate
  modified_base 20: mod_base = OTHER; note = 2'-O-methyladenosine-3'-phosphorothioate
  modified_base 21: mod_base = OTHER; note = 2'-O-methyladenosine-3'-phosphate
tctgatgatctaggctcccaa

SEQ ID NO: 2782 - RNA, 21 nt, synthetic construct
  source 1..21: mol_type = other RNA
  modified_base 1: mod_base = OTHER; note = 2'-O-methylcytidine-3'-phosphorothioate
  modified_base 2: mod_base = OTHER; note = 2'-O-methyluridine-3'-phosphorothioate
  modified_base 3: mod_base = OTHER; note = 2'-O-methylguanosine-3'-phosphate
  modified_base 4: mod_base = OTHER; note = 2'-O-methylcytidine-3'-phosphate
  modified_base 5: mod_base = OTHER; note = 2'-O-methyladenosine-3'-phosphate
  modified_base 6: mod_base = OTHER; note 2-amino-9-((2R,3S,4S,5R)-3-(docosyloxy)-4-hydroxy-5-(hydrox ymethyl)tetrahydrofuran-2-yl)-1,9-dihydro-6H-purin-6-one
  modified_base 7: mod_base = OTHER; note = 2'-fluoroadenosine-3'-phosphate
  modified_base 8: mod_base = OTHER; note = 2'-O-methyladenosine-3'-phosphate
  modified_base 9: mod_base = OTHER; note = 2'-fluoroguanosine-3'-phosphate
  modified_base 10: mod_base = OTHER; note = 2'-fluoroadenosine-3'-phosphate
  modified_base 11: mod_base = OTHER; note = 2'-fluorocytidine-3'-phosphate
  modified_base 12: mod_base = OTHER; note = 2'-O-methylcytidine-3'-phosphate
  modified_base 13: mod_base = OTHER; note = 2'-O-methylcytidine-3'-phosphate
  modified_base 14: mod_base = OTHER; note = 2'-O-methyluridine-3'-phosphate
  modified_base 15: mod_base = OTHER; note = 2'-O-methylcytidine-3'-phosphate
  modified_base 16: mod_base = OTHER; note = 2'-O-methylcytidine-3'-phosphate
  modified_base 17: mod_base = OTHER; note = 2'-O-methyladenosine-3'-phosphate
  modified_base 18: mod_base = OTHER; note = 2'-O-methylguanosine-3'-phosphate
  modified_base 19: mod_base = OTHER; note = 2'-O-methyladenosine-3'-phosphorothioate
  modified_base 20: mod_base = OTHER; note = 2'-O-methylcytidine-3'-phosphorothioate
  modified_base 21: mod_base = OTHER; note = 2'-O-methyladenosine-3'-phosphate
ctgcagaagaccctccagaca

SEQ ID NO: 2783 - RNA, 21 nt, synthetic construct
  source 1..21: mol_type = other RNA
  modified_base 1: mod_base = OTHER; note = 2'-O-methylcytidine-3'-phosphorothioate
  modified_base 2: mod_base = OTHER; note = 2'-O-methylguanosine-3'-phosphorothioate
  modified_base 3: mod_base = OTHER; note = 2'-O-methylcytidine-3'-phosphate
  modified_base 4: mod_base = OTHER; note = 2'-O-methylcytidine-3'-phosphate
  modified_base 5: mod_base = OTHER; note = 2'-O-methyladenosine-3'-phosphate
  modified_base 6: mod_base = OTHER; note 2-amino-9-((2R,3S,4S,5R)-3-(docosyloxy)-4-hydroxy-5-(hydrox ymethyl)tetrahydrofuran-2-yl)-1,9-dihydro-6H-purin-6-one
  modified_base 7: mod_base = OTHER; note = 2'-fluorouridine-3'-phosphate
  modified_base 8: mod_base = OTHER; note = 2'-O-methyladenosine-3'-phosphate
  modified_base 9: mod_base = OTHER; note = 2'-fluoroguanosine-3'-phosphate
  modified_base 10: mod_base = OTHER; note = 2'-fluorocytidine-3'-phosphate
  modified_base 11: mod_base = OTHER; note = 2'-fluorouridine-3'-phosphate
  modified_base 12: mod_base = OTHER; note = 2'-O-methyluridine-3'-phosphate
  modified_base 13: mod_base = OTHER; note = 2'-O-methylguanosine-3'-phosphate
  modified_base 14: mod_base = OTHER; note = 2'-O-methylguanosine-3'-phosphate
  modified_base 15: mod_base = OTHER; note = 2'-O-methylcytidine-3'-phosphate
  modified_base 16: mod_base = OTHER; note = 2'-O-methyluridine-3'-phosphate
  modified_base 17: mod_base = OTHER; note = 2'-O-methylguanosine-3'-phosphate
  modified_base 18: mod_base = OTHER; note = 2'-O-methylcytidine-3'-phosphate
  modified_base 19: mod_base = OTHER; note = 2'-O-methylcytidine-3'-phosphorothioate
  modified_base 20: mod_base = OTHER; note = 2'-O-methyluridine-3'-phosphorothioate
  modified_base 21: mod_base = OTHER; note = 2'-O-methyladenosine-3'-phosphate
cgccagtagcttggctgccta

SEQ ID NO: 2784 - RNA, 21 nt, synthetic construct
  source 1..21: mol_type = other RNA
  modified_base 1: mod_base = OTHER; note = 2'-O-methylcytidine-3'-phosphorothioate
  modified_base 2: mod_base = OTHER; note = 2'-O-methylguanosine-3'-phosphorothioate
  modified_base 3: mod_base = OTHER; note = 2'-O-methylcytidine-3'-phosphate
  modified_base 4: mod_base = OTHER; note = 2'-O-methyluridine-3'-phosphate
  modified_base 5: mod_base = OTHER; note = 2'-O-methyluridine-3'-phosphate
  modified_base 6: mod_base = OTHER; note 4-amino-1-((2R,3R,4R,5R)-3-(docosyloxy)-4-hydroxy-5-(hydrox ymethyl)tetrahydrofuran-2-yl)pyrimidin-2(1H)-one
  modified_base 7: mod_base = OTHER; note = 2'-fluoroadenosine-3'-phosphate
  modified_base 8: mod_base = OTHER; note = 2'-O-methylcytidine-3'-phosphate
  modified_base 9: mod_base = OTHER; note = 2'-fluoroadenosine-3'-phosphate
  modified_base 10: mod_base = OTHER; note = 2'-fluoroguanosine-3'-phosphate
  modified_base 11: mod_base = OTHER; note = 2'-fluoroguanosine-3'-phosphate
  modified_base 12: mod_base = OTHER; note = 2'-O-methylcytidine-3'-phosphate
  modified_base 13: mod_base = OTHER; note = 2'-O-methyluridine-3'-phosphate
  modified_base 14: mod_base = OTHER; note = 2'-O-methylguanosine-3'-phosphate
  modified_base 15: mod_base = OTHER; note = 2'-O-methyladenosine-3'-phosphate
  modified_base 16: mod_base = OTHER; note = 2'-O-methylguanosine-3'-phosphate
  modified_base 17: mod_base = OTHER; note = 2'-O-methyluridine-3'-phosphate
  modified_base 18: mod_base = OTHER; note = 2'-O-methylcytidine-3'-phosphate
  modified_base 19: mod_base = OTHER; note = 2'-O-methylcytidine-3'-phosphorothioate
  modified_base 20: mod_base = OTHER; note = 2'-O-methyladenosine-3'-phosphorothioate
  modified_base 21: mod_base = OTHER; note = 2'-O-methyladenosine-3'-phosphate
cgcttcacaggctgagtccaa

SEQ ID NO: 2785 - RNA, 21 nt, synthetic construct
  source 1..21: mol_type = other RNA
  modified_base 1: mod_base = OTHER; note = 2'-O-methyluridine-3'-phosphorothioate
  modified_base 2: mod_base = OTHER; note = 2'-O-methyluridine-3'-phosphorothioate
  modified_base 3: mod_base = OTHER; note = 2'-O-methyluridine-3'-phosphate
  modified_base 4: mod_base = OTHER; note = 2'-O-methyluridine-3'-phosphate
  modified_base 5: mod_base = OTHER; note = 2'-O-methyluridine-3'-phosphate
  modified_base 6: mod_base = OTHER; note 1-((2R,3R,4R,5R)-3-(docosyloxy)-4-hydroxy-5-(hydroxymethyl) tetrahydrofuran-2-yl)pyrimidine-2,4(1H,3H)-dione
  modified_base 7: mod_base = OTHER; note = 2'-fluorouridine-3'-phosphate
  modified_base 8: mod_base = OTHER; note = 2'-O-methyladenosine-3'-phosphate
  modified_base 9: mod_base = OTHER; note = 2'-fluoroguanosine-3'-phosphate
  modified_base 10: mod_base = OTHER; note = 2'-fluorocytidine-3'-phosphate
  modified_base 11: mod_base = OTHER; note = 2'-fluoroadenosine-3'-phosphate
  modified_base 12: mod_base = OTHER; note = 2'-O-methyluridine-3'-phosphate
  modified_base 13: mod_base = OTHER; note = 2'-O-methylcytidine-3'-phosphate
  modified_base 14: mod_base = OTHER; note = 2'-O-methylcytidine-3'-phosphate
  modified_base 15: mod_base = OTHER; note = 2'-O-methyluridine-3'-phosphate
  modified_base 16: mod_base = OTHER; note = 2'-O-methyluridine-3'-phosphate
  modified_base 17: mod_base = OTHER; note = 2'-O-methyluridine-3'-phosphate
  modified_base 18: mod_base = OTHER; note = 2'-O-methyluridine-3'-phosphate
  modified_base 19: mod_base = OTHER; note = 2'-O-methylguanosine-3'-phosphorothioate
  modified_base 20: mod_base = OTHER; note = 2'-O-methylguanosine-3'-phosphorothioate
  modified_base 21: mod_base = OTHER; note = 2'-O-methyladenosine-3'-phosphate
tttttttagcatccttttgga

SEQ ID NO: 2786 - RNA, 21 nt, synthetic construct
  source 1..21: mol_type = other RNA
  modified_base 1: mod_base = OTHER; note = 2'-O-methylguanosine-3'-phosphorothioate
  modified_base 2: mod_base = OTHER; note = 2'-O-methyladenosine-3'-phosphorothioate
  modified_base 3: mod_base = OTHER; note = 2'-O-methyladenosine-3'-phosphate
  modified_base 4: mod_base = OTHER; note = 2'-O-methylguanosine-3'-phosphate
  modified_base 5: mod_base = OTHER; note = 2'-O-methylcytidine-3'-phosphate
  modified_base 6: mod_base = OTHER; note 4-amino-1-((2R,3R,4R,5R)-3-(docosyloxy)-4-hydroxy-5-(hydrox ymethyl)tetrahydrofuran-2-yl)pyrimidin-2(1H)-one
  modified_base 7: mod_base = OTHER; note = 2'-fluoroadenosine-3'-phosphate
  modified_base 8: mod_base = OTHER; note = 2'-O-methyladenosine-3'-phosphate
  modified_base 9: mod_base = OTHER; note = 2'-fluoroadenosine-3'-phosphate
  modified_base 10: mod_base = OTHER; note = 2'-fluoroguanosine-3'-phosphate
  modified_base 11: mod_base = OTHER; note = 2'-fluorocytidine-3'-phosphate
  modified_base 12: mod_base = OTHER; note = 2'-O-methylguanosine-3'-phosphate
  modified_base 13: mod_base = OTHER; note = 2'-O-methylcytidine-3'-phosphate
  modified_base 14: mod_base = OTHER; note = 2'-O-methyladenosine-3'-phosphate
  modified_base 15: mod_base = OTHER; note = 2'-O-methylguanosine-3'-phosphate
  modified_base 16: mod_base = OTHER; note = 2'-O-methylguanosine-3'-phosphate
  modified_base 17: mod_base = OTHER; note = 2'-O-methylguanosine-3'-phosphate
  modified_base 18: mod_base = OTHER; note = 2'-O-methyluridine-3'-phosphate
  modified_base 19: mod_base = OTHER; note = 2'-O-methylcytidine-3'-phosphorothioate
  modified_base 20: mod_base = OTHER; note = 2'-O-methyladenosine-3'-phosphorothioate
  modified_base 21: mod_base = OTHER; note = 2'-O-methyladenosine-3'-phosphate
gaagccaaagcgcagggtcaa

SEQ ID NO: 2787 - RNA, 21 nt, synthetic construct
  source 1..21: mol_type = other RNA
  modified_base 1: mod_base = OTHER; note = 2'-O-methylguanosine-3'-phosphorothioate
  modified_base 2: mod_base = OTHER; note = 2'-O-methyladenosine-3'-phosphorothioate
  modified_base 3: mod_base = OTHER; note = 2'-O-methylguanosine-3'-phosphate
  modified_base 4: mod_base = OTHER; note = 2'-O-methylguanosine-3'-phosphate
  modified_base 5: mod_base = OTHER; note = 2'-O-methyladenosine-3'-phosphate
  modified_base 6: mod_base = OTHER; note 2-amino-9-((2R,3S,4S,5R)-3-(docosyloxy)-4-hydroxy-5-(hydrox ymethyl)tetrahydrofuran-2-yl)-1,9-dihydro-6H-purin-6-one
  modified_base 7: mod_base = OTHER; note = 2'-fluoroguanosine-3'-phosphate
  modified_base 8: mod_base = OTHER; note = 2'-O-methyladenosine-3'-phosphate
  modified_base 9: mod_base = OTHER; note = 2'-fluorouridine-3'-phosphate
  modified_base 10: mod_base = OTHER; note = 2'-fluorocytidine-3'-phosphate
  modified_base 11: mod_base = OTHER; note = 2'-fluoroadenosine-3'-phosphate
  modified_base 12: mod_base = OTHER; note = 2'-O-methyluridine-3'-phosphate
  modified_base 13: mod_base = OTHER; note = 2'-O-methylguanosine-3'-phosphate
  modified_base 14: mod_base = OTHER; note = 2'-O-methyladenosine-3'-phosphate
  modified_base 15: mod_base = OTHER; note = 2'-O-methylguanosine-3'-phosphate
  modified_base 16: mod_base = OTHER; note = 2'-O-methylguanosine-3'-phosphate
  modified_base 17: mod_base = OTHER; note = 2'-O-methyladenosine-3'-phosphate
  modified_base 18: mod_base = OTHER; note = 2'-O-methylcytidine-3'-phosphate
  modified_base 19: mod_base = OTHER; note = 2'-O-methylcytidine-3'-phosphorothioate
  modified_base 20: mod_base = OTHER; note = 2'-O-methyladenosine-3'-phosphorothioate
  modified_base 21: mod_base = OTHER; note = 2'-O-methyladenosine-3'-phosphate
gaggaggatcatgaggaccaa

SEQ ID NO: 2788 - RNA, 21 nt, synthetic construct
  source 1..21: mol_type = other RNA
  modified_base 1: mod_base = OTHER; note = 2'-O-methylguanosine-3'-phosphorothioate
  modified_base 2: mod_base = OTHER; note = 2'-O-methylcytidine-3'-phosphorothioate
  modified_base 3: mod_base = OTHER; note = 2'-O-methyladenosine-3'-phosphate
  modified_base 4: mod_base = OTHER; note = 2'-O-methylcytidine-3'-phosphate
  modified_base 5: mod_base = OTHER; note = 2'-O-methylguanosine-3'-phosphate
  modified_base 6: mod_base = OTHER; note 4-amino-1-((2R,3R,4R,5R)-3-(docosyloxy)-4-hydroxy-5-(hydrox ymethyl)tetrahydrofuran-2-yl)pyrimidin-2(1H)-one
  modified_base 7: mod_base = OTHER; note = 2'-fluoroadenosine-3'-phosphate
  modified_base 8: mod_base = OTHER; note = 2'-O-methyluridine-3'-phosphate
  modified_base 9: mod_base = OTHER; note = 2'-fluorouridine-3'-phosphate
  modified_base 10: mod_base = OTHER; note = 2'-fluoroadenosine-3'-phosphate
  modified_base 11: mod_base = OTHER; note = 2'-fluorocytidine-3'-phosphate
  modified_base 12: mod_base = OTHER; note = 2'-O-methyladenosine-3'-phosphate
  modified_base 13: mod_base = OTHER; note = 2'-O-methylguanosine-3'-phosphate
  modified_base 14: mod_base = OTHER; note = 2'-O-methylcytidine-3'-phosphate
  modified_base 15: mod_base = OTHER; note = 2'-O-methylcytidine-3'-phosphate
  modified_base 16: mod_base = OTHER; note = 2'-O-methyladenosine-3'-phosphate
  modified_base 17: mod_base = OTHER; note = 2'-O-methylguanosine-3'-phosphate
  modified_base 18: mod_base = OTHER; note = 2'-O-methylcytidine-3'-phosphate
  modified_base 19: mod_base = OTHER; note = 2'-O-methyluridine-3'-phosphorothioate
  modified_base 20: mod_base = OTHER; note = 2'-O-methylguanosine-3'-phosphorothioate
  modified_base 21: mod_base = OTHER; note = 2'-O-methyladenosine-3'-phosphate
gcacgcattacagccagctga

SEQ ID NO: 2789 - RNA, 21 nt, synthetic construct
  source 1..21: mol_type = other RNA
  modified_base 1: mod_base = OTHER; note = 2'-O-methylcytidine-3'-phosphorothioate
  modified_base 2: mod_base = OTHER; note = 2'-O-methyluridine-3'-phosphorothioate
  modified_base 3: mod_base = OTHER; note = 2'-O-methyluridine-3'-phosphate
  modified_base 4: mod_base = OTHER; note = 2'-O-methylcytidine-3'-phosphate
  modified_base 5: mod_base = OTHER; note = 2'-O-methyladenosine-3'-phosphate
  modified_base 6: mod_base = OTHER; note 1-((2R,3R,4R,5R)-3-(docosyloxy)-4-hydroxy-5-(hydroxymethyl) tetrahydrofuran-2-yl)pyrimidine-2,4(1H,3H)-dione
  modified_base 7: mod_base = OTHER; note = 2'-fluorouridine-3'-phosphate
  modified_base 8: mod_base = OTHER; note = 2'-O-methylguanosine-3'-phosphate
  modified_base 9: mod_base = OTHER; note = 2'-fluoroadenosine-3'-phosphate
  modified_base 10: mod_base = OTHER; note = 2'-fluoroadenosine-3'-phosphate
  modified_base 11: mod_base = OTHER; note = 2'-fluoroadenosine-3'-phosphate
  modified_base 12: mod_base = OTHER; note = 2'-O-methyladenosine-3'-phosphate
  modified_base 13: mod_base = OTHER; note = 2'-O-methylcytidine-3'-phosphate
  modified_base 14: mod_base = OTHER; note = 2'-O-methylcytidine-3'-phosphate
  modified_base 15: mod_base = OTHER; note = 2'-O-methyladenosine-3'-phosphate
  modified_base 16: mod_base = OTHER; note = 2'-O-methylcytidine-3'-phosphate
  modified_base 17: mod_base = OTHER; note = 2'-O-methylcytidine-3'-phosphate
  modified_base 18: mod_base = OTHER; note = 2'-O-methyladenosine-3'-phosphate
  modified_base 19: mod_base = OTHER; note = 2'-O-methylcytidine-3'-phosphorothioate
  modified_base 20: mod_base = OTHER; note = 2'-O-methylguanosine-3'-phosphorothioate
  modified_base 21: mod_base = OTHER; note = 2'-O-methyladenosine-3'-phosphate
cttcattgaaaaccaccacga

SEQ ID NO: 2790 - RNA, 21 nt, synthetic construct
  source 1..21: mol_type = other RNA
  modified_base 1: mod_base = OTHER; note = 2'-O-methyluridine-3'-phosphorothioate
  modified_base 2: mod_base = OTHER; note = 2'-O-methyluridine-3'-phosphorothioate
  modified_base 3: mod_base = OTHER; note = 2'-O-methyluridine-3'-phosphate
  modified_base 4: mod_base = OTHER; note = 2'-O-methyluridine-3'-phosphate
  modified_base 5: mod_base = OTHER; note = 2'-O-methyluridine-3'-phosphate
  modified_base 6: mod_base = OTHER; note 2-amino-9-((2R,3S,4S,5R)-3-(docosyloxy)-4-hydroxy-5-(hydrox ymethyl)tetrahydrofuran-2-yl)-1,9-dihydro-6H-purin-6-one
  modified_base 7: mod_base = OTHER; note = 2'-fluoroadenosine-3'-phosphate
  modified_base 8: mod_base = OTHER; note = 2'-O-methyluridine-3'-phosphate
  modified_base 9: mod_base = OTHER; note = 2'-fluoroguanosine-3'-phosphate
  modified_base 10: mod_base = OTHER; note = 2'-fluoroguanosine-3'-phosphate
  modified_base 11: mod_base = OTHER; note = 2'-fluorocytidine-3'-phosphate
  modified_base 12: mod_base = OTHER; note = 2'-O-methylcytidine-3'-phosphate
  modified_base 13: mod_base = OTHER; note = 2'-O-methyladenosine-3'-phosphate
  modified_base 14: mod_base = OTHER; note = 2'-O-methylcytidine-3'-phosphate
  modified_base 15: mod_base = OTHER; note = 2'-O-methyladenosine-3'-phosphate
  modified_base 16: mod_base = OTHER; note = 2'-O-methyluridine-3'-phosphate
  modified_base 17: mod_base = OTHER; note = 2'-O-methyladenosine-3'-phosphate
  modified_base 18: mod_base = OTHER; note = 2'-O-methyladenosine-3'-phosphate
  modified_base 19: mod_base = OTHER; note = 2'-O-methyluridine-3'-phosphorothioate
  modified_base 20: mod_base = OTHER; note = 2'-O-methyladenosine-3'-phosphorothioate
  modified_base 21: mod_base = OTHER; note = 2'-O-methyladenosine-3'-phosphate
tttttgatggccacataataa

SEQ ID NO: 2791 - RNA, 21 nt, synthetic construct
  source 1..21: mol_type = other RNA
  modified_base 1: mod_base = OTHER; note = 2'-O-methylcytidine-3'-phosphorothioate
  modified_base 2: mod_base = OTHER; note = 2'-O-methylcytidine-3'-phosphorothioate
  modified_base 3: mod_base = OTHER; note = 2'-O-methyladenosine-3'-phosphate
  modified_base 4: mod_base = OTHER; note = 2'-O-methylcytidine-3'-phosphate
  modified_base 5: mod_base = OTHER; note = 2'-O-methylcytidine-3'-phosphate
  modified_base 6: mod_base = OTHER; note 1-((2R,3R,4R,5R)-3-(docosyloxy)-4-hydroxy-5-(hydroxymethyl) tetrahydrofuran-2-yl)pyrimidine-2,4(1H,3H)-dione
  modified_base 7: mod_base = OTHER; note = 2'-fluoroguanosine-3'-phosphate
  modified_base 8: mod_base = OTHER; note = 2'-O-methylguanosine-3'-phosphate
  modified_base 9: mod_base = OTHER; note = 2'-fluoroadenosine-3'-phosphate
  modified_base 10: mod_base = OTHER; note = 2'-fluoroguanosine-3'-phosphate
  modified_base 11: mod_base = OTHER; note = 2'-fluoroguanosine-3'-phosphate
  modified_base 12: mod_base = OTHER; note = 2'-O-methyladenosine-3'-phosphate
  modified_base 13: mod_base = OTHER; note = 2'-O-methyladenosine-3'-phosphate
  modified_base 14: mod_base = OTHER; note = 2'-O-methyladenosine-3'-phosphate
  modified_base 15: mod_base = OTHER; note = 2'-O-methyladenosine-3'-phosphate
  modified_base 16: mod_base = OTHER; note = 2'-O-methylguanosine-3'-phosphate
  modified_base 17: mod_base = OTHER; note = 2'-O-methyladenosine-3'-phosphate
  modified_base 18: mod_base = OTHER; note = 2'-O-methyluridine-3'-phosphate
  modified_base 19: mod_base = OTHER; note = 2'-O-methylcytidine-3'-phosphorothioate
  modified_base 20: mod_base = OTHER; note = 2'-O-methylcytidine-3'-phosphorothioate
  modified_base 21: mod_base = OTHER; note = 2'-O-methyladenosine-3'-phosphate
ccacctggaggaaaagatcca

SEQ ID NO: 2792 - RNA, 21 nt, synthetic construct
  source 1..21: mol_type = other RNA
  modified_base 1: mod_base = OTHER; note = 2'-O-methylcytidine-3'-phosphorothioate
  modified_base 2: mod_base = OTHER; note = 2'-O-methyladenosine-3'-phosphorothioate
  modified_base 3: mod_base = OTHER; note = 2'-O-methyladenosine-3'-phosphate
  modified_base 4: mod_base = OTHER; note = 2'-O-methylguanosine-3'-phosphate
  modified_base 5: mod_base = OTHER; note = 2'-O-methylguanosine-3'-phosphate
  modified_base 6: mod_base = OTHER; note 4-amino-1-((2R,3R,4R,5R)-3-(docosyloxy)-4-hydroxy-5-(hydrox ymethyl)tetrahydrofuran-2-yl)pyrimidin-2(1H)-one
  modified_base 7: mod_base = OTHER; note = 2'-fluorocytidine-3'-phosphate
  modified_base 8: mod_base = OTHER; note = 2'-O-methyladenosine-3'-phosphate
  modified_base 9: mod_base = OTHER; note = 2'-fluoroadenosine-3'-phosphate
  modified_base 10: mod_base = OTHER; note = 2'-fluoroguanosine-3'-phosphate
  modified_base 11: mod_base = OTHER; note = 2'-fluorocytidine-3'-phosphate
  modified_base 12: mod_base = OTHER; note = 2'-O-methylcytidine-3'-phosphate
  modified_base 13: mod_base = OTHER; note = 2'-O-methyladenosine-3'-phosphate
  modified_base 14: mod_base = OTHER; note = 2'-O-methyladenosine-3'-phosphate
  modified_base 15: mod_base = OTHER; note = 2'-O-methylguanosine-3'-phosphate
  modified_base 16: mod_base = OTHER; note = 2'-O-methylcytidine-3'-phosphate
  modified_base 17: mod_base = OTHER; note = 2'-O-methylcytidine-3'-phosphate
  modified_base 18: mod_base = OTHER; note = 2'-O-methyluridine-3'-phosphate
  modified_base 19: mod_base = OTHER; note = 2'-O-methylcytidine-3'-phosphorothioate
  modified_base 20: mod_base = OTHER; note = 2'-O-methyluridine-3'-phosphorothioate
  modified_base 21: mod_base = OTHER; note = 2'-O-methyladenosine-3'-phosphate
caaggccaagccaagcctcta

SEQ ID NO: 2793 - RNA, 21 nt, synthetic construct
  source 1..21: mol_type = other RNA
  modified_base 1: mod_base = OTHER; note = 2'-O-methylguanosine-3'-phosphorothioate
  modified_base 2: mod_base = OTHER; note = 2'-O-methyladenosine-3'-phosphorothioate
  modified_base 3: mod_base = OTHER; note = 2'-O-methylguanosine-3'-phosphate
  modified_base 4: mod_base = OTHER; note = 2'-O-methylguanosine-3'-phosphate
  modified_base 5: mod_base = OTHER; note = 2'-O-methyladenosine-3'-phosphate
  modified_base 6: mod_base = OTHER; note 4-amino-1-((2R,3R,4R,5R)-3-(docosyloxy)-4-hydroxy-5-(hydrox ymethyl)tetrahydrofuran-2-yl)pyrimidin-2(1H)-one
  modified_base 7: mod_base = OTHER; note = 2'-fluorocytidine-3'-phosphate
  modified_base 8: mod_base = OTHER; note = 2'-O-methyladenosine-3'-phosphate
  modified_base 9: mod_base = OTHER; note = 2'-fluoroguanosine-3'-phosphate
  modified_base 10: mod_base = OTHER; note = 2'-fluoroadenosine-3'-phosphate
  modified_base 11: mod_base = OTHER; note = 2'-fluorocytidine-3'-phosphate
  modified_base 12: mod_base = OTHER; note = 2'-O-methyladenosine-3'-phosphate
  modified_base 13: mod_base = OTHER; note = 2'-O-methylguanosine-3'-phosphate
  modified_base 14: mod_base = OTHER; note = 2'-O-methyladenosine-3'-phosphate
  modified_base 15: mod_base = OTHER; note = 2'-O-methylcytidine-3'-phosphate
  modified_base 16: mod_base = OTHER; note = 2'-O-methyladenosine-3'-phosphate
  modified_base 17: mod_base = OTHER; note = 2'-O-methylcytidine-3'-phosphate
  modified_base 18: mod_base = OTHER; note = 2'-O-methylguanosine-3'-phosphate
  modified_base 19: mod_base = OTHER; note = 2'-O-methylguanosine-3'-phosphorothioate
  modified_base 20: mod_base = OTHER; note = 2'-O-methyladenosine-3'-phosphorothioate
  modified_base 21: mod_base = OTHER; note = 2'-O-methyladenosine-3'-phosphate
gaggaccagacagacacggaa

SEQ ID NO: 2794 - RNA, 21 nt, synthetic construct
  source 1..21: mol_type = other RNA
  modified_base 1: mod_base = OTHER; note = 2'-O-methylguanosine-3'-phosphorothioate
  modified_base 2: mod_base = OTHER; note = 2'-O-methyladenosine-3'-phosphorothioate
  modified_base 3: mod_base = OTHER; note = 2'-O-methyluridine-3'-phosphate
  modified_base 4: mod_base = OTHER; note = 2'-O-methylguanosine-3'-phosphate
  modified_base 5: mod_base = OTHER; note = 2'-O-methylcytidine-3'-phosphate
  modified_base 6: mod_base = OTHER; note 4-amino-1-((2R,3R,4R,5R)-3-(docosyloxy)-4-hydroxy-5-(hydrox ymethyl)tetrahydrofuran-2-yl)pyrimidin-2(1H)-one
  modified_base 7: mod_base = OTHER; note = 2'-fluorocytidine-3'-phosphate
  modified_base 8: mod_base = OTHER; note = 2'-O-methyluridine-3'-phosphate
  modified_base 9: mod_base = OTHER; note = 2'-fluoroguanosine-3'-phosphate
  modified_base 10: mod_base = OTHER; note = 2'-fluoroadenosine-3'-phosphate
  modified_base 11: mod_base = OTHER; note = 2'-fluoroadenosine-3'-phosphate
  modified_base 12: mod_base = OTHER; note = 2'-O-methylguanosine-3'-phosphate
  modified_base 13: mod_base = OTHER; note = 2'-O-methylguanosine-3'-phosphate
  modified_base 14: mod_base = OTHER; note = 2'-O-methylguanosine-3'-phosphate
  modified_base 15: mod_base = OTHER; note = 2'-O-methylcytidine-3'-phosphate
  modified_base 16: mod_base = OTHER; note = 2'-O-methylguanosine-3'-phosphate
  modified_base 17: mod_base = OTHER; note = 2'-O-methyluridine-3'-phosphate
  modified_base 18: mod_base = OTHER; note = 2'-O-methyluridine-3'-phosphate
  modified_base 19: mod_base = OTHER; note = 2'-O-methyladenosine-3'-phosphorothioate
  modified_base 20: mod_base = OTHER; note = 2'-O-methylcytidine-3'-phosphorothioate
  modified_base 21: mod_base = OTHER; note = 2'-O-methyladenosine-3'-phosphate
gatgccctgaagggcgttaca

SEQ ID NO: 2795 - RNA, 21 nt, synthetic construct
  source 1..21: mol_type = other RNA
  modified_base 1: mod_base = OTHER; note = 2'-O-methylcytidine-3'-phosphorothioate
  modified_base 2: mod_base = OTHER; note = 2'-O-methylcytidine-3'-phosphorothioate
  modified_base 3: mod_base = OTHER; note = 2'-O-methyladenosine-3'-phosphate
  modified_base 4: mod_base = OTHER; note = 2'-O-methyladenosine-3'-phosphate
  modified_base 5: mod_base = OTHER; note = 2'-O-methylcytidine-3'-phosphate
  modified_base 6: mod_base = OTHER; note (2R,3S,4S,5R)-5-(6-amino-9H-purin-9-yl)-4-(docosyloxy)-2-(h ydroxymethyl)tetrahydrofuran-3-ol
  modified_base 7: mod_base = OTHER; note = 2'-fluorocytidine-3'-phosphate
  modified_base 8: mod_base = OTHER; note = 2'-O-methyluridine-3'-phosphate
  modified_base 9: mod_base = OTHER; note = 2'-fluorocytidine-3'-phosphate
  modified_base 10: mod_base = OTHER; note = 2'-fluoroguanosine-3'-phosphate
  modified_base 11: mod_base = OTHER; note = 2'-fluoroadenosine-3'-phosphate
  modified_base 12: mod_base = OTHER; note = 2'-O-methylguanosine-3'-phosphate
  modified_base 13: mod_base = OTHER; note = 2'-O-methylcytidine-3'-phosphate
  modified_base 14: mod_base = OTHER; note = 2'-O-methyluridine-3'-phosphate
  modified_base 15: mod_base = OTHER; note = 2'-O-methylguanosine-3'-phosphate
  modified_base 16: mod_base = OTHER; note = 2'-O-methylguanosine-3'-phosphate
  modified_base 17: mod_base = OTHER; note = 2'-O-methylcytidine-3'-phosphate
  modified_base 18: mod_base = OTHER; note = 2'-O-methylcytidine-3'-phosphate
  modified_base 19: mod_base = OTHER; note = 2'-O-methylguanosine-3'-phosphorothioate
  modified_base 20: mod_base = OTHER; note = 2'-O-methyladenosine-3'-phosphorothioate
  modified_base 21: mod_base = OTHER; note = 2'-O-methyladenosine-3'-phosphate
ccaacactcgagctggccgaa

SEQ ID NO: 2796 - RNA, 21 nt, synthetic construct
  source 1..21: mol_type = other RNA
  modified_base 1: mod_base = OTHER; note = 2'-O-methylcytidine-3'-phosphorothioate
  modified_base 2: mod_base = OTHER; note = 2'-O-methyladenosine-3'-phosphorothioate
  modified_base 3: mod_base = OTHER; note = 2'-O-methylguanosine-3'-phosphate
  modified_base 4: mod_base = OTHER; note = 2'-O-methylguanosine-3'-phosphate
  modified_base 5: mod_base = OTHER; note = 2'-O-methylguanosine-3'-phosphate
  modified_base 6: mod_base = OTHER; note 4-amino-1-((2R,3R,4R,5R)-3-(docosyloxy)-4-hydroxy-5-(hydrox ymethyl)tetrahydrofuran-2-yl)pyrimidin-2(1H)-one
  modified_base 7: mod_base = OTHER; note = 2'-fluorouridine-3'-phosphate
  modified_base 8: mod_base = OTHER; note = 2'-O-methyladenosine-3'-phosphate
  modified_base 9: mod_base = OTHER; note = 2'-fluorouridine-3'-phosphate
  modified_base 10: mod_base = OTHER; note = 2'-fluoroguanosine-3'-phosphate
  modified_base 11: mod_base = OTHER; note = 2'-fluorocytidine-3'-phosphate
  modified_base 12: mod_base = OTHER; note = 2'-O-methyladenosine-3'-phosphate
  modified_base 13: mod_base = OTHER; note = 2'-O-methylcytidine-3'-phosphate
  modified_base 14: mod_base = OTHER; note = 2'-O-methylcytidine-3'-phosphate
  modified_base 15: mod_base = OTHER; note = 2'-O-methyluridine-3'-phosphate
  modified_base 16: mod_base = OTHER; note = 2'-O-methylguanosine-3'-phosphate
  modified_base 17: mod_base = OTHER; note = 2'-O-methylcytidine-3'-phosphate
  modified_base 18: mod_base = OTHER; note = 2'-O-methyladenosine-3'-phosphate
  modified_base 19: mod_base = OTHER; note = 2'-O-methylguanosine-3'-phosphorothioate
  modified_base 20: mod_base = OTHER; note = 2'-O-methylguanosine-3'-phosphorothioate
  modified_base 21: mod_base = OTHER; note = 2'-O-methyladenosine-3'-phosphate
cagggctatgcacctgcagga

SEQ ID NO: 2797 - RNA, 21 nt, synthetic construct
  source 1..21: mol_type = other RNA
  modified_base 1: mod_base = OTHER; note = 2'-O-methyladenosine-3'-phosphorothioate
  modified_base 2: mod_base = OTHER; note = 2'-O-methyladenosine-3'-phosphorothioate
  modified_base 3: mod_base = OTHER; note = 2'-O-methylguanosine-3'-phosphate
  modified_base 4: mod_base = OTHER; note = 2'-O-methylguanosine-3'-phosphate
  modified_base 5: mod_base = OTHER; note = 2'-O-methyluridine-3'-phosphate
  modified_base 6: mod_base = OTHER; note 2-amino-9-((2R,3S,4S,5R)-3-(docosyloxy)-4-hydroxy-5-(hydrox ymethyl)tetrahydrofuran-2-yl)-1,9-dihydro-6H-purin-6-one
  modified_base 7: mod_base = OTHER; note = 2'-fluoroguanosine-3'-phosphate
  modified_base 8: mod_base = OTHER; note = 2'-O-methyluridine-3'-phosphate
  modified_base 9: mod_base = OTHER; note = 2'-fluoroguanosine-3'-phosphate
  modified_base 10: mod_base = OTHER; note = 2'-fluoroguanosine-3'-phosphate
  modified_base 11: mod_base = OTHER; note = 2'-fluoroadenosine-3'-phosphate
  modified_base 12: mod_base = OTHER; note = 2'-O-methylguanosine-3'-phosphate
  modified_base 13: mod_base = OTHER; note = 2'-O-methyluridine-3'-phosphate
  modified_base 14: mod_base = OTHER; note = 2'-O-methyladenosine-3'-phosphate
  modified_base 15: mod_base = OTHER; note = 2'-O-methylcytidine-3'-phosphate
  modified_base 16: mod_base = OTHER; note = 2'-O-methylcytidine-3'-phosphate
  modified_base 17: mod_base = OTHER; note = 2'-O-methyluridine-3'-phosphate
  modified_base 18: mod_base = OTHER; note = 2'-O-methylcytidine-3'-phosphate
  modified_base 19: mod_base = OTHER; note = 2'-O-methylcytidine-3'-phosphorothioate
  modified_base 20: mod_base = OTHER; note = 2'-O-methyluridine-3'-phosphorothioate
  modified_base 21: mod_base = OTHER; note = 2'-O-methyladenosine-3'-phosphate
aaggtggtggagtacctccta

SEQ ID NO: 2798 - RNA, 21 nt, synthetic construct
  source 1..21: mol_type = other RNA
  modified_base 1: mod_base = OTHER; note = 2'-O-methyluridine-3'-phosphorothioate
  modified_base 2: mod_base = OTHER; note = 2'-O-methyluridine-3'-phosphorothioate
  modified_base 3: mod_base = OTHER; note = 2'-O-methylguanosine-3'-phosphate
  modified_base 4: mod_base = OTHER; note = 2'-O-methyladenosine-3'-phosphate
  modified_base 5: mod_base = OTHER; note = 2'-O-methyladenosine-3'-phosphate
  modified_base 6: mod_base = OTHER; note 2-amino-9-((2R,3S,4S,5R)-3-(docosyloxy)-4-hydroxy-5-(hydrox ymethyl)tetrahydrofuran-2-yl)-1,9-dihydro-6H-purin-6-one
  modified_base 7: mod_base = OTHER; note = 2'-fluorocytidine-3'-phosphate
  modified_base 8: mod_base = OTHER; note = 2'-O-methyluridine-3'-phosphate
  modified_base 9: mod_base = OTHER; note = 2'-fluorouridine-3'-phosphate
  modified_base 10: mod_base = OTHER; note = 2'-fluoroguanosine-3'-phosphate
  modified_base 11: mod_base = OTHER; note = 2'-fluoroadenosine-3'-phosphate
  modified_base 12: mod_base = OTHER; note = 2'-O-methylguanosine-3'-phosphate
  modified_base 13: mod_base = OTHER; note = 2'-O-methylguanosine-3'-phosphate
  modified_base 14: mod_base = OTHER; note = 2'-O-methyladenosine-3'-phosphate
  modified_base 15: mod_base = OTHER; note = 2'-O-methylguanosine-3'-phosphate
  modified_base 16: mod_base = OTHER; note = 2'-O-methylcytidine-3'-phosphate
  modified_base 17: mod_base = OTHER; note = 2'-O-methylguanosine-3'-phosphate
  modified_base 18: mod_base = OTHER; note = 2'-O-methyladenosine-3'-phosphate
  modified_base 19: mod_base = OTHER; note = 2'-O-methylguanosine-3'-phosphorothioate
  modified_base 20: mod_base = OTHER; note = 2'-O-methylguanosine-3'-phosphorothioate
  modified_base 21: mod_base = OTHER; note = 2'-O-methyladenosine-3'-phosphate
ttgaagcttgaggagcgagga

SEQ ID NO: 2799 - RNA, 21 nt, synthetic construct
  source 1..21: mol_type = other RNA
  modified_base 1: mod_base = OTHER; note = 2'-O-methylcytidine-3'-phosphorothioate
  modified_base 2: mod_base = OTHER; note = 2'-O-methylguanosine-3'-phosphorothioate
  modified_base 3: mod_base = OTHER; note = 2'-O-methyluridine-3'-phosphate
  modified_base 4: mod_base = OTHER; note = 2'-O-methylguanosine-3'-phosphate
  modified_base 5: mod_base = OTHER; note = 2'-O-methylguanosine-3'-phosphate
  modified_base 6: mod_base = OTHER; note 4-amino-1-((2R,3R,4R,5R)-3-(docosyloxy)-4-hydroxy-5-(hydrox ymethyl)tetrahydrofuran-2-yl)pyrimidin-2(1H)-one
  modified_base 7: mod_base = OTHER; note = 2'-fluorocytidine-3'-phosphate
  modified_base 8: mod_base = OTHER; note = 2'-O-methyladenosine-3'-phosphate
  modified_base 9: mod_base = OTHER; note = 2'-fluorouridine-3'-phosphate
  modified_base 10: mod_base = OTHER; note = 2'-fluoroguanosine-3'-phosphate
  modified_base 11: mod_base = OTHER; note = 2'-fluorouridine-3'-phosphate
  modified_base 12: mod_base = OTHER; note = 2'-O-methylguanosine-3'-phosphate
  modified_base 13: mod_base = OTHER; note = 2'-O-methylguanosine-3'-phosphate
  modified_base 14: mod_base = OTHER; note = 2'-O-methyladenosine-3'-phosphate
  modified_base 15: mod_base = OTHER; note = 2'-O-methyluridine-3'-phosphate
  modified_base 16: mod_base = OTHER; note = 2'-O-methylcytidine-3'-phosphate
  modified_base 17: mod_base = OTHER; note = 2'-O-methylcytidine-3'-phosphate
  modified_base 18: mod_base = OTHER; note = 2'-O-methylcytidine-3'-phosphate
  modified_base 19: mod_base = OTHER; note = 2'-O-methyladenosine-3'-phosphorothioate
  modified_base 20: mod_base = OTHER; note = 2'-O-methylguanosine-3'-phosphorothioate
  modified_base 21: mod_base = OTHER; note = 2'-O-methyladenosine-3'-phosphate
cgtggccatgtggatcccaga

SEQ ID NO: 2800 - RNA, 21 nt, synthetic construct
  source 1..21: mol_type = other RNA
  modified_base 1: mod_base = OTHER; note = 2'-O-methylcytidine-3'-phosphorothioate
  modified_base 2: mod_base = OTHER; note = 2'-O-methyladenosine-3'-phosphorothioate
  modified_base 3: mod_base = OTHER; note = 2'-O-methylguanosine-3'-phosphate
  modified_base 4: mod_base = OTHER; note = 2'-O-methylcytidine-3'-phosphate
  modified_base 5: mod_base = OTHER; note = 2'-O-methyladenosine-3'-phosphate
  modified_base 6: mod_base = OTHER; note 4-amino-1-((2R,3R,4R,5R)-3-(docosyloxy)-4-hydroxy-5-(hydrox ymethyl)tetrahydrofuran-2-yl)pyrimidin-2(1H)-one
  modified_base 7: mod_base = OTHER; note = 2'-fluorouridine-3'-phosphate
  modified_base 8: mod_base = OTHER; note = 2'-O-methyladenosine-3'-phosphate
  modified_base 9: mod_base = OTHER; note = 2'-fluoroadenosine-3'-phosphate
  modified_base 10: mod_base = OTHER; note = 2'-fluoroguanosine-3'-phosphate
  modified_base 11: mod_base = OTHER; note = 2'-fluoroguanosine-3'-phosphate
  modified_base 12: mod_base = OTHER; note = 2'-O-methyladenosine-3'-phosphate
  modified_base 13: mod_base = OTHER; note = 2'-O-methyladenosine-3'-phosphate
  modified_base 14: mod_base = OTHER; note = 2'-O-methylguanosine-3'-phosphate
  modified_base 15: mod_base = OTHER; note = 2'-O-methylcytidine-3'-phosphate
  modified_base 16: mod_base = OTHER; note = 2'-O-methylcytidine-3'-phosphate
  modified_base 17: mod_base = OTHER; note = 2'-O-methylcytidine-3'-phosphate
  modified_base 18: mod_base = OTHER; note = 2'-O-methyladenosine-3'-phosphate
  modified_base 19: mod_base = OTHER; note = 2'-O-methylcytidine-3'-phosphorothioate
  modified_base 20: mod_base = OTHER; note = 2'-O-methylcytidine-3'-phosphorothioate
  modified_base 21: mod_base = OTHER; note = 2'-O-methyladenosine-3'-phosphate
cagcactaaggaagcccacca

SEQ ID NO: 2801 - RNA, 21 nt, synthetic construct
  source 1..21: mol_type = other RNA
  modified_base 1: mod_base = OTHER; note = 2'-O-methylguanosine-3'-phosphorothioate
  modified_base 2: mod_base = OTHER; note = 2'-O-methyluridine-3'-phosphorothioate
  modified_base 3: mod_base = OTHER; note = 2'-O-methylcytidine-3'-phosphate
  modified_base 4: mod_base = OTHER; note = 2'-O-methylguanosine-3'-phosphate
  modified_base 5: mod_base = OTHER; note = 2'-O-methylcytidine-3'-phosphate
  modified_base 6: mod_base = OTHER; note 1-((2R,3R,4R,5R)-3-(docosyloxy)-4-hydroxy-5-(hydroxymethyl) tetrahydrofuran-2-yl)pyrimidine-2,4(1H,3H)-dione
  modified_base 7: mod_base = OTHER; note = 2'-fluoroguanosine-3'-phosphate
  modified_base 8: mod_base = OTHER; note = 2'-O-methyladenosine-3'-phosphate
  modified_base 9: mod_base = OTHER; note = 2'-fluorouridine-3'-phosphate
  modified_base 10: mod_base = OTHER; note = 2'-fluoroguanosine-3'-phosphate
  modified_base 11: mod_base = OTHER; note = 2'-fluoroguanosine-3'-phosphate
  modified_base 12: mod_base = OTHER; note = 2'-O-methyladenosine-3'-phosphate
  modified_base 13: mod_base = OTHER; note = 2'-O-methylguanosine-3'-phosphate
  modified_base 14: mod_base = OTHER; note = 2'-O-methylcytidine-3'-phosphate
  modified_base 15: mod_base = OTHER; note = 2'-O-methylcytidine-3'-phosphate
  modified_base 16: mod_base = OTHER; note = 2'-O-methylcytidine-3'-phosphate
  modified_base 17: mod_base = OTHER; note = 2'-O-methylguanosine-3'-phosphate
  modified_base 18: mod_base = OTHER; note = 2'-O-methyladenosine-3'-phosphate
  modified_base 19: mod_base = OTHER; note = 2'-O-methylguanosine-3'-phosphorothioate
  modified_base 20: mod_base = OTHER; note = 2'-O-methyladenosine-3'-phosphorothioate
  modified_base 21: mod_base = OTHER; note = 2'-O-methyladenosine-3'-phosphate
gtcgctgatggagcccgagaa

SEQ ID NO: 2802 - RNA, 21 nt, synthetic construct
  source 1..21: mol_type = other RNA
  modified_base 1: mod_base = OTHER; note = 2'-O-methyluridine-3'-phosphorothioate
  modified_base 2: mod_base = OTHER; note = 2'-O-methyluridine-3'-phosphorothioate
  modified_base 3: mod_base = OTHER; note = 2'-O-methylcytidine-3'-phosphate
  modified_base 4: mod_base = OTHER; note = 2'-O-methyluridine-3'-phosphate
  modified_base 5: mod_base = OTHER; note = 2'-O-methyluridine-3'-phosphate
  modified_base 6: mod_base = OTHER; note 4-amino-1-((2R,3R,4R,5R)-3-(docosyloxy)-4-hydroxy-5-(hydrox ymethyl)tetrahydrofuran-2-yl)pyrimidin-2(1H)-one
  modified_base 7: mod_base = OTHER; note = 2'-fluorocytidine-3'-phosphate
  modified_base 8: mod_base = OTHER; note = 2'-O-methylguanosine-3'-phosphate
  modified_base 9: mod_base = OTHER; note = 2'-fluoroguanosine-3'-phosphate
  modified_base 10: mod_base = OTHER; note = 2'-fluorocytidine-3'-phosphate
  modified_base 11: mod_base = OTHER; note = 2'-fluorocytidine-3'-phosphate
  modified_base 12: mod_base = OTHER; note = 2'-O-methylcytidine-3'-phosphate
  modified_base 13: mod_base = OTHER; note = 2'-O-methyladenosine-3'-phosphate
  modified_base 14: mod_base = OTHER; note = 2'-O-methylguanosine-3'-phosphate
  modified_base 15: mod_base = OTHER; note = 2'-O-methylcytidine-3'-phosphate
  modified_base 16: mod_base = OTHER; note = 2'-O-methylguanosine-3'-phosphate
  modified_base 17: mod_base = OTHER; note = 2'-O-methyluridine-3'-phosphate
  modified_base 18: mod_base = OTHER; note = 2'-O-methylcytidine-3'-phosphate
  modified_base 19: mod_base = OTHER; note = 2'-O-methyladenosine-3'-phosphorothioate
  modified_base 20: mod_base = OTHER; note = 2'-O-methyluridine-3'-phosphorothioate
  modified_base 21: mod_base = OTHER; note = 2'-O-methyladenosine-3'-phosphate
ttcttccggcccagcgtcata

SEQ ID NO: 2803 - RNA, 21 nt, synthetic construct
  source 1..21: mol_type = other RNA
  modified_base 1: mod_base = OTHER; note = 2'-O-methylcytidine-3'-phosphorothioate
  modified_base 2: mod_base = OTHER; note = 2'-O-methyluridine-3'-phosphorothioate
  modified_base 3: mod_base = OTHER; note = 2'-O-methylguanosine-3'-phosphate
  modified_base 4: mod_base = OTHER; note = 2'-O-methylcytidine-3'-phosphate
  modified_base 5: mod_base = OTHER; note = 2'-O-methyluridine-3'-phosphate
  modified_base 6: mod_base = OTHER; note 4-amino-1-((2R,3R,4R,5R)-3-(docosyloxy)-4-hydroxy-5-(hydrox ymethyl)tetrahydrofuran-2-yl)pyrimidin-2(1H)-one
  modified_base 7: mod_base = OTHER; note = 2'-fluorocytidine-3'-phosphate
  modified_base 8: mod_base = OTHER; note = 2'-O-methyluridine-3'-phosphate
  modified_base 9: mod_base = OTHER; note = 2'-fluoroguanosine-3'-phosphate
  modified_base 10: mod_base = OTHER; note = 2'-fluoroguanosine-3'-phosphate
  modified_base 11: mod_base = OTHER; note = 2'-fluoroadenosine-3'-phosphate
  modified_base 12: mod_base = OTHER; note = 2'-O-methylcytidine-3'-phosphate
  modified_base 13: mod_base = OTHER; note = 2'-O-methyladenosine-3'-phosphate
  modified_base 14: mod_base = OTHER; note = 2'-O-methylcytidine-3'-phosphate
  modified_base 15: mod_base = OTHER; note = 2'-O-methylcytidine-3'-phosphate
  modified_base 16: mod_base = OTHER; note = 2'-O-methyladenosine-3'-phosphate
  modified_base 17: mod_base = OTHER; note = 2'-O-methylguanosine-3'-phosphate
  modified_base 18: mod_base = OTHER; note = 2'-O-methylcytidine-3'-phosphate
  modified_base 19: mod_base = OTHER; note = 2'-O-methyladenosine-3'-phosphorothioate
  modified_base 20: mod_base = OTHER; note = 2'-O-methyladenosine-3'-phosphorothioate
  modified_base 21: mod_base = OTHER; note = 2'-O-methyladenosine-3'-phosphate
ctgctcctggacaccagcaaa

SEQ ID NO: 2804 - RNA, 21 nt, synthetic construct
  source 1..21: mol_type = other RNA
  modified_base 1: mod_base = OTHER; note = 2'-O-methyluridine-3'-phosphorothioate
  modified_base 2: mod_base = OTHER; note = 2'-O-methyluridine-3'-phosphorothioate
  modified_base 3: mod_base = OTHER; note = 2'-O-methyluridine-3'-phosphate
  modified_base 4: mod_base = OTHER; note = 2'-O-methylcytidine-3'-phosphate
  modified_base 5: mod_base = OTHER; note = 2'-O-methyluridine-3'-phosphate
  modified_base 6: mod_base = OTHER; note 2-amino-9-((2R,3S,4S,5R)-3-(docosyloxy)-4-hydroxy-5-(hydrox ymethyl)tetrahydrofuran-2-yl)-1,9-dihydro-6H-purin-6-one
  modified_base 7: mod_base = OTHER; note = 2'-fluoroadenosine-3'-phosphate
  modified_base 8: mod_base = OTHER; note = 2'-O-methylguanosine-3'-phosphate
  modified_base 9: mod_base = OTHER; note = 2'-fluorouridine-3'-phosphate
  modified_base 10: mod_base = OTHER; note = 2'-fluoroadenosine-3'-phosphate
  modified_base 11: mod_base = OTHER; note = 2'-fluorocytidine-3'-phosphate
  modified_base 12: mod_base = OTHER; note = 2'-O-methylcytidine-3'-phosphate
  modified_base 13: mod_base = OTHER; note = 2'-O-methylcytidine-3'-phosphate
  modified_base 14: mod_base = OTHER; note = 2'-O-methylguanosine-3'-phosphate
  modified_base 15: mod_base = OTHER; note = 2'-O-methylcytidine-3'-phosphate
  modified_base 16: mod_base = OTHER; note = 2'-O-methylcytidine-3'-phosphate
  modified_base 17: mod_base = OTHER; note = 2'-O-methylguanosine-3'-phosphate
  modified_base 18: mod_base = OTHER; note = 2'-O-methylcytidine-3'-phosphate
  modified_base 19: mod_base = OTHER; note = 2'-O-methyluridine-3'-phosphorothioate
  modified_base 20: mod_base = OTHER; note = 2'-O-methyluridine-3'-phosphorothioate
  modified_base 21: mod_base = OTHER; note = 2'-O-methyladenosine-3'-phosphate
tttctgagtacccgccgctta

SEQ ID NO: 2805 - RNA, 21 nt, synthetic construct
  source 1..21: mol_type = other RNA
  modified_base 1: mod_base = OTHER; note = 2'-O-methylcytidine-3'-phosphorothioate
  modified_base 2: mod_base = OTHER; note = 2'-O-methylguanosine-3'-phosphorothioate
  modified_base 3: mod_base = OTHER; note = 2'-O-methylcytidine-3'-phosphate
  modified_base 4: mod_base = OTHER; note = 2'-O-methyladenosine-3'-phosphate
  modified_base 5: mod_base = OTHER; note = 2'-O-methylguanosine-3'-phosphate
  modified_base 6: mod_base = OTHER; note 2-amino-9-((2R,3S,4S,5R)-3-(docosyloxy)-4-hydroxy-5-(hydrox ymethyl)tetrahydrofuran-2-yl)-1,9-dihydro-6H-purin-6-one
  modified_base 7: mod_base = OTHER; note = 2'-fluorocytidine-3'-phosphate
  modified_base 8: mod_base = OTHER; note = 2'-O-methyluridine-3'-phosphate
  modified_base 9: mod_base = OTHER; note = 2'-fluoroguanosine-3'-phosphate
  modified_base 10: mod_base = OTHER; note = 2'-fluorouridine-3'-phosphate
  modified_base 11: mod_base = OTHER; note = 2'-fluorocytidine-3'-phosphate
  modified_base 12: mod_base = OTHER; note = 2'-O-methylcytidine-3'-phosphate
  modified_base 13: mod_base = OTHER; note = 2'-O-methyladenosine-3'-phosphate
  modified_base 14: mod_base = OTHER; note = 2'-O-methylcytidine-3'-phosphate
  modified_base 15: mod_base = OTHER; note = 2'-O-methylcytidine-3'-phosphate
  modified_base 16: mod_base = OTHER; note = 2'-O-methylcytidine-3'-phosphate
  modified_base 17: mod_base = OTHER; note = 2'-O-methyladenosine-3'-phosphate
  modified_base 18: mod_base = OTHER; note = 2'-O-methylguanosine-3'-phosphate
  modified_base 19: mod_base = OTHER; note = 2'-O-methyluridine-3'-phosphorothioate
  modified_base 20: mod_base = OTHER; note = 2'-O-methyluridine-3'-phosphorothioate
  modified_base 21: mod_base = OTHER; note = 2'-O-methyladenosine-3'-phosphate
cgcaggctgtccacccagtta

SEQ ID NO: 2806 - RNA, 21 nt, synthetic construct
  source 1..21: mol_type = other RNA
  modified_base 1: mod_base = OTHER; note = 2'-O-methylguanosine-3'-phosphorothioate
  modified_base 2: mod_base = OTHER; note = 2'-O-methylguanosine-3'-phosphorothioate
  modified_base 3: mod_base = OTHER; note = 2'-O-methylcytidine-3'-phosphate
  modified_base 4: mod_base = OTHER; note = 2'-O-methyluridine-3'-phosphate
  modified_base 5: mod_base = OTHER; note = 2'-O-methylguanosine-3'-phosphate
  modified_base 6: mod_base = OTHER; note 1-((2R,3R,4R,5R)-3-(docosyloxy)-4-hydroxy-5-(hydroxymethyl) tetrahydrofuran-2-yl)pyrimidine-2,4(1H,3H)-dione
  modified_base 7: mod_base = OTHER; note = 2'-fluoroguanosine-3'-phosphate
  modified_base 8: mod_base = OTHER; note = 2'-O-methyladenosine-3'-phosphate
  modified_base 9: mod_base = OTHER; note = 2'-fluorocytidine-3'-phosphate
  modified_base 10: mod_base = OTHER; note = 2'-fluoroadenosine-3'-phosphate
  modified_base 11: mod_base = OTHER; note = 2'-fluorouridine-3'-phosphate
  modified_base 12: mod_base = OTHER; note = 2'-O-methylguanosine-3'-phosphate
  modified_base 13: mod_base = OTHER; note = 2'-O-methylguanosine-3'-phosphate
  modified_base 14: mod_base = OTHER; note = 2'-O-methylguanosine-3'-phosphate
  modified_base 15: mod_base = OTHER; note = 2'-O-methylcytidine-3'-phosphate
  modified_base 16: mod_base = OTHER; note = 2'-O-methyladenosine-3'-phosphate
  modified_base 17: mod_base = OTHER; note = 2'-O-methylcytidine-3'-phosphate
  modified_base 18: mod_base = OTHER; note = 2'-O-methylcytidine-3'-phosphate
  modified_base 19: mod_base = OTHER; note = 2'-O-methyluridine-3'-phosphorothioate
  modified_base 20: mod_base = OTHER; note = 2'-O-methylguanosine-3'-phosphorothioate
  modified_base 21: mod_base = OTHER; note = 2'-O-methyladenosine-3'-phosphate
ggctgtgacatgggcacctga

SEQ ID NO: 2807 - RNA, 21 nt, synthetic construct
  source 1..21: mol_type = other RNA
  modified_base 1: mod_base = OTHER; note = 2'-O-methyluridine-3'-phosphorothioate
  modified_base 2: mod_base = OTHER; note = 2'-O-methylcytidine-3'-phosphorothioate
  modified_base 3: mod_base = OTHER; note = 2'-O-methyladenosine-3'-phosphate
  modified_base 4: mod_base = OTHER; note = 2'-O-methylguanosine-3'-phosphate
  modified_base 5: mod_base = OTHER; note = 2'-O-methyluridine-3'-phosphate
  modified_base 6: mod_base = OTHER; note 2-amino-9-((2R,3S,4S,5R)-3-(docosyloxy)-4-hydroxy-5-(hydrox ymethyl)tetrahydrofuran-2-yl)-1,9-dihydro-6H-purin-6-one
  modified_base 7: mod_base = OTHER; note = 2'-fluoroadenosine-3'-phosphate
  modified_base 8: mod_base = OTHER; note = 2'-O-methylguanosine-3'-phosphate
  modified_base 9: mod_base = OTHER; note = 2'-fluoroguanosine-3'-phosphate
  modified_base 10: mod_base = OTHER; note = 2'-fluorouridine-3'-phosphate
  modified_base 11: mod_base = OTHER; note = 2'-fluoroadenosine-3'-phosphate
  modified_base 12: mod_base = OTHER; note = 2'-O-methylguanosine-3'-phosphate
  modified_base 13: mod_base = OTHER; note = 2'-O-methylcytidine-3'-phosphate
  modified_base 14: mod_base = OTHER; note = 2'-O-methyladenosine-3'-phosphate
  modified_base 15: mod_base = OTHER; note = 2'-O-methylguanosine-3'-phosphate
  modified_base 16: mod_base = OTHER; note = 2'-O-methylcytidine-3'-phosphate
  modified_base 17: mod_base = OTHER; note = 2'-O-methylcytidine-3'-phosphate
  modified_base 18: mod_base = OTHER; note = 2'-O-methylcytidine-3'-phosphate
  modified_base 19: mod_base = OTHER; note = 2'-O-methyluridine-3'-phosphorothioate
  modified_base 20: mod_base = OTHER; note = 2'-O-methylguanosine-3'-phosphorothioate
  modified_base 21: mod_base = OTHER; note = 2'-O-methyladenosine-3'-phosphate
tcagtgaggtagcagccctga

SEQ ID NO: 2808 - RNA, 21 nt, synthetic construct
  source 1..21: mol_type = other RNA
  modified_base 1: mod_base = OTHER; note = 2'-O-methyladenosine-3'-phosphorothioate
  modified_base 2: mod_base = OTHER; note = 2'-O-methylguanosine-3'-phosphorothioate
  modified_base 3: mod_base = OTHER; note = 2'-O-methylcytidine-3'-phosphate
  modified_base 4: mod_base = OTHER; note = 2'-O-methylguanosine-3'-phosphate
  modified_base 5: mod_base = OTHER; note = 2'-O-methyluridine-3'-phosphate
  modified_base 6: mod_base = OTHER; note 4-amino-1-((2R,3R,4R,5R)-3-(docosyloxy)-4-hydroxy-5-(hydrox ymethyl)tetrahydrofuran-2-yl)pyrimidin-2(1H)-one
  modified_base 7: mod_base = OTHER; note = 2'-fluoroadenosine-3'-phosphate
  modified_base 8: mod_base = OTHER; note = 2'-O-methyluridine-3'-phosphate
  modified_base 9: mod_base = OTHER; note = 2'-fluoroguanosine-3'-phosphate
  modified_base 10: mod_base = OTHER; note = 2'-fluoroguanosine-3'-phosphate
  modified_base 11: mod_base = OTHER; note = 2'-fluoroadenosine-3'-phosphate
  modified_base 12: mod_base = OTHER; note = 2'-O-methylguanosine-3'-phosphate
  modified_base 13: mod_base = OTHER; note = 2'-O-methylcytidine-3'-phosphate
  modified_base 14: mod_base = OTHER; note = 2'-O-methylcytidine-3'-phosphate
  modified_base 15: mod_base = OTHER; note = 2'-O-methylcytidine-3'-phosphate
  modified_base 16: mod_base = OTHER; note = 2'-O-methyladenosine-3'-phosphate
  modified_base 17: mod_base = OTHER; note = 2'-O-methyluridine-3'-phosphate
  modified_base 18: mod_base = OTHER; note = 2'-O-methylcytidine-3'-phosphate
  modified_base 19: mod_base = OTHER; note = 2'-O-methylcytidine-3'-phosphorothioate
  modified_base 20: mod_base = OTHER; note = 2'-O-methyluridine-3'-phosphorothioate
  modified_base 21: mod_base = OTHER; note = 2'-O-methyladenosine-3'-phosphate
agcgtcatggagcccatccta

SEQ ID NO: 2809 - RNA, 21 nt, synthetic construct
  source 1..21: mol_type = other RNA
  modified_base 1: mod_base = OTHER; note = 2'-O-methylcytidine-3'-phosphorothioate
  modified_base 2: mod_base = OTHER; note = 2'-O-methyluridine-3'-phosphorothioate
  modified_base 3: mod_base = OTHER; note = 2'-O-methylguanosine-3'-phosphate
  modified_base 4: mod_base = OTHER; note = 2'-O-methylguanosine-3'-phosphate
  modified_base 5: mod_base = OTHER; note = 2'-O-methyladenosine-3'-phosphate
  modified_base 6: mod_base = OTHER; note 1-((2R,3R,4R,5R)-3-(docosyloxy)-4-hydroxy-5-(hydroxymethyl) tetrahydrofuran-2-yl)pyrimidine-2,4(1H,3H)-dione
  modified_base 7: mod_base = OTHER; note = 2'-fluoroguanosine-3'-phosphate
  modified_base 8: mod_base = OTHER; note = 2'-O-methylguanosine-3'-phosphate
  modified_base 9: mod_base = OTHER; note = 2'-fluoroadenosine-3'-phosphate
  modified_base 10: mod_base = OTHER; note = 2'-fluoroguanosine-3'-phosphate
  modified_base 11: mod_base = OTHER; note = 2'-fluoroadenosine-3'-phosphate
  modified_base 12: mod_base = OTHER; note = 2'-O-methylcytidine-3'-phosphate
  modified_base 13: mod_base = OTHER; note = 2'-O-methylcytidine-3'-phosphate
  modified_base 14: mod_base = OTHER; note = 2'-O-methyluridine-3'-phosphate
  modified_base 15: mod_base = OTHER; note = 2'-O-methylcytidine-3'-phosphate
  modified_base 16: mod_base = OTHER; note = 2'-O-methylcytidine-3'-phosphate
  modified_base 17: mod_base = OTHER; note = 2'-O-methylcytidine-3'-phosphate
  modified_base 18: mod_base = OTHER; note = 2'-O-methyluridine-3'-phosphate
  modified_base 19: mod_base = OTHER; note = 2'-O-methylguanosine-3'-phosphorothioate
  modified_base 20: mod_base = OTHER; note = 2'-O-methyladenosine-3'-phosphorothioate
  modified_base 21: mod_base = OTHER; note = 2'-O-methyladenosine-3'-phosphate
ctggatggagacctccctgaa

SEQ ID NO: 2810 - RNA, 21 nt, synthetic construct
  source 1..21: mol_type = other RNA
  modified_base 1: mod_base = OTHER; note = 2'-O-methyluridine-3'-phosphorothioate
  modified_base 2: mod_base = OTHER; note = 2'-O-methylcytidine-3'-phosphorothioate
  modified_base 3: mod_base = OTHER; note = 2'-O-methyladenosine-3'-phosphate
  modified_base 4: mod_base = OTHER; note = 2'-O-methylguanosine-3'-phosphate
  modified_base 5: mod_base = OTHER; note = 2'-O-methylcytidine-3'-phosphate
  modified_base 6: mod_base = OTHER; note 4-amino-1-((2R,3R,4R,5R)-3-(docosyloxy)-4-hydroxy-5-(hydrox ymethyl)tetrahydrofuran-2-yl)pyrimidin-2(1H)-one
  modified_base 7: mod_base = OTHER; note = 2'-fluoroguanosine-3'-phosphate
  modified_base 8: mod_base = OTHER; note = 2'-O-methylguanosine-3'-phosphate
  modified_base 9: mod_base = OTHER; note = 2'-fluoroadenosine-3'-phosphate
  modified_base 10: mod_base = OTHER; note = 2'-fluoroguanosine-3'-phosphate
  modified_base 11: mod_base = OTHER; note = 2'-fluorouridine-3'-phosphate
  modified_base 12: mod_base = OTHER; note = 2'-O-methylguanosine-3'-phosphate
  modified_base 13: mod_base = OTHER; note = 2'-O-methyladenosine-3'-phosphate
  modified_base 14: mod_base = OTHER; note = 2'-O-methylguanosine-3'-phosphate
  modified_base 15: mod_base = OTHER; note = 2'-O-methyluridine-3'-phosphate
  modified_base 16: mod_base = OTHER; note = 2'-O-methylguanosine-3'-phosphate
  modified_base 17: mod_base = OTHER; note = 2'-O-methyluridine-3'-phosphate
  modified_base 18: mod_base = OTHER; note = 2'-O-methyluridine-3'-phosphate
  modified_base 19: mod_base = OTHER; note = 2'-O-methylguanosine-3'-phosphorothioate
  modified_base 20: mod_base = OTHER; note = 2'-O-methylguanosine-3'-phosphorothioate
  modified_base 21: mod_base = OTHER; note = 2'-O-methyladenosine-3'-phosphate
tcagccggagtgagtgttgga

SEQ ID NO: 2811 - RNA, 21 nt, synthetic construct
  source 1..21: mol_type = other RNA
  modified_base 1: mod_base = OTHER; note = 2'-O-methylcytidine-3'-phosphorothioate
  modified_base 2: mod_base = OTHER; note = 2'-O-methyluridine-3'-phosphorothioate
  modified_base 3: mod_base = OTHER; note = 2'-O-methylguanosine-3'-phosphate
  modified_base 4: mod_base = OTHER; note = 2'-O-methylguanosine-3'-phosphate
  modified_base 5: mod_base = OTHER; note = 2'-O-methylcytidine-3'-phosphate
  modified_base 6: mod_base = OTHER; note 4-amino-1-((2R,3R,4R,5R)-3-(docosyloxy)-4-hydroxy-5-(hydrox ymethyl)tetrahydrofuran-2-yl)pyrimidin-2(1H)-one
  modified_base 7: mod_base = OTHER; note = 2'-fluoroguanosine-3'-phosphate
  modified_base 8: mod_base = OTHER; note = 2'-O-methyladenosine-3'-phosphate
  modified_base 9: mod_base = OTHER; note = 2'-fluorocytidine-3'-phosphate
  modified_base 10: mod_base = OTHER; note = 2'-fluorouridine-3'-phosphate
  modified_base 11: mod_base = OTHER; note = 2'-fluoroguanosine-3'-phosphate
  modified_base 12: mod_base = OTHER; note = 2'-O-methylguanosine-3'-phosphate
  modified_base 13: mod_base = OTHER; note = 2'-O-methylcytidine-3'-phosphate
  modified_base 14: mod_base = OTHER; note = 2'-O-methyluridine-3'-phosphate
  modified_base 15: mod_base = OTHER; note = 2'-O-methyluridine-3'-phosphate
  modified_base 16: mod_base = OTHER; note = 2'-O-methylcytidine-3'-phosphate
  modified_base 17: mod_base = OTHER; note = 2'-O-methyluridine-3'-phosphate
  modified_base 18: mod_base = OTHER; note = 2'-O-methylguanosine-3'-phosphate
  modified_base 19: mod_base = OTHER; note = 2'-O-methylguanosine-3'-phosphorothioate
  modified_base 20: mod_base = OTHER; note = 2'-O-methyladenosine-3'-phosphorothioate
  modified_base 21: mod_base = OTHER; note = 2'-O-methyladenosine-3'-phosphate
ctggccgactggcttctggaa

SEQ ID NO: 2812 - RNA, 21 nt, synthetic construct
  source 1..21: mol_type = other RNA
  modified_base 1: mod_base = OTHER; note = 2'-O-methylguanosine-3'-phosphorothioate
  modified_base 2: mod_base = OTHER; note = 2'-O-methylguanosine-3'-phosphorothioate
  modified_base 3: mod_base = OTHER; note = 2'-O-methyluridine-3'-phosphate
  modified_base 4: mod_base = OTHER; note = 2'-O-methylguanosine-3'-phosphate
  modified_base 5: mod_base = OTHER; note = 2'-O-methylcytidine-3'-phosphate
  modified_base 6: mod_base = OTHER; note 1-((2R,3R,4R,5R)-3-(docosyloxy)-4-hydroxy-5-(hydroxymethyl) tetrahydrofuran-2-yl)pyrimidine-2,4(1H,3H)-dione
  modified_base 7: mod_base = OTHER; note = 2'-fluoroguanosine-3'-phosphate
  modified_base 8: mod_base = OTHER; note = 2'-O-methylcytidine-3'-phosphate
  modified_base 9: mod_base = OTHER; note = 2'-fluoroadenosine-3'-phosphate
  modified_base 10: mod_base = OTHER; note = 2'-fluorocytidine-3'-phosphate
  modified_base 11: mod_base = OTHER; note = 2'-fluorocytidine-3'-phosphate
  modified_base 12: mod_base = OTHER; note = 2'-O-methyluridine-3'-phosphate
  modified_base 13: mod_base = OTHER; note = 2'-O-methylcytidine-3'-phosphate
  modified_base 14: mod_base = OTHER; note = 2'-O-methyladenosine-3'-phosphate
  modified_base 15: mod_base = OTHER; note = 2'-O-methylcytidine-3'-phosphate
  modified_base 16: mod_base = OTHER; note = 2'-O-methyladenosine-3'-phosphate
  modified_base 17: mod_base = OTHER; note = 2'-O-methylcytidine-3'-phosphate
  modified_base 18: mod_base = OTHER; note = 2'-O-methylcytidine-3'-phosphate
  modified_base 19: mod_base = OTHER; note = 2'-O-methyladenosine-3'-phosphorothioate
  modified_base 20: mod_base = OTHER; note = 2'-O-methylguanosine-3'-phosphorothioate
  modified_base 21: mod_base = OTHER; note = 2'-O-methyladenosine-3'-phosphate
ggtgctgcacctcacaccaga

SEQ ID NO: 2813 - RNA, 21 nt, synthetic construct
  source 1..21: mol_type = other RNA
  modified_base 1: mod_base = OTHER; note = 2'-O-methylguanosine-3'-phosphorothioate
  modified_base 2: mod_base = OTHER; note = 2'-O-methylguanosine-3'-phosphorothioate
  modified_base 3: mod_base = OTHER; note = 2'-O-methylcytidine-3'-phosphate
  modified_base 4: mod_base = OTHER; note = 2'-O-methyluridine-3'-phosphate
  modified_base 5: mod_base = OTHER; note = 2'-O-methylguanosine-3'-phosphate
  modified_base 6: mod_base = OTHER; note 4-amino-1-((2R,3R,4R,5R)-3-(docosyloxy)-4-hydroxy-5-(hydrox ymethyl)tetrahydrofuran-2-yl)pyrimidin-2(1H)-one
  modified_base 7: mod_base = OTHER; note = 2'-fluorocytidine-3'-phosphate
  modified_base 8: mod_base = OTHER; note = 2'-O-methyluridine-3'-phosphate
  modified_base 9: mod_base = OTHER; note = 2'-fluoroguanosine-3'-phosphate
  modified_base 10: mod_base = OTHER; note = 2'-fluoroguanosine-3'-phosphate
  modified_base 11: mod_base = OTHER; note = 2'-fluoroadenosine-3'-phosphate
  modified_base 12: mod_base = OTHER; note = 2'-O-methylguanosine-3'-phosphate
  modified_base 13: mod_base = OTHER; note = 2'-O-methylcytidine-3'-phosphate
  modified_base 14: mod_base = OTHER; note = 2'-O-methyladenosine-3'-phosphate
  modified_base 15: mod_base = OTHER; note = 2'-O-methyluridine-3'-phosphate
  modified_base 16: mod_base = OTHER; note = 2'-O-methylguanosine-3'-phosphate
  modified_base 17: mod_base = OTHER; note = 2'-O-methylguanosine-3'-phosphate
  modified_base 18: mod_base = OTHER; note = 2'-O-methyladenosine-3'-phosphate
  modified_base 19: mod_base = OTHER; note = 2'-O-methylguanosine-3'-phosphorothioate
  modified_base 20: mod_base = OTHER; note = 2'-O-methylcytidine-3'-phosphorothioate
  modified_base 21: mod_base = OTHER; note = 2'-O-methyladenosine-3'-phosphate
ggctgcctggagcatggagca

SEQ ID NO: 2814 - RNA, 21 nt, synthetic construct
  source 1..21: mol_type = other RNA
  modified_base 1: mod_base = OTHER; note = 2'-O-methylcytidine-3'-phosphorothioate
  modified_base 2: mod_base = OTHER; note = 2'-O-methylcytidine-3'-phosphorothioate
  modified_base 3: mod_base = OTHER; note = 2'-O-methyluridine-3'-phosphate
  modified_base 4: mod_base = OTHER; note = 2'-O-methylguanosine-3'-phosphate
  modified_base 5: mod_base = OTHER; note = 2'-O-methylcytidine-3'-phosphate
  modified_base 6: mod_base = OTHER; note (2R,3S,4S,5R)-5-(6-amino-9H-purin-9-yl)-4-(docosyloxy)-2-(h ydroxymethyl)tetrahydrofuran-3-ol
  modified_base 7: mod_base = OTHER; note = 2'-fluoroguanosine-3'-phosphate
  modified_base 8: mod_base = OTHER; note = 2'-O-methylcytidine-3'-phosphate
  modified_base 9: mod_base = OTHER; note = 2'-fluorouridine-3'-phosphate
  modified_base 10: mod_base = OTHER; note = 2'-fluoroguanosine-3'-phosphate
  modified_base 11: mod_base = OTHER; note = 2'-fluorouridine-3'-phosphate
  modified_base 12: mod_base = OTHER; note = 2'-O-methylguanosine-3'-phosphate
  modified_base 13: mod_base = OTHER; note = 2'-O-methylcytidine-3'-phosphate
  modified_base 14: mod_base = OTHER; note = 2'-O-methyluridine-3'-phosphate
  modified_base 15: mod_base = OTHER; note = 2'-O-methylguanosine-3'-phosphate
  modified_base 16: mod_base = OTHER; note = 2'-O-methylguanosine-3'-phosphate
  modified_base 17: mod_base = OTHER; note = 2'-O-methylguanosine-3'-phosphate
  modified_base 18: mod_base = OTHER; note = 2'-O-methylcytidine-3'-phosphate
  modified_base 19: mod_base = OTHER; note = 2'-O-methyladenosine-3'-phosphorothioate
  modified_base 20: mod_base = OTHER; note = 2'-O-methyluridine-3'-phosphorothioate
  modified_base 21: mod_base = OTHER; note = 2'-O-methyladenosine-3'-phosphate
cctgcagctgtgctgggcata

SEQ ID NO: 2815 - RNA, 21 nt, synthetic construct
  source 1..21: mol_type = other RNA
  modified_base 1: mod_base = OTHER; note = 2'-O-methyladenosine-3'-phosphorothioate
  modified_base 2: mod_base = OTHER; note = 2'-O-methylguanosine-3'-phosphorothioate
  modified_base 3: mod_base = OTHER; note = 2'-O-methyluridine-3'-phosphate
  modified_base 4: mod_base = OTHER; note = 2'-O-methylguanosine-3'-phosphate
  modified_base 5: mod_base = OTHER; note = 2'-O-methylguanosine-3'-phosphate
  modified_base 6: mod_base = OTHER; note 4-amino-1-((2R,3R,4R,5R)-3-(docosyloxy)-4-hydroxy-5-(hydrox ymethyl)tetrahydrofuran-2-yl)pyrimidin-2(1H)-one
  modified_base 7: mod_base = OTHER; note = 2'-fluorocytidine-3'-phosphate
  modified_base 8: mod_base = OTHER; note = 2'-O-methyladenosine-3'-phosphate
  modified_base 9: mod_base = OTHER; note = 2'-fluorouridine-3'-phosphate
  modified_base 10: mod_base = OTHER; note = 2'-fluoroguanosine-3'-phosphate
  modified_base 11: mod_base = OTHER; note = 2'-fluorocytidine-3'-phosphate
  modified_base 12: mod_base = OTHER; note = 2'-O-methyladenosine-3'-phosphate
  modified_base 13: mod_base = OTHER; note = 2'-O-methylguanosine-3'-phosphate
  modified_base 14: mod_base = OTHER; note = 2'-O-methylguanosine-3'-phosphate
  modified_base 15: mod_base = OTHER; note = 2'-O-methylcytidine-3'-phosphate
  modified_base 16: mod_base = OTHER; note = 2'-O-methylguanosine-3'-phosphate
  modified_base 17: mod_base = OTHER; note = 2'-O-methylguanosine-3'-phosphate
  modified_base 18: mod_base = OTHER; note = 2'-O-methyluridine-3'-phosphate
  modified_base 19: mod_base = OTHER; note = 2'-O-methylguanosine-3'-phosphorothioate
  modified_base 20: mod_base = OTHER; note = 2'-O-methyluridine-3'-phosphorothioate
  modified_base 21: mod_base = OTHER; note = 2'-O-methyladenosine-3'-phosphate
agtggccatgcaggcggtgta

SEQ ID NO: 2816 - RNA, 21 nt, synthetic construct
  source 1..21: mol_type = other RNA
  modified_base 1: mod_base = OTHER; note = 2'-O-methylguanosine-3'-phosphorothioate
  modified_base 2: mod_base = OTHER; note = 2'-O-methyladenosine-3'-phosphorothioate
  modified_base 3: mod_base = OTHER; note = 2'-O-methylcytidine-3'-phosphate
  modified_base 4: mod_base = OTHER; note = 2'-O-methyluridine-3'-phosphate
  modified_base 5: mod_base = OTHER; note = 2'-O-methyluridine-3'-phosphate
  modified_base 6: mod_base = OTHER; note 2-amino-9-((2R,3S,4S,5R)-3-(docosyloxy)-4-hydroxy-5-(hydrox ymethyl)tetrahydrofuran-2-yl)-1,9-dihydro-6H-purin-6-one
  modified_base 7: mod_base = OTHER; note = 2'-fluoroguanosine-3'-phosphate
  modified_base 8: mod_base = OTHER; note = 2'-O-methylcytidine-3'-phosphate
  modified_base 9: mod_base = OTHER; note = 2'-fluorocytidine-3'-phosphate
  modified_base 10: mod_base = OTHER; note = 2'-fluorouridine-3'-phosphate
  modified_base 11: mod_base = OTHER; note = 2'-fluorouridine-3'-phosphate
  modified_base 12: mod_base = OTHER; note = 2'-O-methylguanosine-3'-phosphate
  modified_base 13: mod_base = OTHER; note = 2'-O-methylguanosine-3'-phosphate
  modified_base 14: mod_base = OTHER; note = 2'-O-methylguanosine-3'-phosphate
  modified_base 15: mod_base = OTHER; note = 2'-O-methylcytidine-3'-phosphate
  modified_base 16: mod_base = OTHER; note = 2'-O-methyladenosine-3'-phosphate
  modified_base 17: mod_base = OTHER; note = 2'-O-methylguanosine-3'-phosphate
  modified_base 18: mod_base = OTHER; note = 2'-O-methylcytidine-3'-phosphate
  modified_base 19: mod_base = OTHER; note = 2'-O-methyladenosine-3'-phosphorothioate
  modified_base 20: mod_base = OTHER; note = 2'-O-methyluridine-3'-phosphorothioate
  modified_base 21: mod_base = OTHER; note = 2'-O-methyladenosine-3'-phosphate
gacttggccttgggcagcata

SEQ ID NO: 2817 - RNA, 21 nt, synthetic construct
  source 1..21: mol_type = other RNA
  modified_base 1: mod_base = OTHER; note = 2'-O-methylguanosine-3'-phosphorothioate
  modified_base 2: mod_base = OTHER; note = 2'-O-methyladenosine-3'-phosphorothioate
  modified_base 3: mod_base = OTHER; note = 2'-O-methylguanosine-3'-phosphate
  modified_base 4: mod_base = OTHER; note = 2'-O-methylcytidine-3'-phosphate
  modified_base 5: mod_base = OTHER; note = 2'-O-methylguanosine-3'-phosphate
  modified_base 6: mod_base = OTHER; note (2R,3S,4S,5R)-5-(6-amino-9H-purin-9-yl)-4-(docosyloxy)-2-(h ydroxymethyl)tetrahydrofuran-3-ol
  modified_base 7: mod_base = OTHER; note = 2'-fluoroadenosine-3'-phosphate
  modified_base 8: mod_base = OTHER; note = 2'-O-methylguanosine-3'-phosphate
  modified_base 9: mod_base = OTHER; note = 2'-fluorouridine-3'-phosphate
  modified_base 10: mod_base = OTHER; note = 2'-fluoroguanosine-3'-phosphate
  modified_base 11: mod_base = OTHER; note = 2'-fluorocytidine-3'-phosphate
  modified_base 12: mod_base = OTHER; note = 2'-O-methylguanosine-3'-phosphate
  modified_base 13: mod_base = OTHER; note = 2'-O-methylguanosine-3'-phosphate
  modified_base 14: mod_base = OTHER; note = 2'-O-methylguanosine-3'-phosphate
  modified_base 15: mod_base = OTHER; note = 2'-O-methyluridine-3'-phosphate
  modified_base 16: mod_base = OTHER; note = 2'-O-methyladenosine-3'-phosphate
  modified_base 17: mod_base = OTHER; note = 2'-O-methylcytidine-3'-phosphate
  modified_base 18: mod_base = OTHER; note = 2'-O-methylcytidine-3'-phosphate
  modified_base 19: mod_base = OTHER; note = 2'-O-methylcytidine-3'-phosphorothioate
  modified_base 20: mod_base = OTHER; note = 2'-O-methyluridine-3'-phosphorothioate
  modified_base 21: mod_base = OTHER; note = 2'-O-methyladenosine-3'-phosphate
gagcgaagtgcgggtacccta

SEQ ID NO: 2818 - RNA, 21 nt, synthetic construct
  source 1..21: mol_type = other RNA
  modified_base 1: mod_base = OTHER; note = 2'-O-methylcytidine-3'-phosphorothioate
  modified_base 2: mod_base = OTHER; note = 2'-O-methyluridine-3'-phosphorothioate
  modified_base 3: mod_base = OTHER; note = 2'-O-methylguanosine-3'-phosphate
  modified_base 4: mod_base = OTHER; note = 2'-O-methylguanosine-3'-phosphate
  modified_base 5: mod_base = OTHER; note = 2'-O-methyluridine-3'-phosphate
  modified_base 6: mod_base = OTHER; note 2-amino-9-((2R,3S,4S,5R)-3-(docosyloxy)-4-hydroxy-5-(hydrox ymethyl)tetrahydrofuran-2-yl)-1,9-dihydro-6H-purin-6-one
  modified_base 7: mod_base = OTHER; note = 2'-fluoroguanosine-3'-phosphate
  modified_base 8: mod_base = OTHER; note = 2'-O-methylcytidine-3'-phosphate
  modified_base 9: mod_base = OTHER; note = 2'-fluorocytidine-3'-phosphate
  modified_base 10: mod_base = OTHER; note = 2'-fluorouridine-3'-phosphate
  modified_base 11: mod_base = OTHER; note = 2'-fluorocytidine-3'-phosphate
  modified_base 12: mod_base = OTHER; note = 2'-O-methyluridine-3'-phosphate
  modified_base 13: mod_base = OTHER; note = 2'-O-methylguanosine-3'-phosphate
  modified_base 14: mod_base = OTHER; note = 2'-O-methyluridine-3'-phosphate
  modified_base 15: mod_base = OTHER; note = 2'-O-methylguanosine-3'-phosphate
  modified_base 16: mod_base = OTHER; note = 2'-O-methyluridine-3'-phosphate
  modified_base 17: mod_base = OTHER; note = 2'-O-methylguanosine-3'-phosphate
  modified_base 18: mod_base = OTHER; note = 2'-O-methylcytidine-3'-phosphate
  modified_base 19: mod_base = OTHER; note = 2'-O-methyladenosine-3'-phosphorothioate
  modified_base 20: mod_base = OTHER; note = 2'-O-methyladenosine-3'-phosphorothioate
  modified_base 21: mod_base = OTHER; note = 2'-O-methyladenosine-3'-phosphate
ctggtggcctctgtgtgcaaa

SEQ ID NO: 2819 - RNA, 21 nt, synthetic construct
  source 1..21: mol_type = other RNA
  modified_base 1: mod_base = OTHER; note = 2'-O-methyladenosine-3'-phosphorothioate
  modified_base 2: mod_base = OTHER; note = 2'-O-methyladenosine-3'-phosphorothioate
  modified_base 3: mod_base = OTHER; note = 2'-O-methylcytidine-3'-phosphate
  modified_base 4: mod_base = OTHER; note = 2'-O-methylcytidine-3'-phosphate
  modified_base 5: mod_base = OTHER; note = 2'-O-methylcytidine-3'-phosphate
  modified_base 6: mod_base = OTHER; note (2R,3S,4S,5R)-5-(6-amino-9H-purin-9-yl)-4-(docosyloxy)-2-(h ydroxymethyl)tetrahydrofuran-3-ol
  modified_base 7: mod_base = OTHER; note = 2'-fluorocytidine-3'-phosphate
  modified_base 8: mod_base = OTHER; note = 2'-O-methylcytidine-3'-phosphate
  modified_base 9: mod_base = OTHER; note = 2'-fluoroadenosine-3'-phosphate
  modified_base 10: mod_base = OTHER; note = 2'-fluoroguanosine-3'-phosphate
  modified_base 11: mod_base = OTHER; note = 2'-fluorocytidine-3'-phosphate
  modified_base 12: mod_base = OTHER; note = 2'-O-methylcytidine-3'-phosphate
  modified_base 13: mod_base = OTHER; note = 2'-O-methylguanosine-3'-phosphate
  modified_base 14: mod_base = OTHER; note = 2'-O-methyladenosine-3'-phosphate
  modified_base 15: mod_base = OTHER; note = 2'-O-methylguanosine-3'-phosphate
  modified_base 16: mod_base = OTHER; note = 2'-O-methylguanosine-3'-phosphate
  modified_base 17: mod_base = OTHER; note = 2'-O-methyluridine-3'-phosphate
  modified_base 18: mod_base = OTHER; note = 2'-O-methylcytidine-3'-phosphate
  modified_base 19: mod_base = OTHER; note = 2'-O-methylguanosine-3'-phosphorothioate
  modified_base 20: mod_base = OTHER; note = 2'-O-methyladenosine-3'-phosphorothioate
  modified_base 21: mod_base = OTHER; note = 2'-O-methyladenosine-3'-phosphate
aacccaccagccgaggtcgaa

SEQ ID NO: 2820 - RNA, 21 nt, synthetic construct
  source 1..21: mol_type = other RNA
  modified_base 1: mod_base = OTHER; note = 2'-O-methyluridine-3'-phosphorothioate
  modified_base 2: mod_base = OTHER; note = 2'-O-methylguanosine-3'-phosphorothioate
  modified_base 3: mod_base = OTHER; note = 2'-O-methyladenosine-3'-phosphate
  modified_base 4: mod_base = OTHER; note = 2'-O-methyluridine-3'-phosphate
  modified_base 5: mod_base = OTHER; note = 2'-O-methylguanosine-3'-phosphate
  modified_base 6: mod_base = OTHER; note 4-amino-1-((2R,3R,4R,5R)-3-(docosyloxy)-4-hydroxy-5-(hydrox ymethyl)tetrahydrofuran-2-yl)pyrimidin-2(1H)-one
  modified_base 7: mod_base = OTHER; note = 2'-fluorouridine-3'-phosphate
  modified_base 8: mod_base = OTHER; note = 2'-O-methylguanosine-3'-phosphate
  modified_base 9: mod_base = OTHER; note = 2'-fluorocytidine-3'-phosphate
  modified_base 10: mod_base = OTHER; note = 2'-fluorocytidine-3'-phosphate
  modified_base 11: mod_base = OTHER; note = 2'-fluoroadenosine-3'-phosphate
  modified_base 12: mod_base = OTHER; note = 2'-O-methyladenosine-3'-phosphate
  modified_base 13: mod_base = OTHER; note = 2'-O-methylguanosine-3'-phosphate
  modified_base 14: mod_base = OTHER; note = 2'-O-methylguanosine-3'-phosphate
  modified_base 15: mod_base = OTHER; note = 2'-O-methylcytidine-3'-phosphate
  modified_base 16: mod_base = OTHER; note = 2'-O-methylguanosine-3'-phosphate
  modified_base 17: mod_base = OTHER; note = 2'-O-methylcytidine-3'-phosphate
  modified_base 18: mod_base = OTHER; note = 2'-O-methyladenosine-3'-phosphate
  modified_base 19: mod_base = OTHER; note = 2'-O-methylcytidine-3'-phosphorothioate
  modified_base 20: mod_base = OTHER; note = 2'-O-methyluridine-3'-phosphorothioate
  modified_base 21: mod_base = OTHER; note = 2'-O-methyladenosine-3'-phosphate
tgatgctgccaaggcgcacta

SEQ ID NO: 2821 - RNA, 21 nt, synthetic construct
  source 1..21: mol_type = other RNA
  modified_base 1: mod_base = OTHER; note = 2'-O-methylcytidine-3'-phosphorothioate
  modified_base 2: mod_base = OTHER; note = 2'-O-methylcytidine-3'-phosphorothioate
  modified_base 3: mod_base = OTHER; note = 2'-O-methyladenosine-3'-phosphate
  modified_base 4: mod_base = OTHER; note = 2'-O-methyladenosine-3'-phosphate
  modified_base 5: mod_base = OTHER; note = 2'-O-methyluridine-3'-phosphate
  modified_base 6: mod_base = OTHER; note 2-amino-9-((2R,3S,4S,5R)-3-(docosyloxy)-4-hydroxy-5-(hydrox ymethyl)tetrahydrofuran-2-yl)-1,9-dihydro-6H-purin-6-one
  modified_base 7: mod_base = OTHER; note = 2'-fluoroadenosine-3'-phosphate
  modified_base 8: mod_base = OTHER; note = 2'-O-methylguanosine-3'-phosphate
  modified_base 9: mod_base = OTHER; note = 2'-fluorocytidine-3'-phosphate
  modified_base 10: mod_base = OTHER; note = 2'-fluorouridine-3'-phosphate
  modified_base 11: mod_base = OTHER; note = 2'-fluoroguanosine-3'-phosphate
  modified_base 12: mod_base = OTHER; note = 2'-O-methylguanosine-3'-phosphate
  modified_base 13: mod_base = OTHER; note = 2'-O-methylcytidine-3'-phosphate
  modified_base 14: mod_base = OTHER; note = 2'-O-methylcytidine-3'-phosphate
  modified_base 15: mod_base = OTHER; note = 2'-O-methyluridine-3'-phosphate
  modified_base 16: mod_base = OTHER; note = 2'-O-methylguanosine-3'-phosphate
  modified_base 17: mod_base = OTHER; note = 2'-O-methylcytidine-3'-phosphate
  modified_base 18: mod_base = OTHER; note = 2'-O-methylcytidine-3'-phosphate
  modified_base 19: mod_base = OTHER; note = 2'-O-methylguanosine-3'-phosphorothioate
  modified_base 20: mod_base = OTHER; note = 2'-O-methyladenosine-3'-phosphorothioate
  modified_base 21: mod_base = OTHER; note = 2'-O-methyladenosine-3'-phosphate
ccaatgagctggcctgccgaa

SEQ ID NO: 2822 - RNA, 21 nt, synthetic construct
  source 1..21: mol_type = other RNA
  modified_base 1: mod_base = OTHER; note = 2'-O-methylguanosine-3'-phosphorothioate
  modified_base 2: mod_base = OTHER; note = 2'-O-methyluridine-3'-phosphorothioate
  modified_base 3: mod_base = OTHER; note = 2'-O-methylguanosine-3'-phosphate
  modified_base 4: mod_base = OTHER; note = 2'-O-methylcytidine-3'-phosphate
  modified_base 5: mod_base = OTHER; note = 2'-O-methyluridine-3'-phosphate
  modified_base 6: mod_base = OTHER; note 2-amino-9-((2R,3S,4S,5R)-3-(docosyloxy)-4-hydroxy-5-(hydrox ymethyl)tetrahydrofuran-2-yl)-1,9-dihydro-6H-purin-6-one
  modified_base 7: mod_base = OTHER; note = 2'-fluorocytidine-3'-phosphate
  modified_base 8: mod_base = OTHER; note = 2'-O-methyladenosine-3'-phosphate
  modified_base 9: mod_base = OTHER; note = 2'-fluoroguanosine-3'-phosphate
  modified_base 10: mod_base = OTHER; note = 2'-fluorocytidine-3'-phosphate
  modified_base 11: mod_base = OTHER; note = 2'-fluoroguanosine-3'-phosphate
  modified_base 12: mod_base = OTHER; note = 2'-O-methylguanosine-3'-phosphate
  modified_base 13: mod_base = OTHER; note = 2'-O-methylguanosine-3'-phosphate
  modified_base 14: mod_base = OTHER; note = 2'-O-methyluridine-3'-phosphate
  modified_base 15: mod_base = OTHER; note = 2'-O-methylcytidine-3'-phosphate
  modified_base 16: mod_base = OTHER; note = 2'-O-methylcytidine-3'-phosphate
  modified_base 17: mod_base = OTHER; note = 2'-O-methyluridine-3'-phosphate
  modified_base 18: mod_base = OTHER; note = 2'-O-methylguanosine-3'-phosphate
  modified_base 19: mod_base = OTHER; note = 2'-O-methylcytidine-3'-phosphorothioate
  modified_base 20: mod_base = OTHER; note = 2'-O-methyladenosine-3'-phosphorothioate
  modified_base 21: mod_base = OTHER; note = 2'-O-methyladenosine-3'-phosphate
gtgctgcagcgggtcctgcaa

SEQ ID NO: 2823 - RNA, 21 nt, synthetic construct
  source 1..21: mol_type = other RNA
  modified_base 1: mod_base = OTHER; note = 2'-O-methylguanosine-3'-phosphorothioate
  modified_base 2: mod_base = OTHER; note = 2'-O-methylguanosine-3'-phosphorothioate
  modified_base 3: mod_base = OTHER; note = 2'-O-methylguanosine-3'-phosphate
  modified_base 4: mod_base = OTHER; note = 2'-O-methylcytidine-3'-phosphate
  modified_base 5: mod_base = OTHER; note = 2'-O-methylguanosine-3'-phosphate
  modified_base 6: mod_base = OTHER; note 1-((2R,3R,4R,5R)-3-(docosyloxy)-4-hydroxy-5-(hydroxymethyl) tetrahydrofuran-2-yl)pyrimidine-2,4(1H,3H)-dione
  modified_base 7: mod_base = OTHER; note = 2'-fluoroguanosine-3'-phosphate
  modified_base 8: mod_base = OTHER; note = 2'-O-methylcytidine-3'-phosphate
  modified_base 9: mod_base = OTHER; note = 2'-fluoroadenosine-3'-phosphate
  modified_base 10: mod_base = OTHER; note = 2'-fluoroguanosine-3'-phosphate
  modified_base 11: mod_base = OTHER; note = 2'-fluoroadenosine-3'-phosphate
  modified_base 12: mod_base = OTHER; note = 2'-O-methylguanosine-3'-phosphate
  modified_base 13: mod_base = OTHER; note = 2'-O-methylcytidine-3'-phosphate
  modified_base 14: mod_base = OTHER; note = 2'-O-methylguanosine-3'-phosphate
  modified_base 15: mod_base = OTHER; note = 2'-O-methylcytidine-3'-phosphate
  modified_base 16: mod_base = OTHER; note = 2'-O-methylcytidine-3'-phosphate
  modified_base 17: mod_base = OTHER; note = 2'-O-methyladenosine-3'-phosphate
  modified_base 18: mod_base = OTHER; note = 2'-O-methylguanosine-3'-phosphate
  modified_base 19: mod_base = OTHER; note = 2'-O-methyluridine-3'-phosphorothioate
  modified_base 20: mod_base = OTHER; note = 2'-O-methyladenosine-3'-phosphorothioate
  modified_base 21: mod_base = OTHER; note = 2'-O-methyladenosine-3'-phosphate
gggcgtgcagagcgccagtaa

SEQ ID NO: 2824 - RNA, 21 nt, synthetic construct
  source 1..21: mol_type = other RNA
  modified_base 1: mod_base = OTHER; note = 2'-O-methylguanosine-3'-phosphorothioate
  modified_base 2: mod_base = OTHER; note = 2'-O-methylguanosine-3'-phosphorothioate
  modified_base 3: mod_base = OTHER; note = 2'-O-methyluridine-3'-phosphate
  modified_base 4: mod_base = OTHER; note = 2'-O-methylguanosine-3'-phosphate
  modified_base 5: mod_base = OTHER; note = 2'-O-methyladenosine-3'-phosphate
  modified_base 6: mod_base = OTHER; note 2-amino-9-((2R,3S,4S,5R)-3-(docosyloxy)-4-hydroxy-5-(hydrox ymethyl)tetrahydrofuran-2-yl)-1,9-dihydro-6H-purin-6-one
  modified_base 7: mod_base = OTHER; note = 2'-fluorouridine-3'-phosphate
  modified_base 8: mod_base = OTHER; note = 2'-O-methylguanosine-3'-phosphate
  modified_base 9: mod_base = OTHER; note = 2'-fluoroguanosine-3'-phosphate
  modified_base 10: mod_base = OTHER; note = 2'-fluorocytidine-3'-phosphate
  modified_base 11: mod_base = OTHER; note = 2'-fluoroadenosine-3'-phosphate
  modified_base 12: mod_base = OTHER; note = 2'-O-methylcytidine-3'-phosphate
  modified_base 13: mod_base = OTHER; note = 2'-O-methylcytidine-3'-phosphate
  modified_base 14: mod_base = OTHER; note = 2'-O-methyluridine-3'-phosphate
  modified_base 15: mod_base = OTHER; note = 2'-O-methylguanosine-3'-phosphate
  modified_base 16: mod_base = OTHER; note = 2'-O-methylcytidine-3'-phosphate
  modified_base 17: mod_base = OTHER; note = 2'-O-methylguanosine-3'-phosphate
  modified_base 18: mod_base = OTHER; note = 2'-O-methyladenosine-3'-phosphate
  modified_base 19: mod_base = OTHER; note = 2'-O-methyladenosine-3'-phosphorothioate
  modified_base 20: mod_base = OTHER; note = 2'-O-methyluridine-3'-phosphorothioate
  modified_base 21: mod_base = OTHER; note = 2'-O-methyladenosine-3'-phosphate
ggtgagtggcacctgcgaata

SEQ ID NO: 2825 - RNA, 21 nt, synthetic construct
  source 1..21: mol_type = other RNA
  modified_base 1: mod_base = OTHER; note = 2'-O-methyladenosine-3'-phosphorothioate
  modified_base 2: mod_base = OTHER; note = 2'-O-methylcytidine-3'-phosphorothioate
  modified_base 3: mod_base = OTHER; note = 2'-O-methylguanosine-3'-phosphate
  modified_base 4: mod_base = OTHER; note = 2'-O-methylguanosine-3'-phosphate
  modified_base 5: mod_base = OTHER; note = 2'-O-methyladenosine-3'-phosphate
  modified_base 6: mod_base = OTHER; note 2-amino-9-((2R,3S,4S,5R)-3-(docosyloxy)-4-hydroxy-5-(hydrox ymethyl)tetrahydrofuran-2-yl)-1,9-dihydro-6H-purin-6-one
  modified_base 7: mod_base = OTHER; note = 2'-fluoroguanosine-3'-phosphate
  modified_base 8: mod_base = OTHER; note = 2'-O-methylguanosine-3'-phosphate
  modified_base 9: mod_base = OTHER; note = 2'-fluoroadenosine-3'-phosphate
  modified_base 10: mod_base = OTHER; note = 2'-fluoroguanosine-3'-phosphate
  modified_base 11: mod_base = OTHER; note = 2'-fluoroadenosine-3'-phosphate
  modified_base 12: mod_base = OTHER; note = 2'-O-methylguanosine-3'-phosphate
  modified_base 13: mod_base = OTHER; note = 2'-O-methylguanosine-3'-phosphate
  modified_base 14: mod_base = OTHER; note = 2'-O-methyladenosine-3'-phosphate
  modified_base 15: mod_base = OTHER; note = 2'-O-methylcytidine-3'-phosphate
  modified_base 16: mod_base = OTHER; note = 2'-O-methyladenosine-3'-phosphate
  modified_base 17: mod_base = OTHER; note = 2'-O-methylcytidine-3'-phosphate
  modified_base 18: mod_base = OTHER; note = 2'-O-methylguanosine-3'-phosphate
  modified_base 19: mod_base = OTHER; note = 2'-O-methylguanosine-3'-phosphorothioate
  modified_base 20: mod_base = OTHER; note = 2'-O-methyladenosine-3'-phosphorothioate
  modified_base 21: mod_base = OTHER; note = 2'-O-methyladenosine-3'-phosphate
acggagggagaggacacggaa

SEQ ID NO: 2826 - RNA, 23 nt, synthetic construct
  source 1..23: mol_type = other RNA
  modified_base 1: mod_base = OTHER; note = Vinyl-phosphonate 2'-O-methyluridine-3'-phosphorothioate
  modified_base 2: mod_base = OTHER; note = 2'-fluorocytidine-3'-phosphorothioate
  modified_base 3: mod_base = OTHER; note = 2'-O-methyladenosine-3'-phosphate
  modified_base 4: mod_base = OTHER; note = 2'-O-methyladenosine-3'-phosphate
  modified_base 5: mod_base = OTHER; note = 2'-O-methylguanosine-3'-phosphate
  modified_base 6: mod_base = OTHER; note = 2'-fluorouridine-3'-phosphate
  modified_base 7: mod_base = OTHER; note = 2'-O-methyluridine-3'-phosphate
  modified_base 8: mod_base = OTHER; note = 2'-fluorouridine-3'-phosphate
  modified_base 9: mod_base = OTHER; note = 2'-fluoroguanosine-3'-phosphate
  modified_base 10: mod_base = OTHER; note = 2'-O-methylguanosine-3'-phosphate
  modified_base 11: mod_base = OTHER; note = 2'-O-methyluridine-3'-phosphate
  modified_base 12: mod_base = OTHER; note = 2'-O-methyluridine-3'-phosphate
  modified_base 13: mod_base = OTHER; note = 2'-O-methyladenosine-3'-phosphate
  modified_base 14: mod_base = OTHER; note = 2'-fluoroadenosine-3'-phosphate
  modified_base 15: mod_base = OTHER; note = 2'-O-methyladenosine-3'-phosphate
  modified_base 16: mod_base = OTHER; note = 2'-fluoroguanosine-3'-phosphate
  modified_base 17: mod_base = OTHER; note = 2'-O-methyladenosine-3'-phosphate
  modified_base 18: mod_base = OTHER; note = 2'-O-methylguanosine-3'-phosphate
  modified_base 19: mod_base = OTHER; note = 2'-O-methyladenosine-3'-phosphate
  modified_base 20: mod_base = OTHER; note = 2'-O-methyluridine-3'-phosphate
  modified_base 21: mod_base = OTHER; note = 2'-O-methylguanosine-3'-phosphorothioate
  modified_base 22: mod_base = OTHER; note = 2'-O-methyladenosine-3'-phosphorothioate
  modified_base 23: mod_base = OTHER; note = 2'-O-methyladenosine-3'-phosphate
tcaagtttggttaaagagatgaa

SEQ ID NO: 2827 - RNA, 23 nt, synthetic construct
  source 1..23: mol_type = other RNA
  modified_base 1: mod_base = OTHER; note = Vinyl-phosphonate 2'-O-methyluridine-3'-phosphorothioate
  modified_base 2: mod_base = OTHER; note = 2'-fluoroguanosine-3'-phosphorothioate
  modified_base 3: mod_base = OTHER; note = 2'-O-methyluridine-3'-phosphate
  modified_base 4: mod_base = OTHER; note = 2'-O-methyluridine-3'-phosphate
  modified_base 5: mod_base = OTHER; note = 2'-O-methylcytidine-3'-phosphate
  modified_base 6: mod_base = OTHER; note = 2'-fluorouridine-3'-phosphate
  modified_base 7: mod_base = OTHER; note = 2'-O-methylguanosine-3'-phosphate
  modified_base 8: mod_base = OTHER; note = 2'-fluorouridine-3'-phosphate
  modified_base 9: mod_base = OTHER; note = 2'-fluorouridine-3'-phosphate
  modified_base 10: mod_base = OTHER; note = 2'-O-methyluridine-3'-phosphate
  modified_base 11: mod_base = OTHER; note = 2'-O-methyladenosine-3'-phosphate
  modified_base 12: mod_base = OTHER; note = 2'-O-methyluridine-3'-phosphate
  modified_base 13: mod_base = OTHER; note = 2'-O-methyluridine-3'-phosphate
  modified_base 14: mod_base = OTHER; note = 2'-fluorouridine-3'-phosphate
  modified_base 15: mod_base = OTHER; note = 2'-O-methylguanosine-3'-phosphate
  modified_base 16: mod_base = OTHER; note = 2'-fluorouridine-3'-phosphate
  modified_base 17: mod_base = OTHER; note = 2'-O-methyluridine-3'-phosphate
  modified_base 18: mod_base = OTHER; note = 2'-O-methyladenosine-3'-phosphate
  modified_base 19: mod_base = OTHER; note = 2'-O-methylguanosine-3'-phosphate
  modified_base 20: mod_base = OTHER; note = 2'-O-methyladenosine-3'-phosphate
  modified_base 21: mod_base = OTHER; note = 2'-O-methylguanosine-3'-phosphorothioate
  modified_base 22: mod_base = OTHER; note = 2'-O-methyladenosine-3'-phosphorothioate
  modified_base 23: mod_base = OTHER; note = 2'-O-methyladenosine-3'-phosphate
tgttctgtttatttgttagagaa

SEQ ID NO: 2828 - RNA, 23 nt, synthetic construct
  source 1..23: mol_type = other RNA
  modified_base 1: mod_base = OTHER; note = Vinyl-phosphonate 2'-O-methyluridine-3'-phosphorothioate
  modified_base 2: mod_base = OTHER; note = 2'-fluoroadenosine-3'-phosphorothioate
  modified_base 3: mod_base = OTHER; note = 2'-O-methyluridine-3'-phosphate
  modified_base 4: mod_base = OTHER; note = 2'-O-methylcytidine-3'-phosphate
  modified_base 5: mod_base = OTHER; note = 2'-O-methyladenosine-3'-phosphate
  modified_base 6: mod_base = OTHER; note = 2'-fluoroadenosine-3'-phosphate
  modified_base 7: mod_base = OTHER; note = 2'-O-methyladenosine-3'-phosphate
  modified_base 8: mod_base = OTHER; note = 2'-fluoroadenosine-3'-phosphate
  modified_base 9: mod_base = OTHER; note = 2'-fluoroguanosine-3'-phosphate
  modified_base 10: mod_base = OTHER; note = 2'-O-methyladenosine-3'-phosphate
  modified_base 11: mod_base = OTHER; note = 2'-O-methylguanosine-3'-phosphate
  modified_base 12: mod_base = OTHER; note = 2'-O-methyluridine-3'-phosphate
  modified_base 13: mod_base = OTHER; note = 2'-O-methylguanosine-3'-phosphate
  modified_base 14: mod_base = OTHER; note = 2'-fluoroadenosine-3'-phosphate
  modified_base 15: mod_base = OTHER; note = 2'-O-methylcytidine-3'-phosphate
  modified_base 16: mod_base = OTHER; note = 2'-fluorouridine-3'-phosphate
  modified_base 17: mod_base = OTHER; note = 2'-O-methyladenosine-3'-phosphate
  modified_base 18: mod_base = OTHER; note = 2'-O-methyluridine-3'-phosphate
  modified_base 19: mod_base = OTHER; note = 2'-O-methylguanosine-3'-phosphate
  modified_base 20: mod_base = OTHER; note = 2'-O-methylcytidine-3'-phosphate
  modified_base 21: mod_base = OTHER; note = 2'-O-methyladenosine-3'-phosphorothioate
  modified_base 22: mod_base = OTHER; note = 2'-O-methylguanosine-3'-phosphorothioate
  modified_base 23: mod_base = OTHER; note = 2'-O-methylguanosine-3'-phosphate
tatcaaaagagtgactatgcagg

SEQ ID NO: 2829 - RNA, 23 nt, synthetic construct
  source 1..23: mol_type = other RNA
  modified_base 1: mod_base = OTHER; note = Vinyl-phosphonate 2'-O-methyluridine-3'-phosphorothioate
  modified_base 2: mod_base = OTHER; note = 2'-fluoroadenosine-3'-phosphorothioate
  modified_base 3: mod_base = OTHER; note = 2'-O-methyladenosine-3'-phosphate
  modified_base 4: mod_base = OTHER; note = 2'-O-methylguanosine-3'-phosphate
  modified_base 5: mod_base = OTHER; note = 2'-O-methyladenosine-3'-phosphate
  modified_base 6: mod_base = OTHER; note = 2'-fluoroguanosine-3'-phosphate
  modified_base 7: mod_base = OTHER; note = 2'-O-methyladenosine-3'-phosphate
  modified_base 8: mod_base = OTHER; note = 2'-fluorouridine-3'-phosphate
  modified_base 9: mod_base = OTHER; note = 2'-fluoroguanosine-3'-phosphate
  modified_base 10: mod_base = OTHER; note = 2'-O-methyladenosine-3'-phosphate
  modified_base 11: mod_base = OTHER; note = 2'-O-methyladenosine-3'-phosphate
  modified_base 12: mod_base = OTHER; note = 2'-O-methyladenosine-3'-phosphate
  modified_base 13: mod_base = OTHER; note = 2'-O-methyladenosine-3'-phosphate
  modified_base 14: mod_base = OTHER; note = 2'-fluoroadenosine-3'-phosphate
  modified_base 15: mod_base = OTHER; note = 2'-O-methyluridine-3'-phosphate
  modified_base 16: mod_base = OTHER; note = 2'-fluorocytidine-3'-phosphate
  modified_base 17: mod_base = OTHER; note = 2'-O-methyladenosine-3'-phosphate
  modified_base 18: mod_base = OTHER; note = 2'-O-methyladenosine-3'-phosphate
  modified_base 19: mod_base = OTHER; note = 2'-O-methylguanosine-3'-phosphate
  modified_base 20: mod_base = OTHER; note = 2'-O-methyluridine-3'-phosphate
  modified_base 21: mod_base = OTHER; note = 2'-O-methyluridine-3'-phosphorothioate
  modified_base 22: mod_base = OTHER; note = 2'-O-methyladenosine-3'-phosphorothioate
  modified_base 23: mod_base = OTHER; note = 2'-O-methylguanosine-3'-phosphate
taagagatgaaaaatcaagttag

SEQ ID NO: 2830 - RNA, 23 nt, synthetic construct
  source 1..23: mol_type = other RNA
  modified_base 1: mod_base = OTHER; note = Vinyl-phosphonate 2'-O-methyluridine-3'-phosphorothioate
  modified_base 2: mod_base = OTHER; note = 2'-fluorouridine -3'-phosphorothioate
  modified_base 3: mod_base = OTHER; note = 2'-O-methyluridine-3'-phosphate
  modified_base 4: mod_base = OTHER; note = 2'-O-methylcytidine-3'-phosphate
  modified_base 5: mod_base = OTHER; note = 2'-O-methyladenosine-3'-phosphate
  modified_base 6: mod_base = OTHER; note = 2'-fluoroguanosine-3'-phosphate
  modified_base 7: mod_base = OTHER; note = 2'-O-methyluridine-3'-phosphate
  modified_base 8: mod_base = OTHER; note = 2'-fluoroguanosine-3'-phosphate
  modified_base 9: mod_base = OTHER; note = 2'-fluorocytidine-3'-phosphate
  modified_base 10: mod_base = OTHER; note = 2'-O-methyluridine-3'-phosphate
  modified_base 11: mod_base = OTHER; note = 2'-O-methyladenosine-3'-phosphate
  modified_base 12: mod_base = OTHER; note = 2'-O-methyladenosine-3'-phosphate
  modified_base 13: mod_base = OTHER; note = 2'-O-methylguanosine-3'-phosphate
  modified_base 14: mod_base = OTHER; note = 2'-fluoroadenosine-3'-phosphate
  modified_base 15: mod_base = OTHER; note = 2'-O-methyladenosine-3'-phosphate
  modified_base 16: mod_base = OTHER; note = 2'-fluorouridine-3'-phosphate
  modified_base 17: mod_base = OTHER; note = 2'-O-methylguanosine-3'-phosphate
  modified_base 18: mod_base = OTHER; note = 2'-O-methyluridine-3'-phosphate
  modified_base 19: mod_base = OTHER; note = 2'-O-methylguanosine-3'-phosphate
  modified_base 20: mod_base = OTHER; note = 2'-O-methyluridine-3'-phosphate
  modified_base 21: mod_base = OTHER; note = 2'-O-methylcytidine-3'-phosphorothioate
  modified_base 22: mod_base = OTHER; note = 2'-O-methyladenosine-3'-phosphorothioate
  modified_base 23: mod_base = OTHER; note = 2'-O-methyladenosine-3'-phosphate
tttcagtgctaagaatgtgtcaa

SEQ ID NO: 2831 - RNA, 23 nt, synthetic construct
  source 1..23: mol_type = other RNA
  modified_base 1: mod_base = OTHER; note = Vinyl-phosphonate 2'-O-methyluridine-3'-phosphorothioate
  modified_base 2: mod_base = OTHER; note = 2'-fluoroadenosine-3'-phosphorothioate
  modified_base 3: mod_base = OTHER; note = 2'-O-methylguanosine-3'-phosphate
  modified_base 4: mod_base = OTHER; note = 2'-O-methyluridine-3'-phosphate
  modified_base 5: mod_base = OTHER; note = 2'-O-methyluridine-3'-phosphate
  modified_base 6: mod_base = OTHER; note = 2'-fluoroadenosine-3'-phosphate
  modified_base 7: mod_base = OTHER; note = 2'-O-methyladenosine-3'-phosphate
  modified_base 8: mod_base = OTHER; note = 2'-fluoroadenosine-3'-phosphate
  modified_base 9: mod_base = OTHER; note = 2'-fluorouridine-3'-phosphate
  modified_base 10: mod_base = OTHER; note = 2'-O-methylcytidine-3'-phosphate
  modified_base 11: mod_base = OTHER; note = 2'-O-methyladenosine-3'-phosphate
  modified_base 12: mod_base = OTHER; note = 2'-O-methyladenosine-3'-phosphate
  modified_base 13: mod_base = OTHER; note = 2'-O-methyladenosine-3'-phosphate
  modified_base 14: mod_base = OTHER; note = 2'-fluorouridine-3'-phosphate
  modified_base 15: mod_base = OTHER; note = 2'-O-methyladenosine-3'-phosphate
  modified_base 16: mod_base = OTHER; note = 2'-fluoroadenosine-3'-phosphate
  modified_base 17: mod_base = OTHER; note = 2'-O-methylguanosine-3'-phosphate
  modified_base 18: mod_base = OTHER; note = 2'-O-methylguanosine-3'-phosphate
  modified_base 19: mod_base = OTHER; note = 2'-O-methylcytidine-3'-phosphate
  modified_base 20: mod_base = OTHER; note = 2'-O-methylguanosine-3'-phosphate
  modified_base 21: mod_base = OTHER; note = 2'-O-methyluridine-3'-phosphorothioate
  modified_base 22: mod_base = OTHER; note = 2'-O-methyladenosine-3'-phosphorothioate
  modified_base 23: mod_base = OTHER; note = 2'-O-methyluridine-3'-phosphate
tagttaaatcaaataaggcgtat

SEQ ID NO: 2832 - RNA, 23 nt, synthetic construct
  source 1..23: mol_type = other RNA
  modified_base 1: mod_base = OTHER; note = Vinyl-phosphonate 2'-O-methyluridine-3'-phosphorothioate
  modified_base 2: mod_base = OTHER; note = 2'-fluorouridine -3'-phosphorothioate
  modified_base 3: mod_base = OTHER; note = 2'-O-methyladenosine-3'-phosphate
  modified_base 4: mod_base = OTHER; note = 2'-O-methyluridine-3'-phosphate
  modified_base 5: mod_base = OTHER; note = 2'-O-methyluridine-3'-phosphate
  modified_base 6: mod_base = OTHER; note = 2'-fluoroadenosine-3'-phosphate
  modified_base 7: mod_base = OTHER; note = 2'-O-methyladenosine-3'-phosphate
  modified_base 8: mod_base = OTHER; note = 2'-fluorocytidine-3'-phosphate
  modified_base 9: mod_base = OTHER; note = 2'-fluoroadenosine-3'-phosphate
  modified_base 10: mod_base = OTHER; note = 2'-O-methyluridine-3'-phosphate
  modified_base 11: mod_base = OTHER; note = 2'-O-methyluridine-3'-phosphate
  modified_base 12: mod_base = OTHER; note = 2'-O-methyluridine-3'-phosphate
  modified_base 13: mod_base = OTHER; note = 2'-O-methylcytidine-3'-phosphate
  modified_base 14: mod_base = OTHER; note = 2'-fluoroguanosine-3'-phosphate
  modified_base 15: mod_base = OTHER; note = 2'-O-methyladenosine-3'-phosphate
  modified_base 16: mod_base = OTHER; note = 2'-fluoroadenosine-3'-phosphate
  modified_base 17: mod_base = OTHER; note = 2'-O-methylguanosine-3'-phosphate
  modified_base 18: mod_base = OTHER; note = 2'-O-methyladenosine-3'-phosphate
  modified_base 19: mod_base = OTHER; note = 2'-O-methylcytidine-3'-phosphate
  modified_base 20: mod_base = OTHER; note = 2'-O-methyluridine-3'-phosphate
  modified_base 21: mod_base = OTHER; note = 2'-O-methyladenosine-3'-phosphorothioate
  modified_base 22: mod_base = OTHER; note = 2'-O-methylguanosine-3'-phosphorothioate
  modified_base 23: mod_base = OTHER; note = 2'-O-methylguanosine-3'-phosphate
ttattaacatttcgaagactagg

SEQ ID NO: 2833 - RNA, 23 nt, synthetic construct
  source 1..23: mol_type = other RNA
  modified_base 1: mod_base = OTHER; note = Vinyl-phosphonate 2'-O-methyluridine-3'-phosphorothioate
  modified_base 2: mod_base = OTHER; note = 2'-fluoroadenosine-3'-phosphorothioate
  modified_base 3: mod_base = OTHER; note = 2'-O-methyladenosine-3'-phosphate
  modified_base 4: mod_base = OTHER; note = 2'-O-methyladenosine-3'-phosphate
  modified_base 5: mod_base = OTHER; note = 2'-O-methylcytidine-3'-phosphate
  modified_base 6: mod_base = OTHER; note = 2'-fluoroadenosine-3'-phosphate
  modified_base 7: mod_base = OTHER; note = 2'-O-methyladenosine-3'-phosphate
  modified_base 8: mod_base = OTHER; note = 2'-fluorocytidine-3'-phosphate
  modified_base 9: mod_base = OTHER; note = 2'-fluorouridine-3'-phosphate
  modified_base 10: mod_base = OTHER; note = 2'-O-methyluridine-3'-phosphate
  modified_base 11: mod_base = OTHER; note = 2'-O-methyladenosine-3'-phosphate
  modified_base 12: mod_base = OTHER; note = 2'-O-methyladenosine-3'-phosphate
  modified_base 13: mod_base = OTHER; note = 2'-O-methyladenosine-3'-phosphate
  modified_base 14: mod_base = OTHER; note = 2'-fluoroadenosine-3'-phosphate
  modified_base 15: mod_base = OTHER; note = 2'-O-methylguanosine-3'-phosphate
  modified_base 16: mod_base = OTHER; note = 2'-fluorouridine-3'-phosphate
  modified_base 17: mod_base = OTHER; note = 2'-O-methylcytidine-3'-phosphate
  modified_base 18: mod_base = OTHER; note = 2'-O-methylcytidine-3'-phosphate
  modified_base 19: mod_base = OTHER; note = 2'-O-methyladenosine-3'-phosphate
  modified_base 20: mod_base = OTHER; note = 2'-O-methyluridine-3'-phosphate
  modified_base 21: mod_base = OTHER; note = 2'-O-methylcytidine-3'-phosphorothioate
  modified_base 22: mod_base = OTHER; note = 2'-O-methyladenosine-3'-phosphorothioate
  modified_base 23: mod_base = OTHER; note = 2'-O-methyluridine-3'-phosphate
taaacaacttaaaagtccatcat

SEQ ID NO: 2834 - RNA, 23 nt, synthetic construct
  source 1..23: mol_type = other RNA
  modified_base 1: mod_base = OTHER; note = Vinyl-phosphonate 2'-O-methyluridine-3'-phosphorothioate
  modified_base 2: mod_base = OTHER; note = 2'-fluoroadenosine-3'-phosphorothioate
  modified_base 3: mod_base = OTHER; note = 2'-O-methyluridine-3'-phosphate
  modified_base 4: mod_base = OTHER; note = 2'-O-methyluridine-3'-phosphate
  modified_base 5: mod_base = OTHER; note = 2'-O-methyladenosine-3'-phosphate
  modified_base 6: mod_base = OTHER; note = 2'-fluorouridine-3'-phosphate
  modified_base 7: mod_base = OTHER; note = 2'-O-methyluridine-3'-phosphate
  modified_base 8: mod_base = OTHER; note = 2'-fluoroadenosine-3'-phosphate
  modified_base 9: mod_base = OTHER; note = 2'-fluoroadenosine-3'-phosphate
  modified_base 10: mod_base = OTHER; note = 2'-O-methylguanosine-3'-phosphate
  modified_base 11: mod_base = OTHER; note = 2'-O-methyluridine-3'-phosphate
  modified_base 12: mod_base = OTHER; note = 2'-O-methylguanosine-3'-phosphate
  modified_base 13: mod_base = OTHER; note = 2'-O-methyladenosine-3'-phosphate
  modified_base 14: mod_base = OTHER; note = 2'-fluoroadenosine-3'-phosphate
  modified_base 15: mod_base = OTHER; note = 2'-O-methyladenosine-3'-phosphate
  modified_base 16: mod_base = OTHER; note = 2'-fluoroadenosine-3'-phosphate
  modified_base 17: mod_base = OTHER; note = 2'-O-methyladenosine-3'-phosphate
  modified_base 18: mod_base = OTHER; note = 2'-O-methyladenosine-3'-phosphate
  modified_base 19: mod_base = OTHER; note = 2'-O-methylguanosine-3'-phosphate
  modified_base 20: mod_base = OTHER; note = 2'-O-methylcytidine-3'-phosphate
  modified_base 21: mod_base = OTHER; note = 2'-O-methyladenosine-3'-phosphorothioate
  modified_base 22: mod_base = OTHER; note = 2'-O-methylguanosine-3'-phosphorothioate
  modified_base 23: mod_base = OTHER; note = 2'-O-methylguanosine-3'-phosphate
tattattaagtgaaaaaagcagg

SEQ ID NO: 2835 - RNA, 23 nt, synthetic construct
  source 1..23: mol_type = other RNA
  modified_base 1: mod_base = OTHER; note = Vinyl-phosphonate 2'-O-methyluridine-3'-phosphorothioate
  modified_base 2: mod_base = OTHER; note = 2'-fluorouridine -3'-phosphorothioate
  modified_base 3: mod_base = OTHER; note = 2'-O-methyluridine-3'-phosphate
  modified_base 4: mod_base = OTHER; note = 2'-O-methyladenosine-3'-phosphate
  modified_base 5: mod_base = OTHER; note = 2'-O-methyluridine-3'-phosphate
  modified_base 6: mod_base = OTHER; note = 2'-fluoroguanosine-3'-phosphate
  modified_base 7: mod_base = OTHER; note = 2'-O-methylcytidine-3'-phosphate
  modified_base 8: mod_base = OTHER; note = 2'-fluoroadenosine-3'-phosphate
  modified_base 9: mod_base = OTHER; note = 2'-fluoroguanosine-3'-phosphate
  modified_base 10: mod_base = OTHER; note = 2'-O-methyluridine-3'-phosphate
  modified_base 11: mod_base = OTHER; note = 2'-O-methyladenosine-3'-phosphate
  modified_base 12: mod_base = OTHER; note = 2'-O-methylguanosine-3'-phosphate
  modified_base 13: mod_base = OTHER; note = 2'-O-methyluridine-3'-phosphate
  modified_base 14: mod_base = OTHER; note = 2'-fluorouridine-3'-phosphate
  modified_base 15: mod_base = OTHER; note = 2'-O-methyladenosine-3'-phosphate
  modified_base 16: mod_base = OTHER; note = 2'-fluorouridine-3'-phosphate
  modified_base 17: mod_base = OTHER; note = 2'-O-methyluridine-3'-phosphate
  modified_base 18: mod_base = OTHER; note = 2'-O-methyladenosine-3'-phosphate
  modified_base 19: mod_base = OTHER; note = 2'-O-methyluridine-3'-phosphate
  modified_base 20: mod_base = OTHER; note = 2'-O-methylguanosine-3'-phosphate
  modified_base 21: mod_base = OTHER; note = 2'-O-methyluridine-3'-phosphorothioate
  modified_base 22: mod_base = OTHER; note = 2'-O-methylguanosine-3'-phosphorothioate
  modified_base 23: mod_base = OTHER; note = 2'-O-methylguanosine-3'-phosphate
tttatgcagtagttattatgtgg

SEQ ID NO: 2836 - RNA, 23 nt, synthetic construct
  source 1..23: mol_type = other RNA
  modified_base 1: mod_base = OTHER; note = Vinyl-phosphonate 2'-O-methyluridine-3'-phosphorothioate
  modified_base 2: mod_base = OTHER; note = 2'-fluorocytidine-3'-phosphorothioate
  modified_base 3: mod_base = OTHER; note = 2'-O-methyluridine-3'-phosphate
  modified_base 4: mod_base = OTHER; note = 2'-O-methylcytidine-3'-phosphate
  modified_base 5: mod_base = OTHER; note = 2'-O-methyladenosine-3'-phosphate
  modified_base 6: mod_base = OTHER; note = 2'-fluoroguanosine-3'-phosphate
  modified_base 7: mod_base = OTHER; note = 2'-O-methyladenosine-3'-phosphate
  modified_base 8: mod_base = OTHER; note = 2'-fluoroadenosine-3'-phosphate
  modified_base 9: mod_base = OTHER; note = 2'-fluoroadenosine-3'-phosphate
  modified_base 10: mod_base = OTHER; note = 2'-O-methylguanosine-3'-phosphate
  modified_base 11: mod_base = OTHER; note = 2'-O-methyluridine-3'-phosphate
  modified_base 12: mod_base = OTHER; note = 2'-O-methylguanosine-3'-phosphate
  modified_base 13: mod_base = OTHER; note = 2'-O-methyladenosine-3'-phosphate
  modified_base 14: mod_base = OTHER; note = 2'-fluorocytidine-3'-phosphate
  modified_base 15: mod_base = OTHER; note = 2'-O-methyladenosine-3'-phosphate
  modified_base 16: mod_base = OTHER; note = 2'-fluorocytidine-3'-phosphate
  modified_base 17: mod_base = OTHER; note = 2'-O-methyluridine-3'-phosphate
  modified_base 18: mod_base = OTHER; note = 2'-O-methyladenosine-3'-phosphate
  modified_base 19: mod_base = OTHER; note = 2'-O-methylguanosine-3'-phosphate
  modified_base 20: mod_base = OTHER; note = 2'-O-methyluridine-3'-phosphate
  modified_base 21: mod_base = OTHER; note = 2'-O-methyladenosine-3'-phosphorothioate
  modified_base 22: mod_base = OTHER; note = 2'-O-methyluridine-3'-phosphorothioate
  modified_base 23: mod_base = OTHER; note = 2'-O-methyluridine-3'-phosphate
tctcagaaagtgacactagtatt

SEQ ID NO: 2837 - RNA, 23 nt, synthetic construct
  source 1..23: mol_type = other RNA
  modified_base 1: mod_base = OTHER; note = Vinyl-phosphonate 2'-O-methyluridine-3'-phosphorothioate
  modified_base 2: mod_base = OTHER; note = 2'-fluoroadenosine-3'-phosphorothioate
  modified_base 3: mod_base = OTHER; note = 2'-O-methylguanosine-3'-phosphate
  modified_base 4: mod_base = OTHER; note = 2'-O-methyladenosine-3'-phosphate
  modified_base 5: mod_base = OTHER; note = 2'-O-methylguanosine-3'-phosphate
  modified_base 6: mod_base = OTHER; note = 2'-fluorocytidine-3'-phosphate
  modified_base 7: mod_base = OTHER; note = 2'-O-methyluridine-3'-phosphate
  modified_base 8: mod_base = OTHER; note = 2'-fluorouridine-3'-phosphate
  modified_base 9: mod_base = OTHER; note = 2'-fluorouridine-3'-phosphate
  modified_base 10: mod_base = OTHER; note = 2'-O-methyluridine-3'-phosphate
  modified_base 11: mod_base = OTHER; note = 2'-O-methylguanosine-3'-phosphate
  modified_base 12: mod_base = OTHER; note = 2'-O-methylcytidine-3'-phosphate
  modified_base 13: mod_base = OTHER; note = 2'-O-methyladenosine-3'-phosphate
  modified_base 14: mod_base = OTHER; note = 2'-fluorouridine-3'-phosphate
  modified_base 15: mod_base = OTHER; note = 2'-O-methylcytidine-3'-phosphate
  modified_base 16: mod_base = OTHER; note = 2'-fluorouridine-3'-phosphate
  modified_base 17: mod_base = OTHER; note = 2'-O-methylguanosine-3'-phosphate
  modified_base 18: mod_base = OTHER; note = 2'-O-methyladenosine-3'-phosphate
  modified_base 19: mod_base = OTHER; note = 2'-O-methyluridine-3'-phosphate
  modified_base 20: mod_base = OTHER; note = 2'-O-methyluridine-3'-phosphate
  modified_base 21: mod_base = OTHER; note = 2'-O-methylguanosine-3'-phosphorothioate
  modified_base 22: mod_base = OTHER; note = 2'-O-methyluridine-3'-phosphorothioate
  modified_base 23: mod_base = OTHER; note = 2'-O-methyluridine-3'-phosphate
tagagcttttgcatctgattgtt

SEQ ID NO: 2838 - RNA, 23 nt, synthetic construct
  source 1..23: mol_type = other RNA
  modified_base 1: mod_base = OTHER; note = Vinyl-phosphonate 2'-O-methyluridine-3'-phosphorothioate
  modified_base 2: mod_base = OTHER; note = 2'-fluoroadenosine-3'-phosphorothioate
  modified_base 3: mod_base = OTHER; note = 2'-O-methyladenosine-3'-phosphate
  modified_base 4: mod_base = OTHER; note = 2'-O-methylguanosine-3'-phosphate
  modified_base 5: mod_base = OTHER; note = 2'-O-methyluridine-3'-phosphate
  modified_base 6: mod_base = OTHER; note = 2'-fluorouridine-3'-phosphate
  modified_base 7: mod_base = OTHER; note = 2'-O-methyladenosine-3'-phosphate
  modified_base 8: mod_base = OTHER; note = 2'-fluoroguanosine-3'-phosphate
  modified_base 9: mod_base = OTHER; note = 2'-fluoroguanosine-3'-phosphate
  modified_base 10: mod_base = OTHER; note = 2'-O-methylcytidine-3'-phosphate
  modified_base 11: mod_base = OTHER; note = 2'-O-methyladenosine-3'-phosphate
  modified_base 12: mod_base = OTHER; note = 2'-O-methyladenosine-3'-phosphate
  modified_base 13: mod_base = OTHER; note = 2'-O-methyluridine-3'-phosphate
  modified_base 14: mod_base = OTHER; note = 2'-fluorouridine-3'-phosphate
  modified_base 15: mod_base = OTHER; note = 2'-O-methyladenosine-3'-phosphate
  modified_base 16: mod_base = OTHER; note = 2'-fluorocytidine-3'-phosphate
  modified_base 17: mod_base = OTHER; note = 2'-O-methyluridine-3'-phosphate
  modified_base 18: mod_base = OTHER; note = 2'-O-methylcytidine-3'-phosphate
  modified_base 19: mod_base = OTHER; note = 2'-O-methyluridine-3'-phosphate
  modified_base 20: mod_base = OTHER; note = 2'-O-methyluridine-3'-phosphate
  modified_base 21: mod_base = OTHER; note = 2'-O-methyladenosine-3'-phosphorothioate
  modified_base 22: mod_base = OTHER; note = 2'-O-methyluridine-3'-phosphorothioate
  modified_base 23: mod_base = OTHER; note = 2'-O-methyladenosine-3'-phosphate
taagttaggcaattactcttata

SEQ ID NO: 2839 - RNA, 23 nt, synthetic construct
  source 1..23: mol_type = other RNA
  modified_base 1: mod_base = OTHER; note = Vinyl-phosphonate 2'-O-methyluridine-3'-phosphorothioate
  modified_base 2: mod_base = OTHER; note = 2'-fluorouridine -3'-phosphorothioate
  modified_base 3: mod_base = OTHER; note = 2'-O-methyluridine-3'-phosphate
  modified_base 4: mod_base = OTHER; note = 2'-O-methyladenosine-3'-phosphate
  modified_base 5: mod_base = OTHER; note = 2'-O-methyladenosine-3'-phosphate
  modified_base 6: mod_base = OTHER; note = 2'-fluorouridine-3'-phosphate
  modified_base 7: mod_base = OTHER; note = 2'-O-methylguanosine-3'-phosphate
  modified_base 8: mod_base = OTHER; note = 2'-fluorouridine-3'-phosphate
  modified_base 9: mod_base = OTHER; note = 2'-fluorouridine-3'-phosphate
  modified_base 10: mod_base = OTHER; note = 2'-O-methylcytidine-3'-phosphate
  modified_base 11: mod_base = OTHER; note = 2'-O-methyladenosine-3'-phosphate
  modified_base 12: mod_base = OTHER; note = 2'-O-methyluridine-3'-phosphate
  modified_base 13: mod_base = OTHER; note = 2'-O-methyladenosine-3'-phosphate
  modified_base 14: mod_base = OTHER; note = 2'-fluoroadenosine-3'-phosphate
  modified_base 15: mod_base = OTHER; note = 2'-O-methyladenosine-3'-phosphate
  modified_base 16: mod_base = OTHER; note = 2'-fluorocytidine-3'-phosphate
  modified_base 17: mod_base = OTHER; note = 2'-O-methyladenosine-3'-phosphate
  modified_base 18: mod_base = OTHER; note = 2'-O-methyladenosine-3'-phosphate
  modified_base 19: mod_base = OTHER; note = 2'-O-methylguanosine-3'-phosphate
  modified_base 20: mod_base = OTHER; note = 2'-O-methylcytidine-3'-phosphate
  modified_base 21: mod_base = OTHER; note = 2'-O-methylcytidine-3'-phosphorothioate
  modified_base 22: mod_base = OTHER; note = 2'-O-methyladenosine-3'-phosphorothioate
  modified_base 23: mod_base = OTHER; note = 2'-O-methyluridine-3'-phosphate
tttaatgttcataaacaagccat

SEQ ID NO: 2840 - RNA, 23 nt, synthetic construct
  source 1..23: mol_type = other RNA
  modified_base 1: mod_base = OTHER; note = Vinyl-phosphonate 2'-O-methyluridine-3'-phosphorothioate
  modified_base 2: mod_base = OTHER; note = 2'-fluoroadenosine-3'-phosphorothioate
  modified_base 3: mod_base = OTHER; note = 2'-O-methyluridine-3'-phosphate
  modified_base 4: mod_base = OTHER; note = 2'-O-methylcytidine-3'-phosphate
  modified_base 5: mod_base = OTHER; note = 2'-O-methylguanosine-3'-phosphate
  modified_base 6: mod_base = OTHER; note = 2'-fluorouridine-3'-phosphate
  modified_base 7: mod_base = OTHER; note = 2'-O-methyluridine-3'-phosphate
  modified_base 8: mod_base = OTHER; note = 2'-fluorouridine-3'-phosphate
  modified_base 9: mod_base = OTHER; note = 2'-fluoroguanosine-3'-phosphate
  modified_base 10: mod_base = OTHER; note = 2'-O-methylcytidine-3'-phosphate
  modified_base 11: mod_base = OTHER; note = 2'-O-methyladenosine-3'-phosphate
  modified_base 12: mod_base = OTHER; note = 2'-O-methylguanosine-3'-phosphate
  modified_base 13: mod_base = OTHER; note = 2'-O-methyluridine-3'-phosphate
  modified_base 14: mod_base = OTHER; note = 2'-fluoroadenosine-3'-phosphate
  modified_base 15: mod_base = OTHER; note = 2'-O-methylguanosine-3'-phosphate
  modified_base 16: mod_base = OTHER; note = 2'-fluorocytidine-3'-phosphate
  modified_base 17: mod_base = OTHER; note = 2'-O-methyladenosine-3'-phosphate
  modified_base 18: mod_base = OTHER; note = 2'-O-methyladenosine-3'-phosphate
  modified_base 19: mod_base = OTHER; note = 2'-O-methyladenosine-3'-phosphate
  modified_base 20: mod_base = OTHER; note = 2'-O-methyladenosine-3'-phosphate
  modified_base 21: mod_base = OTHER; note = 2'-O-methyladenosine-3'-phosphorothioate
  modified_base 22: mod_base = OTHER; note = 2'-O-methyladenosine-3'-phosphorothioate
  modified_base 23: mod_base = OTHER; note = 2'-O-methylguanosine-3'-phosphate
tatcgtttgcagtagcaaaaaag

SEQ ID NO: 2841 - RNA, 23 nt, synthetic construct
  source 1..23: mol_type = other RNA
  modified_base 1: mod_base = OTHER; note = Vinyl-phosphonate 2'-O-methyluridine-3'-phosphorothioate
  modified_base 2: mod_base = OTHER; note = 2'-fluoroadenosine-3'-phosphorothioate
  modified_base 3: mod_base = OTHER; note = 2'-O-methylcytidine-3'-phosphate
  modified_base 4: mod_base = OTHER; note = 2'-O-methyladenosine-3'-phosphate
  modified_base 5: mod_base = OTHER; note = 2'-O-methyluridine-3'-phosphate
  modified_base 6: mod_base = OTHER; note = 2'-fluorouridine-3'-phosphate
  modified_base 7: mod_base = OTHER; note = 2'-O-methyluridine-3'-phosphate
  modified_base 8: mod_base = OTHER; note = 2'-fluoroadenosine-3'-phosphate
  modified_base 9: mod_base = OTHER; note = 2'-fluorouridine-3'-phosphate
  modified_base 10: mod_base = OTHER; note = 2'-O-methyluridine-3'-phosphate
  modified_base 11: mod_base = OTHER; note = 2'-O-methyladenosine-3'-phosphate
  modified_base 12: mod_base = OTHER; note = 2'-O-methyluridine-3'-phosphate
  modified_base 13: mod_base = OTHER; note = 2'-O-methyladenosine-3'-phosphate
  modified_base 14: mod_base = OTHER; note = 2'-fluoroguanosine-3'-phosphate
  modified_base 15: mod_base = OTHER; note = 2'-O-methylcytidine-3'-phosphate
  modified_base 16: mod_base = OTHER; note = 2'-fluoroadenosine-3'-phosphate
  modified_base 17: mod_base = OTHER; note = 2'-O-methyluridine-3'-phosphate
  modified_base 18: mod_base = OTHER; note = 2'-O-methylcytidine-3'-phosphate
  modified_base 19: mod_base = OTHER; note = 2'-O-methylguanosine-3'-phosphate
  modified_base 20: mod_base = OTHER; note = 2'-O-methyluridine-3'-phosphate
  modified_base 21: mod_base = OTHER; note = 2'-O-methyluridine-3'-phosphorothioate
  modified_base 22: mod_base = OTHER; note = 2'-O-methyluridine-3'-phosphorothioate
  modified_base 23: mod_base = OTHER; note = 2'-O-methylguanosine-3'-phosphate
tacatttattatagcatcgtttg

SEQ ID NO: 2842 - RNA, 23 nt, synthetic construct
  source 1..23: mol_type = other RNA
  modified_base 1: mod_base = OTHER; note = Vinyl-phosphonate 2'-O-methyluridine-3'-phosphorothioate
  modified_base 2: mod_base = OTHER; note = 2'-fluorouridine -3'-phosphorothioate
  modified_base 3: mod_base = OTHER; note = 2'-O-methyladenosine-3'-phosphate
  modified_base 4: mod_base = OTHER; note = 2'-O-methylcytidine-3'-phosphate
  modified_base 5: mod_base = OTHER; note = 2'-O-methyluridine-3'-phosphate
  modified_base 6: mod_base = OTHER; note = 2'-fluorocytidine-3'-phosphate
  modified_base 7: mod_base = OTHER; note = 2'-O-methyluridine-3'-phosphate
  modified_base 8: mod_base = OTHER; note = 2'-fluorouridine-3'-phosphate
  modified_base 9: mod_base = OTHER; note = 2'-fluoroadenosine-3'-phosphate
  modified_base 10: mod_base = OTHER; note = 2'-O-methyluridine-3'-phosphate
  modified_base 11: mod_base = OTHER; note = 2'-O-methyladenosine-3'-phosphate
  modified_base 12: mod_base = OTHER; note = 2'-O-methylguanosine-3'-phosphate
  modified_base 13: mod_base = OTHER; note = 2'-O-methyluridine-3'-phosphate
  modified_base 14: mod_base = OTHER; note = 2'-fluoroadenosine-3'-phosphate
  modified_base 15: mod_base = OTHER; note = 2'-O-methyladenosine-3'-phosphate
  modified_base 16: mod_base = OTHER; note = 2'-fluorocytidine-3'-phosphate
  modified_base 17: mod_base = OTHER; note = 2'-O-methyladenosine-3'-phosphate
  modified_base 18: mod_base = OTHER; note = 2'-O-methyladenosine-3'-phosphate
  modified_base 19: mod_base = OTHER; note = 2'-O-methylcytidine-3'-phosphate
  modified_base 20: mod_base = OTHER; note = 2'-O-methylcytidine-3'-phosphate
  modified_base 21: mod_base = OTHER; note = 2'-O-methyladenosine-3'-phosphorothioate
  modified_base 22: mod_base = OTHER; note = 2'-O-methyladenosine-3'-phosphorothioate
  modified_base 23: mod_base = OTHER; note = 2'-O-methylguanosine-3'-phosphate
ttactcttatagtaacaaccaag

SEQ ID NO: 2843 - RNA, 23 nt, synthetic construct
  source 1..23: mol_type = other RNA
  modified_base 1: mod_base = OTHER; note = Vinyl-phosphonate 2'-O-methyluridine-3'-phosphorothioate
  modified_base 2: mod_base = OTHER; note = 2'-fluorocytidine-3'-phosphorothioate
  modified_base 3: mod_base = OTHER; note = 2'-O-methyladenosine-3'-phosphate
  modified_base 4: mod_base = OTHER; note = 2'-O-methyluridine-3'-phosphate
  modified_base 5: mod_base = OTHER; note = 2'-O-methylcytidine-3'-phosphate
  modified_base 6: mod_base = OTHER; note = 2'-fluoroadenosine-3'-phosphate
  modified_base 7: mod_base = OTHER; note = 2'-O-methylguanosine-3'-phosphate
  modified_base 8: mod_base = OTHER; note = 2'-fluoroadenosine-3'-phosphate
  modified_base 9: mod_base = OTHER; note = 2'-fluoroguanosine-3'-phosphate
  modified_base 10: mod_base = OTHER; note = 2'-O-methylguanosine-3'-phosphate
  modified_base 11: mod_base = OTHER; note = 2'-O-methyladenosine-3'-phosphate
  modified_base 12: mod_base = OTHER; note = 2'-O-methyluridine-3'-phosphate
  modified_base 13: mod_base = OTHER; note = 2'-O-methylguanosine-3'-phosphate
  modified_base 14: mod_base = OTHER; note = 2'-fluorouridine-3'-phosphate
  modified_base 15: mod_base = OTHER; note = 2'-O-methyluridine-3'-phosphate
  modified_base 16: mod_base = OTHER; note = 2'-fluorocytidine-3'-phosphate
  modified_base 17: mod_base = OTHER; note = 2'-O-methyladenosine-3'-phosphate
  modified_base 18: mod_base = OTHER; note = 2'-O-methyluridine-3'-phosphate
  modified_base 19: mod_base = OTHER; note = 2'-O-methylcytidine-3'-phosphate
  modified_base 20: mod_base = OTHER; note = 2'-O-methyladenosine-3'-phosphate
  modified_base 21: mod_base = OTHER; note = 2'-O-methylguanosine-3'-phosphorothioate
  modified_base 22: mod_base = OTHER; note = 2'-O-methyladenosine-3'-phosphorothioate
  modified_base 23: mod_base = OTHER; note = 2'-O-methylguanosine-3'-phosphate
tcatcagaggatgttcatcagag

SEQ ID NO: 2844 - RNA, 23 nt, synthetic construct
  source 1..23: mol_type = other RNA
  modified_base 1: mod_base = OTHER; note = Vinyl-phosphonate 2'-O-methyluridine-3'-phosphorothioate
  modified_base 2: mod_base = OTHER; note = 2'-fluorouridine -3'-phosphorothioate
  modified_base 3: mod_base = OTHER; note = 2'-O-methylguanosine-3'-phosphate
  modified_base 4: mod_base = OTHER; note = 2'-O-methylguanosine-3'-phosphate
  modified_base 5: mod_base = OTHER; note = 2'-O-methylcytidine-3'-phosphate
  modified_base 6: mod_base = OTHER; note = 2'-fluoroadenosine-3'-phosphate
  modified_base 7: mod_base = OTHER; note = 2'-O-methyladenosine-3'-phosphate
  modified_base 8: mod_base = OTHER; note = 2'-fluoroadenosine-3'-phosphate
  modified_base 9: mod_base = OTHER; note = 2'-fluorouridine-3'-phosphate
  modified_base 10: mod_base = OTHER; note = 2'-O-methyladenosine-3'-phosphate
  modified_base 11: mod_base = OTHER; note = 2'-O-methyluridine-3'-phosphate
  modified_base 12: mod_base = OTHER; note = 2'-O-methyluridine-3'-phosphate
  modified_base 13: mod_base = OTHER; note = 2'-O-methyluridine-3'-phosphate
  modified_base 14: mod_base = OTHER; note = 2'-fluoroadenosine-3'-phosphate
  modified_base 15: mod_base = OTHER; note = 2'-O-methyluridine-3'-phosphate
  modified_base 16: mod_base = OTHER; note = 2'-fluorocytidine-3'-phosphate
  modified_base 17: mod_base = OTHER; note = 2'-O-methylcytidine-3'-phosphate
  modified_base 18: mod_base = OTHER; note = 2'-O-methylguanosine-3'-phosphate
  modified_base 19: mod_base = OTHER; note = 2'-O-methylcytidine-3'-phosphate
  modified_base 20: mod_base = OTHER; note = 2'-O-methyladenosine-3'-phosphate
  modified_base 21: mod_base = OTHER; note = 2'-O-methylguanosine-3'-phosphorothioate
  modified_base 22: mod_base = OTHER; note = 2'-O-methyladenosine-3'-phosphorothioate
  modified_base 23: mod_base = OTHER; note = 2'-O-methylguanosine-3'-phosphate
ttggcaaatatttatccgcagag

SEQ ID NO: 2845 - RNA, 23 nt, synthetic construct
  source 1..23: mol_type = other RNA
  modified_base 1: mod_base = OTHER; note = Vinyl-phosphonate 2'-O-methyluridine-3'-phosphorothioate
  modified_base 2: mod_base = OTHER; note = 2'-fluoroadenosine-3'-phosphorothioate
  modified_base 3: mod_base = OTHER; note = 2'-O-methylguanosine-3'-phosphate
  modified_base 4: mod_base = OTHER; note = 2'-O-methylguanosine-3'-phosphate
  modified_base 5: mod_base = OTHER; note = 2'-O-methylcytidine-3'-phosphate
  modified_base 6: mod_base = OTHER; note = 2'-fluoroadenosine-3'-phosphate
  modified_base 7: mod_base = OTHER; note = 2'-O-methylguanosine-3'-phosphate
  modified_base 8: mod_base = OTHER; note = 2'-fluoroadenosine-3'-phosphate
  modified_base 9: mod_base = OTHER; note = 2'-fluoroadenosine-3'-phosphate
  modified_base 10: mod_base = OTHER; note = 2'-O-methyluridine-3'-phosphate
  modified_base 11: mod_base = OTHER; note = 2'-O-methylcytidine-3'-phosphate
  modified_base 12: mod_base = OTHER; note = 2'-O-methyluridine-3'-phosphate
  modified_base 13: mod_base = OTHER; note = 2'-O-methylguanosine-3'-phosphate
  modified_base 14: mod_base = OTHER; note = 2'-fluoroadenosine-3'-phosphate
  modified_base 15: mod_base = OTHER; note = 2'-O-methyladenosine-3'-phosphate
  modified_base 16: mod_base = OTHER; note = 2'-fluorouridine-3'-phosphate
  modified_base 17: mod_base = OTHER; note = 2'-O-methyluridine-3'-phosphate
  modified_base 18: mod_base = OTHER; note = 2'-O-methyluridine-3'-phosphate
  modified_base 19: mod_base = OTHER; note = 2'-O-methyluridine-3'-phosphate
  modified_base 20: mod_base = OTHER; note = 2'-O-methylguanosine-3'-phosphate
  modified_base 21: mod_base = OTHER; note = 2'-O-methylguanosine-3'-phosphorothioate
  modified_base 22: mod_base = OTHER; note = 2'-O-methyladenosine-3'-phosphorothioate
  modified_base 23: mod_base = OTHER; note = 2'-O-methyladenosine-3'-phosphate
taggcagaatctgaattttggaa

SEQ ID NO: 2846 - RNA, 23 nt, synthetic construct
  source 1..23: mol_type = other RNA
  modified_base 1: mod_base = OTHER; note = Vinyl-phosphonate 2'-O-methyluridine-3'-phosphorothioate
  modified_base 2: mod_base = OTHER; note = 2'-fluoroguanosine-3'-phosphorothioate
  modified_base 3: mod_base = OTHER; note = 2'-O-methylguanosine-3'-phosphate
  modified_base 4: mod_base = OTHER; note = 2'-O-methyladenosine-3'-phosphate
  modified_base 5: mod_base = OTHER; note = 2'-O-methylguanosine-3'-phosphate
  modified_base 6: mod_base = OTHER; note = 2'-fluoroadenosine-3'-phosphate
  modified_base 7: mod_base = OTHER; note = 2'-O-methyladenosine-3'-phosphate
  modified_base 8: mod_base = OTHER; note = 2'-fluoroadenosine-3'-phosphate
  modified_base 9: mod_base = OTHER; note = 2'-fluoroguanosine-3'-phosphate
  modified_base 10: mod_base = OTHER; note = 2'-O-methyladenosine-3'-phosphate
  modified_base 11: mod_base = OTHER; note = 2'-O-methylcytidine-3'-phosphate
  modified_base 12: mod_base = OTHER; note = 2'-O-methyladenosine-3'-phosphate
  modified_base 13: mod_base = OTHER; note = 2'-O-methylcytidine-3'-phosphate
  modified_base 14: mod_base = OTHER; note = 2'-fluoroadenosine-3'-phosphate
  modified_base 15: mod_base = OTHER; note = 2'-O-methylcytidine-3'-phosphate
  modified_base 16: mod_base = OTHER; note = 2'-fluoroadenosine-3'-phosphate
  modified_base 17: mod_base = OTHER; note = 2'-O-methyluridine-3'-phosphate
  modified_base 18: mod_base = OTHER; note = 2'-O-methylcytidine-3'-phosphate
  modified_base 19: mod_base = OTHER; note = 2'-O-methylcytidine-3'-phosphate
  modified_base 20: mod_base = OTHER; note = 2'-O-methyluridine-3'-phosphate
  modified_base 21: mod_base = OTHER; note = 2'-O-methyluridine-3'-phosphorothioate
  modified_base 22: mod_base = OTHER; note = 2'-O-methyluridine-3'-phosphorothioate
  modified_base 23: mod_base = OTHER; note = 2'-O-methyluridine-3'-phosphate
tggagaaagacacacatcctttt

SEQ ID NO: 2847 - RNA, 23 nt, synthetic construct
  source 1..23: mol_type = other RNA
  modified_base 1: mod_base = OTHER; note = Vinyl-phosphonate 2'-O-methyluridine-3'-phosphorothioate
  modified_base 2: mod_base = OTHER; note = 2'-fluoroguanosine-3'-phosphorothioate
  modified_base 3: mod_base = OTHER; note = 2'-O-methyluridine-3'-phosphate
  modified_base 4: mod_base = OTHER; note = 2'-O-methylcytidine-3'-phosphate
  modified_base 5: mod_base = OTHER; note = 2'-O-methyluridine-3'-phosphate
  modified_base 6: mod_base = OTHER; note = 2'-fluorouridine-3'-phosphate
  modified_base 7: mod_base = OTHER; note = 2'-O-methylcytidine-3'-phosphate
  modified_base 8: mod_base = OTHER; note = 2'-fluorouridine-3'-phosphate
  modified_base 9: mod_base = OTHER; note = 2'-fluoroguanosine-3'-phosphate
  modified_base 10: mod_base = OTHER; note = 2'-O-methylguanosine-3'-phosphate
  modified_base 11: mod_base = OTHER; note = 2'-O-methyladenosine-3'-phosphate
  modified_base 12: mod_base = OTHER; note = 2'-O-methyladenosine-3'-phosphate
  modified_base 13: mod_base = OTHER; note = 2'-O-methylguanosine-3'-phosphate
  modified_base 14: mod_base = OTHER; note = 2'-fluorocytidine-3'-phosphate
  modified_base 15: mod_base = OTHER; note = 2'-O-methyladenosine-3'-phosphate
  modified_base 16: mod_base = OTHER; note = 2'-fluorouridine-3'-phosphate
  modified_base 17: mod_base = OTHER; note = 2'-O-methyluridine-3'-phosphate
  modified_base 18: mod_base = OTHER; note = 2'-O-methylcytidine-3'-phosphate
  modified_base 19: mod_base = OTHER; note = 2'-O-methylguanosine-3'-phosphate
  modified_base 20: mod_base = OTHER; note = 2'-O-methylcytidine-3'-phosphate
  modified_base 21: mod_base = OTHER; note = 2'-O-methyladenosine-3'-phosphorothioate
  modified_base 22: mod_base = OTHER; note = 2'-O-methylguanosine-3'-phosphorothioate
  modified_base 23: mod_base = OTHER; note = 2'-O-methylguanosine-3'-phosphate
tgtcttctggaagcattcgcagg

SEQ ID NO: 2848 - RNA, 23 nt, synthetic construct
  source 1..23: mol_type = other RNA
  modified_base 1: mod_base = OTHER; note = Vinyl-phosphonate 2'-O-methyluridine-3'-phosphorothioate
  modified_base 2: mod_base = OTHER; note = 2'-fluorouridine -3'-phosphorothioate
  modified_base 3: mod_base = OTHER; note = 2'-O-methylguanosine-3'-phosphate
  modified_base 4: mod_base = OTHER; note = 2'-O-methyladenosine-3'-phosphate
  modified_base 5: mod_base = OTHER; note = 2'-O-methylcytidine-3'-phosphate
  modified_base 6: mod_base = OTHER; note = 2'-fluoroadenosine-3'-phosphate
  modified_base 7: mod_base = OTHER; note = 2'-O-methylguanosine-3'-phosphate
  modified_base 8: mod_base = OTHER; note = 2'-fluoroguanosine-3'-phosphate
  modified_base 9: mod_base = OTHER; note = 2'-fluoroadenosine-3'-phosphate
  modified_base 10: mod_base = OTHER; note = 2'-O-methylguanosine-3'-phosphate
  modified_base 11: mod_base = OTHER; note = 2'-O-methyluridine-3'-phosphate
  modified_base 12: mod_base = OTHER; note = 2'-O-methyluridine-3'-phosphate
  modified_base 13: mod_base = OTHER; note = 2'-O-methyladenosine-3'-phosphate
  modified_base 14: mod_base = OTHER; note = 2'-fluorocytidine-3'-phosphate
  modified_base 15: mod_base = OTHER; note = 2'-O-methyluridine-3'-phosphate
  modified_base 16: mod_base = OTHER; note = 2'-fluorocytidine-3'-phosphate
  modified_base 17: mod_base = OTHER; note = 2'-O-methyladenosine-3'-phosphate
  modified_base 18: mod_base = OTHER; note = 2'-O-methyluridine-3'-phosphate
  modified_base 19: mod_base = OTHER; note = 2'-O-methyluridine-3'-phosphate
  modified_base 20: mod_base = OTHER; note = 2'-O-methylcytidine-3'-phosphate
  modified_base 21: mod_base = OTHER; note = 2'-O-methylguanosine-3'-phosphorothioate
  modified_base 22: mod_base = OTHER; note = 2'-O-methyluridine-3'-phosphorothioate
  modified_base 23: mod_base = OTHER; note = 2'-O-methylguanosine-3'-phosphate
ttgacaggagttactcattcgtg

SEQ ID NO: 2849 - RNA, 23 nt, synthetic construct
  source 1..23: mol_type = other RNA
  modified_base 1: mod_base = OTHER; note = Vinyl-phosphonate 2'-O-methyluridine-3'-phosphorothioate
  modified_base 2: mod_base = OTHER; note = 2'-fluoroguanosine-3'-phosphorothioate
  modified_base 3: mod_base = OTHER; note = 2'-O-methyluridine-3'-phosphate
  modified_base 4: mod_base = OTHER; note = 2'-O-methyladenosine-3'-phosphate
  modified_base 5: mod_base = OTHER; note = 2'-O-methyluridine-3'-phosphate
  modified_base 6: mod_base = OTHER; note = 2'-fluorouridine-3'-phosphate
  modified_base 7: mod_base = OTHER; note = 2'-O-methyluridine-3'-phosphate
  modified_base 8: mod_base = OTHER; note = 2'-fluorouridine-3'-phosphate
  modified_base 9: mod_base = OTHER; note = 2'-fluoroadenosine-3'-phosphate
  modified_base 10: mod_base = OTHER; note = 2'-O-methyladenosine-3'-phosphate
  modified_base 11: mod_base = OTHER; note = 2'-O-methyladenosine-3'-phosphate
  modified_base 12: mod_base = OTHER; note = 2'-O-methyluridine-3'-phosphate
  modified_base 13: mod_base = OTHER; note = 2'-O-methyladenosine-3'-phosphate
  modified_base 14: mod_base = OTHER; note = 2'-fluoroadenosine-3'-phosphate
  modified_base 15: mod_base = OTHER; note = 2'-O-methyladenosine-3'-phosphate
  modified_base 16: mod_base = OTHER; note = 2'-fluorocytidine-3'-phosphate
  modified_base 17: mod_base = OTHER; note = 2'-O-methyladenosine-3'-phosphate
  modified_base 18: mod_base = OTHER; note = 2'-O-methylcytidine-3'-phosphate
  modified_base 19: mod_base = OTHER; note = 2'-O-methylcytidine-3'-phosphate
  modified_base 20: mod_base = OTHER; note = 2'-O-methylcytidine-3'-phosphate
  modified_base 21: mod_base = OTHER; note = 2'-O-methyladenosine-3'-phosphorothioate
  modified_base 22: mod_base = OTHER; note = 2'-O-methyladenosine-3'-phosphorothioate
  modified_base 23: mod_base = OTHER; note = 2'-O-methylguanosine-3'-phosphate
tgtattttaaataaacacccaag

SEQ ID NO: 2850 - RNA, 23 nt, synthetic construct
  source 1..23: mol_type = other RNA
  modified_base 1: mod_base = OTHER; note = Vinyl-phosphonate 2'-O-methyluridine-3'-phosphorothioate
  modified_base 2: mod_base = OTHER; note = 2'-fluoroadenosine-3'-phosphorothioate
  modified_base 3: mod_base = OTHER; note = 2'-O-methyladenosine-3'-phosphate
  modified_base 4: mod_base = OTHER; note = 2'-O-methyladenosine-3'-phosphate
  modified_base 5: mod_base = OTHER; note = 2'-O-methylcytidine-3'-phosphate
  modified_base 6: mod_base = OTHER; note = 2'-fluoroguanosine-3'-phosphate
  modified_base 7: mod_base = OTHER; note = 2'-O-methylguanosine-3'-phosphate
  modified_base 8: mod_base = OTHER; note = 2'-fluorouridine-3'-phosphate
  modified_base 9: mod_base = OTHER; note = 2'-fluorocytidine-3'-phosphate
  modified_base 10: mod_base = OTHER; note = 2'-O-methyladenosine-3'-phosphate
  modified_base 11: mod_base = OTHER; note = 2'-O-methyladenosine-3'-phosphate
  modified_base 12: mod_base = OTHER; note = 2'-O-methyladenosine-3'-phosphate
  modified_base 13: mod_base = OTHER; note = 2'-O-methyluridine-3'-phosphate
  modified_base 14: mod_base = OTHER; note = 2'-fluoroadenosine-3'-phosphate
  modified_base 15: mod_base = OTHER; note = 2'-O-methyluridine-3'-phosphate
  modified_base 16: mod_base = OTHER; note = 2'-fluorocytidine-3'-phosphate
  modified_base 17: mod_base = OTHER; note = 2'-O-methyluridine-3'-phosphate
  modified_base 18: mod_base = OTHER; note = 2'-O-methyluridine-3'-phosphate
  modified_base 19: mod_base = OTHER; note = 2'-O-methyluridine-3'-phosphate
  modified_base 20: mod_base = OTHER; note = 2'-O-methyluridine-3'-phosphate
  modified_base 21: mod_base = OTHER; note = 2'-O-methylguanosine-3'-phosphorothioate
  modified_base 22: mod_base = OTHER; note = 2'-O-methylguanosine-3'-phosphorothioate
  modified_base 23: mod_base = OTHER; note = 2'-O-methylcytidine-3'-phosphate
taaacggtcaaatatcttttggc

SEQ ID NO: 2851 - RNA, 23 nt, synthetic construct
  source 1..23: mol_type = other RNA
  modified_base 1: mod_base = OTHER; note = Vinyl-phosphonate 2'-O-methyluridine-3'-phosphorothioate
  modified_base 2: mod_base = OTHER; note = 2'-fluoroadenosine-3'-phosphorothioate
  modified_base 3: mod_base = OTHER; note = 2'-O-methyladenosine-3'-phosphate
  modified_base 4: mod_base = OTHER; note = 2'-O-methyladenosine-3'-phosphate
  modified_base 5: mod_base = OTHER; note = 2'-O-methyladenosine-3'-phosphate
  modified_base 6: mod_base = OTHER; note = 2'-fluorouridine-3'-phosphate
  modified_base 7: mod_base = OTHER; note = 2'-O-methylcytidine-3'-phosphate
  modified_base 8: mod_base = OTHER; note = 2'-fluorouridine-3'-phosphate
  modified_base 9: mod_base = OTHER; note = 2'-fluorocytidine-3'-phosphate
  modified_base 10: mod_base = OTHER; note = 2'-O-methyluridine-3'-phosphate
  modified_base 11: mod_base = OTHER; note = 2'-O-methylcytidine-3'-phosphate
  modified_base 12: mod_base = OTHER; note = 2'-O-methylcytidine-3'-phosphate
  modified_base 13: mod_base = OTHER; note = 2'-O-methyladenosine-3'-phosphate
  modified_base 14: mod_base = OTHER; note = 2'-fluoroadenosine-3'-phosphate
  modified_base 15: mod_base = OTHER; note = 2'-O-methylguanosine-3'-phosphate
  modified_base 16: mod_base = OTHER; note = 2'-fluorocytidine-3'-phosphate
  modified_base 17: mod_base = OTHER; note = 2'-O-methyluridine-3'-phosphate
  modified_base 18: mod_base = OTHER; note = 2'-O-methylguanosine-3'-phosphate
  modified_base 19: mod_base = OTHER; note = 2'-O-methyluridine-3'-phosphate
  modified_base 20: mod_base = OTHER; note = 2'-O-methyladenosine-3'-phosphate
  modified_base 21: mod_base = OTHER; note = 2'-O-methyluridine-3'-phosphorothioate
  modified_base 22: mod_base = OTHER; note = 2'-O-methyluridine-3'-phosphorothioate
  modified_base 23: mod_base = OTHER; note = 2'-O-methyladenosine-3'-phosphate
taaaatctctccaagctgtatta

SEQ ID NO: 2852 - RNA, 23 nt, synthetic construct
  source 1..23: mol_type = other RNA
  modified_base 1: mod_base = OTHER; note = Vinyl-phosphonate 2'-O-methyluridine-3'-phosphorothioate
  modified_base 2: mod_base = OTHER; note = 2'-fluoroguanosine-3'-phosphorothioate
  modified_base 3: mod_base = OTHER; note = 2'-O-methyluridine-3'-phosphate
  modified_base 4: mod_base = OTHER; note = 2'-O-methyladenosine-3'-phosphate
  modified_base 5: mod_base = OTHER; note = 2'-O-methyladenosine-3'-phosphate
  modified_base 6: mod_base = OTHER; note = 2'-fluorouridine-3'-phosphate
  modified_base 7: mod_base = OTHER; note = 2'-O-methyluridine-3'-phosphate
  modified_base 8: mod_base = OTHER; note = 2'-fluoroguanosine-3'-phosphate
  modified_base 9: mod_base = OTHER; note = 2'-fluorouridine-3'-phosphate
  modified_base 10: mod_base = OTHER; note = 2'-O-methyladenosine-3'-phosphate
  modified_base 11: mod_base = OTHER; note = 2'-O-methyluridine-3'-phosphate
  modified_base 12: mod_base = OTHER; note = 2'-O-methylguanosine-3'-phosphate
  modified_base 13: mod_base = OTHER; note = 2'-O-methyladenosine-3'-phosphate
  modified_base 14: mod_base = OTHER; note = 2'-fluoroadenosine-3'-phosphate
  modified_base 15: mod_base = OTHER; note = 2'-O-methyluridine-3'-phosphate
  modified_base 16: mod_base = OTHER; note = 2'-fluoroguanosine-3'-phosphate
  modified_base 17: mod_base = OTHER; note = 2'-O-methylcytidine-3'-phosphate
  modified_base 18: mod_base = OTHER; note = 2'-O-methyladenosine-3'-phosphate
  modified_base 19: mod_base = OTHER; note = 2'-O-methyluridine-3'-phosphate
  modified_base 20: mod_base = OTHER; note = 2'-O-methyluridine-3'-phosphate
  modified_base 21: mod_base = OTHER; note = 2'-O-methyluridine-3'-phosphorothioate
  modified_base 22: mod_base = OTHER; note = 2'-O-methyluridine-3'-phosphorothioate
  modified_base 23: mod_base = OTHER; note = 2'-O-methylcytidine-3'-phosphate
tgtaattgtatgaatgcattttc

SEQ ID NO: 2853 - RNA, 23 nt, synthetic construct
  source 1..23: mol_type = other RNA
  modified_base 1: mod_base = OTHER; note = Vinyl-phosphonate 2'-O-methyluridine-3'-phosphorothioate
  modified_base 2: mod_base = OTHER; note = 2'-fluoroadenosine-3'-phosphorothioate
  modified_base 3: mod_base = OTHER; note = 2'-O-methyluridine-3'-phosphate
  modified_base 4: mod_base = OTHER; note = 2'-O-methylcytidine-3'-phosphate
  modified_base 5: mod_base = OTHER; note = 2'-O-methyladenosine-3'-phosphate
  modified_base 6: mod_base = OTHER; note = 2'-fluoroadenosine-3'-phosphate
  modified_base 7: mod_base = OTHER; note = 2'-O-methyladenosine-3'-phosphate
  modified_base 8: mod_base = OTHER; note = 2'-fluoroadenosine-3'-phosphate
  modified_base 9: mod_base = OTHER; note = 2'-fluoroadenosine-3'-phosphate
  modified_base 10: mod_base = OTHER; note = 2'-O-methylguanosine-3'-phosphate
  modified_base 11: mod_base = OTHER; note = 2'-O-methyladenosine-3'-phosphate
  modified_base 12: mod_base = OTHER; note = 2'-O-methylguanosine-3'-phosphate
  modified_base 13: mod_base = OTHER; note = 2'-O-methylcytidine-3'-phosphate
  modified_base 14: mod_base = OTHER; note = 2'-fluoroguanosine-3'-phosphate
  modified_base 15: mod_base = OTHER; note = 2'-O-methyladenosine-3'-phosphate
  modified_base 16: mod_base = OTHER; note = 2'-fluoroguanosine-3'-phosphate
  modified_base 17: mod_base = OTHER; note = 2'-O-methyluridine-3'-phosphate
  modified_base 18: mod_base = OTHER; note = 2'-O-methylguanosine-3'-phosphate
  modified_base 19: mod_base = OTHER; note = 2'-O-methylguanosine-3'-phosphate
  modified_base 20: mod_base = OTHER; note = 2'-O-methylguanosine-3'-phosphate
  modified_base 21: mod_base = OTHER; note = 2'-O-methyladenosine-3'-phosphorothioate
  modified_base 22: mod_base = OTHER; note = 2'-O-methyluridine-3'-phosphorothioate
  modified_base 23: mod_base = OTHER; note = 2'-O-methyluridine-3'-phosphate
tatcaaaaagagcgagtgggatt

SEQ ID NO: 2854 - RNA, 23 nt, synthetic construct
  source 1..23: mol_type = other RNA
  modified_base 1: mod_base = OTHER; note = Vinyl-phosphonate 2'-O-methyluridine-3'-phosphorothioate
  modified_base 2: mod_base = OTHER; note = 2'-fluorocytidine-3'-phosphorothioate
  modified_base 3: mod_base = OTHER; note = 2'-O-methyladenosine-3'-phosphate
  modified_base 4: mod_base = OTHER; note = 2'-O-methylguanosine-3'-phosphate
  modified_base 5: mod_base = OTHER; note = 2'-O-methylcytidine-3'-phosphate
  modified_base 6: mod_base = OTHER; note = 2'-fluorouridine-3'-phosphate
  modified_base 7: mod_base = OTHER; note = 2'-O-methyluridine-3'-phosphate
  modified_base 8: mod_base = OTHER; note = 2'-fluoroguanosine-3'-phosphate
  modified_base 9: mod_base = OTHER; note = 2'-fluorouridine-3'-phosphate
  modified_base 10: mod_base = OTHER; note = 2'-O-methylguanosine-3'-phosphate
  modified_base 11: mod_base = OTHER; note = 2'-O-methyluridine-3'-phosphate
  modified_base 12: mod_base = OTHER; note = 2'-O-methyladenosine-3'-phosphate
  modified_base 13: mod_base = OTHER; note = 2'-O-methyladenosine-3'-phosphate
  modified_base 14: mod_base = OTHER; note = 2'-fluoroadenosine-3'-phosphate
  modified_base 15: mod_base = OTHER; note = 2'-O-methylcytidine-3'-phosphate
  modified_base 16: mod_base = OTHER; note = 2'-fluoroadenosine-3'-phosphate
  modified_base 17: mod_base = OTHER; note = 2'-O-methylcytidine-3'-phosphate
  modified_base 18: mod_base = OTHER; note = 2'-O-methyladenosine-3'-phosphate
  modified_base 19: mod_base = OTHER; note = 2'-O-methyladenosine-3'-phosphate
  modified_base 20: mod_base = OTHER; note = 2'-O-methylguanosine-3'-phosphate
  modified_base 21: mod_base = OTHER; note = 2'-O-methylcytidine-3'-phosphorothioate
  modified_base 22: mod_base = OTHER; note = 2'-O-methylguanosine-3'-phosphorothioate
  modified_base 23: mod_base = OTHER; note = 2'-O-methylguanosine-3'-phosphate
tcagcttgtgtaaacacaagcgg

SEQ ID NO: 2855 - RNA, 23 nt, synthetic construct
  source 1..23: mol_type = other RNA
  modified_base 1: mod_base = OTHER; note = Vinyl-phosphonate 2'-O-methyluridine-3'-phosphorothioate
  modified_base 2: mod_base = OTHER; note = 2'-fluoroadenosine-3'-phosphorothioate
  modified_base 3: mod_base = OTHER; note = 2'-O-methyladenosine-3'-phosphate
  modified_base 4: mod_base = OTHER; note = 2'-O-methylcytidine-3'-phosphate
  modified_base 5: mod_base = OTHER; note = 2'-O-methyladenosine-3'-phosphate
  modified_base 6: mod_base = OTHER; note = 2'-fluoroadenosine-3'-phosphate
  modified_base 7: mod_base = OTHER; note = 2'-O-methylguanosine-3'-phosphate
  modified_base 8: mod_base = OTHER; note = 2'-fluorocytidine-3'-phosphate
  modified_base 9: mod_base = OTHER; note = 2'-fluorocytidine-3'-phosphate
  modified_base 10: mod_base = OTHER; note = 2'-O-methyladenosine-3'-phosphate
  modified_base 11: mod_base = OTHER; note = 2'-O-methyluridine-3'-phosphate
  modified_base 12: mod_base = OTHER; note = 2'-O-methylguanosine-3'-phosphate
  modified_base 13: mod_base = OTHER; note = 2'-O-methyluridine-3'-phosphate
  modified_base 14: mod_base = OTHER; note = 2'-fluoroadenosine-3'-phosphate
  modified_base 15: mod_base = OTHER; note = 2'-O-methyladenosine-3'-phosphate
  modified_base 16: mod_base = OTHER; note = 2'-fluoroguanosine-3'-phosphate
  modified_base 17: mod_base = OTHER; note = 2'-O-methylguanosine-3'-phosphate
  modified_base 18: mod_base = OTHER; note = 2'-O-methylcytidine-3'-phosphate
  modified_base 19: mod_base = OTHER; note = 2'-O-methyladenosine-3'-phosphate
  modified_base 20: mod_base = OTHER; note = 2'-O-methylguanosine-3'-phosphate
  modified_base 21: mod_base = OTHER; note = 2'-O-methylguanosine-3'-phosphorothioate
  modified_base 22: mod_base = OTHER; note = 2'-O-methyluridine-3'-phosphorothioate
  modified_base 23: mod_base = OTHER; note = 2'-O-methylguanosine-3'-phosphate
taacaagccatgtaaggcaggtg

SEQ ID NO: 2856 - RNA, 23 nt, synthetic construct
  source 1..23: mol_type = other RNA
  modified_base 1: mod_base = OTHER; note = Vinyl-phosphonate 2'-O-methyluridine-3'-phosphorothioate
  modified_base 2: mod_base = OTHER; note = 2'-fluorouridine -3'-phosphorothioate
  modified_base 3: mod_base = OTHER; note = 2'-O-methyladenosine-3'-phosphate
  modified_base 4: mod_base = OTHER; note = 2'-O-methyladenosine-3'-phosphate
  modified_base 5: mod_base = OTHER; note = 2'-O-methyluridine-3'-phosphate
  modified_base 6: mod_base = OTHER; note = 2'-fluoroguanosine-3'-phosphate
  modified_base 7: mod_base = OTHER; note = 2'-O-methyluridine-3'-phosphate
  modified_base 8: mod_base = OTHER; note = 2'-fluoroguanosine-3'-phosphate
  modified_base 9: mod_base = OTHER; note = 2'-fluoroadenosine-3'-phosphate
  modified_base 10: mod_base = OTHER; note = 2'-O-methyluridine-3'-phosphate
  modified_base 11: mod_base = OTHER; note = 2'-O-methyladenosine-3'-phosphate
  modified_base 12: mod_base = OTHER; note = 2'-O-methylcytidine-3'-phosphate
  modified_base 13: mod_base = OTHER; note = 2'-O-methyladenosine-3'-phosphate
  modified_base 14: mod_base = OTHER; note = 2'-fluoroadenosine-3'-phosphate
  modified_base 15: mod_base = OTHER; note = 2'-O-methyladenosine-3'-phosphate
  modified_base 16: mod_base = OTHER; note = 2'-fluoroadenosine-3'-phosphate
  modified_base 17: mod_base = OTHER; note = 2'-O-methyladenosine-3'-phosphate
  modified_base 18: mod_base = OTHER; note = 2'-O-methyluridine-3'-phosphate
  modified_base 19: mod_base = OTHER; note = 2'-O-methylcytidine-3'-phosphate
  modified_base 20: mod_base = OTHER; note = 2'-O-methyluridine-3'-phosphate
  modified_base 21: mod_base = OTHER; note = 2'-O-methylcytidine-3'-phosphorothioate
  modified_base 22: mod_base = OTHER; note = 2'-O-methyluridine-3'-phosphorothioate
  modified_base 23: mod_base = OTHER; note = 2'-O-methylcytidine-3'-phosphate
ttaatgtgatacaaaaatctctc

SEQ ID NO: 2857 - RNA, 23 nt, synthetic construct
  source 1..23: mol_type = other RNA
  modified_base 1: mod_base = OTHER; note = Vinyl-phosphonate 2'-O-methyluridine-3'-phosphorothioate
  modified_base 2: mod_base = OTHER; note = 2'-fluoroadenosine-3'-phosphorothioate
  modified_base 3: mod_base = OTHER; note = 2'-O-methylguanosine-3'-phosphate
  modified_base 4: mod_base = OTHER; note = 2'-O-methylguanosine-3'-phosphate
  modified_base 5: mod_base = OTHER; note = 2'-O-methyladenosine-3'-phosphate
  modified_base 6: mod_base = OTHER; note = 2'-fluorocytidine-3'-phosphate
  modified_base 7: mod_base = OTHER; note = 2'-O-methylcytidine-3'-phosphate
  modified_base 8: mod_base = OTHER; note = 2'-fluorouridine-3'-phosphate
  modified_base 9: mod_base = OTHER; note = 2'-fluorouridine-3'-phosphate
  modified_base 10: mod_base = OTHER; note = 2'-O-methylguanosine-3'-phosphate
  modified_base 11: mod_base = OTHER; note = 2'-O-methyluridine-3'-phosphate
  modified_base 12: mod_base = OTHER; note = 2'-O-methylcytidine-3'-phosphate
  modified_base 13: mod_base = OTHER; note = 2'-O-methyluridine-3'-phosphate
  modified_base 14: mod_base = OTHER; note = 2'-fluoroguanosine-3'-phosphate
  modified_base 15: mod_base = OTHER; note = 2'-O-methyladenosine-3'-phosphate
  modified_base 16: mod_base = OTHER; note = 2'-fluoroadenosine-3'-phosphate
  modified_base 17: mod_base = OTHER; note = 2'-O-methylguanosine-3'-phosphate
  modified_base 18: mod_base = OTHER; note = 2'-O-methyluridine-3'-phosphate
  modified_base 19: mod_base = OTHER; note = 2'-O-methylguanosine-3'-phosphate
  modified_base 20: mod_base = OTHER; note = 2'-O-methylcytidine-3'-phosphate
  modified_base 21: mod_base = OTHER; note = 2'-O-methyluridine-3'-phosphorothioate
  modified_base 22: mod_base = OTHER; note = 2'-O-methylcytidine-3'-phosphorothioate
  modified_base 23: mod_base = OTHER; note = 2'-O-methylguanosine-3'-phosphate
taggaccttgtctgaagtgctcg

SEQ ID NO: 2858 - RNA, 23 nt, synthetic construct
  source 1..23: mol_type = other RNA
  modified_base 1: mod_base = OTHER; note = Vinyl-phosphonate 2'-O-methyluridine-3'-phosphorothioate
  modified_base 2: mod_base = OTHER; note = 2'-fluoroadenosine-3'-phosphorothioate
  modified_base 3: mod_base = OTHER; note = 2'-O-methyladenosine-3'-phosphate
  modified_base 4: mod_base = OTHER; note = 2'-O-methyladenosine-3'-phosphate
  modified_base 5: mod_base = OTHER; note = 2'-O-methyladenosine-3'-phosphate
  modified_base 6: mod_base = OTHER; note = 2'-fluorocytidine-3'-phosphate
  modified_base 7: mod_base = OTHER; note = 2'-O-methyluridine-3'-phosphate
  modified_base 8: mod_base = OTHER; note = 2'-fluoroguanosine-3'-phosphate
  modified_base 9: mod_base = OTHER; note = 2'-fluoroguanosine-3'-phosphate
  modified_base 10: mod_base = OTHER; note = 2'-O-methylcytidine-3'-phosphate
  modified_base 11: mod_base = OTHER; note = 2'-O-methyluridine-3'-phosphate
  modified_base 12: mod_base = OTHER; note = 2'-O-methylcytidine-3'-phosphate
  modified_base 13: mod_base = OTHER; note = 2'-O-methyluridine-3'-phosphate
  modified_base 14: mod_base = OTHER; note = 2'-fluoroguanosine-3'-phosphate
  modified_base 15: mod_base = OTHER; note = 2'-O-methyladenosine-3'-phosphate
  modified_base 16: mod_base = OTHER; note = 2'-fluoroguanosine-3'-phosphate
  modified_base 17: mod_base = OTHER; note = 2'-O-methyladenosine-3'-phosphate
  modified_base 18: mod_base = OTHER; note = 2'-O-methylguanosine-3'-phosphate
  modified_base 19: mod_base = OTHER; note = 2'-O-methyluridine-3'-phosphate
  modified_base 20: mod_base = OTHER; note = 2'-O-methylguanosine-3'-phosphate
  modified_base 21: mod_base = OTHER; note = 2'-O-methyladenosine-3'-phosphorothioate
  modified_base 22: mod_base = OTHER; note = 2'-O-methyladenosine-3'-phosphorothioate
  modified_base 23: mod_base = OTHER; note = 2'-O-methylguanosine-3'-phosphate
taaaactggctctgagagtgaag

SEQ ID NO: 2859 - RNA, 23 nt, synthetic construct
  source 1..23: mol_type = other RNA
  modified_base 1: mod_base = OTHER; note = Vinyl-phosphonate 2'-O-methyluridine-3'-phosphorothioate
  modified_base 2: mod_base = OTHER; note = 2'-fluoroadenosine-3'-phosphorothioate
  modified_base 3: mod_base = OTHER; note = 2'-O-methylguanosine-3'-phosphate
  modified_base 4: mod_base = OTHER; note = 2'-O-methyladenosine-3'-phosphate
  modified_base 5: mod_base = OTHER; note = 2'-O-methyluridine-3'-phosphate
  modified_base 6: mod_base = OTHER; note = 2'-fluorocytidine-3'-phosphate
  modified_base 7: mod_base = OTHER; note = 2'-O-methyladenosine-3'-phosphate
  modified_base 8: mod_base = OTHER; note = 2'-fluorocytidine-3'-phosphate
  modified_base 9: mod_base = OTHER; note = 2'-fluoroadenosine-3'-phosphate
  modified_base 10: mod_base = OTHER; note = 2'-O-methylguanosine-3'-phosphate
  modified_base 11: mod_base = OTHER; note = 2'-O-methyladenosine-3'-phosphate
  modified_base 12: mod_base = OTHER; note = 2'-O-methylguanosine-3'-phosphate
  modified_base 13: mod_base = OTHER; note = 2'-O-methylguanosine-3'-phosphate
  modified_base 14: mod_base = OTHER; note = 2'-fluoroadenosine-3'-phosphate
  modified_base 15: mod_base = OTHER; note = 2'-O-methylguanosine-3'-phosphate
  modified_base 16: mod_base = OTHER; note = 2'-fluorouridine-3'-phosphate
  modified_base 17: mod_base = OTHER; note = 2'-O-methyluridine-3'-phosphate
  modified_base 18: mod_base = OTHER; note = 2'-O-methylcytidine-3'-phosphate
  modified_base 19: mod_base = OTHER; note = 2'-O-methyladenosine-3'-phosphate
  modified_base 20: mod_base = OTHER; note = 2'-O-methylguanosine-3'-phosphate
  modified_base 21: mod_base = OTHER; note = 2'-O-methyluridine-3'-phosphorothioate
  modified_base 22: mod_base = OTHER; note = 2'-O-methylguanosine-3'-phosphorothioate
  modified_base 23: mod_base = OTHER; note = 2'-O-methylcytidine-3'-phosphate
tagatcacagaggagttcagtgc

SEQ ID NO: 2860 - RNA, 23 nt, synthetic construct
  source 1..23: mol_type = other RNA
  modified_base 1: mod_base = OTHER; note = Vinyl-phosphonate 2'-O-methyluridine-3'-phosphorothioate
  modified_base 2: mod_base = OTHER; note = 2'-fluoroadenosine-3'-phosphorothioate
  modified_base 3: mod_base = OTHER; note = 2'-O-methylguanosine-3'-phosphate
  modified_base 4: mod_base = OTHER; note = 2'-O-methyluridine-3'-phosphate
  modified_base 5: mod_base = OTHER; note = 2'-O-methylcytidine-3'-phosphate
  modified_base 6: mod_base = OTHER; note = 2'-fluorocytidine-3'-phosphate
  modified_base 7: mod_base = OTHER; note = 2'-O-methyladenosine-3'-phosphate
  modified_base 8: mod_base = OTHER; note = 2'-fluorouridine-3'-phosphate
  modified_base 9: mod_base = OTHER; note = 2'-fluorocytidine-3'-phosphate
  modified_base 10: mod_base = OTHER; note = 2'-O-methyladenosine-3'-phosphate
  modified_base 11: mod_base = OTHER; note = 2'-O-methyluridine-3'-phosphate
  modified_base 12: mod_base = OTHER; note = 2'-O-methyluridine-3'-phosphate
  modified_base 13: mod_base = OTHER; note = 2'-O-methyladenosine-3'-phosphate
  modified_base 14: mod_base = OTHER; note = 2'-fluoroguanosine-3'-phosphate
  modified_base 15: mod_base = OTHER; note = 2'-O-methylguanosine-3'-phosphate
  modified_base 16: mod_base = OTHER; note = 2'-fluoroguanosine-3'-phosphate
  modified_base 17: mod_base = OTHER; note = 2'-O-methyladenosine-3'-phosphate
  modified_base 18: mod_base = OTHER; note = 2'-O-methyladenosine-3'-phosphate
  modified_base 19: mod_base = OTHER; note = 2'-O-methylcytidine-3'-phosphate
  modified_base 20: mod_base = OTHER; note = 2'-O-methyluridine-3'-phosphate
  modified_base 21: mod_base = OTHER; note = 2'-O-methyladenosine-3'-phosphorothioate
  modified_base 22: mod_base = OTHER; note = 2'-O-methylguanosine-3'-phosphorothioate
  modified_base 23: mod_base = OTHER; note = 2'-O-methyluridine-3'-phosphate
tagtccatcattagggaactagt

SEQ ID NO: 2861 - RNA, 23 nt, synthetic construct
  source 1..23: mol_type = other RNA
  modified_base 1: mod_base = OTHER; note = Vinyl-phosphonate 2'-O-methyluridine-3'-phosphorothioate
  modified_base 2: mod_base = OTHER; note = 2'-fluoroadenosine-3'-phosphorothioate
  modified_base 3: mod_base = OTHER; note = 2'-O-methylcytidine-3'-phosphate
  modified_base 4: mod_base = OTHER; note = 2'-O-methylcytidine-3'-phosphate
  modified_base 5: mod_base = OTHER; note = 2'-O-methyladenosine-3'-phosphate
  modified_base 6: mod_base = OTHER; note = 2'-fluorocytidine-3'-phosphate
  modified_base 7: mod_base = OTHER; note = 2'-O-methylguanosine-3'-phosphate
  modified_base 8: mod_base = OTHER; note = 2'-fluorouridine-3'-phosphate
  modified_base 9: mod_base = OTHER; note = 2'-fluorouridine-3'-phosphate
  modified_base 10: mod_base = OTHER; note = 2'-O-methylguanosine-3'-phosphate
  modified_base 11: mod_base = OTHER; note = 2'-O-methyluridine-3'-phosphate
  modified_base 12: mod_base = OTHER; note = 2'-O-methylcytidine-3'-phosphate
  modified_base 13: mod_base = OTHER; note = 2'-O-methyladenosine-3'-phosphate
  modified_base 14: mod_base = OTHER; note = 2'-fluoroguanosine-3'-phosphate
  modified_base 15: mod_base = OTHER; note = 2'-O-methyluridine-3'-phosphate
  modified_base 16: mod_base = OTHER; note = 2'-fluoroadenosine-3'-phosphate
  modified_base 17: mod_base = OTHER; note = 2'-O-methyladenosine-3'-phosphate
  modified_base 18: mod_base = OTHER; note = 2'-O-methylcytidine-3'-phosphate
  modified_base 19: mod_base = OTHER; note = 2'-O-methylguanosine-3'-phosphate
  modified_base 20: mod_base = OTHER; note = 2'-O-methylcytidine-3'-phosphate
  modified_base 21: mod_base = OTHER; note = 2'-O-methylcytidine-3'-phosphorothioate
  modified_base 22: mod_base = OTHER; note = 2'-O-methylcytidine-3'-phosphorothioate
  modified_base 23: mod_base = OTHER; note = 2'-O-methyluridine-3'-phosphate
taccacgttgtcagtaacgccct

SEQ ID NO: 2862 - RNA, 23 nt, synthetic construct
  source 1..23: mol_type = other RNA
  modified_base 1: mod_base = OTHER; note = Vinyl-phosphonate 2'-O-methyluridine-3'-phosphorothioate
  modified_base 2: mod_base = OTHER; note = 2'-fluoroguanosine-3'-phosphorothioate
  modified_base 3: mod_base = OTHER; note = 2'-O-methyladenosine-3'-phosphate
  modified_base 4: mod_base = OTHER; note = 2'-O-methyladenosine-3'-phosphate
  modified_base 5: mod_base = OTHER; note = 2'-O-methylcytidine-3'-phosphate
  modified_base 6: mod_base = OTHER; note = 2'-fluoroadenosine-3'-phosphate
  modified_base 7: mod_base = OTHER; note = 2'-O-methylguanosine-3'-phosphate
  modified_base 8: mod_base = OTHER; note = 2'-fluoroadenosine-3'-phosphate
  modified_base 9: mod_base = OTHER; note = 2'-fluorouridine-3'-phosphate
  modified_base 10: mod_base = OTHER; note = 2'-O-methylcytidine-3'-phosphate
  modified_base 11: mod_base = OTHER; note = 2'-O-methyladenosine-3'-phosphate
  modified_base 12: mod_base = OTHER; note = 2'-O-methyluridine-3'-phosphate
  modified_base 13: mod_base = OTHER; note = 2'-O-methylcytidine-3'-phosphate
  modified_base 14: mod_base = OTHER; note = 2'-fluorocytidine-3'-phosphate
  modified_base 15: mod_base = OTHER; note = 2'-O-methyluridine-3'-phosphate
  modified_base 16: mod_base = OTHER; note = 2'-fluoroadenosine-3'-phosphate
  modified_base 17: mod_base = OTHER; note = 2'-O-methylguanosine-3'-phosphate
  modified_base 18: mod_base = OTHER; note = 2'-O-methyladenosine-3'-phosphate
  modified_base 19: mod_base = OTHER; note = 2'-O-methyluridine-3'-phosphate
  modified_base 20: mod_base = OTHER; note = 2'-O-methylcytidine-3'-phosphate
  modified_base 21: mod_base = OTHER; note = 2'-O-methyladenosine-3'-phosphorothioate
  modified_base 22: mod_base = OTHER; note = 2'-O-methylcytidine-3'-phosphorothioate
  modified_base 23: mod_base = OTHER; note = 2'-O-methyladenosine-3'-phosphate
tgaacagatcatcctagatcaca

SEQ ID NO: 2863 - RNA, 23 nt, synthetic construct
  source 1..23: mol_type = other RNA
  modified_base 1: mod_base = OTHER; note = Vinyl-phosphonate 2'-O-methyluridine-3'-phosphorothioate
  modified_base 2: mod_base = OTHER; note = 2'-fluorouridine -3'-phosphorothioate
  modified_base 3: mod_base = OTHER; note = 2'-O-methyladenosine-3'-phosphate
  modified_base 4: mod_base = OTHER; note = 2'-O-methyladenosine-3'-phosphate
  modified_base 5: mod_base = OTHER; note = 2'-O-methyladenosine-3'-phosphate
  modified_base 6: mod_base = OTHER; note = 2'-fluoroguanosine-3'-phosphate
  modified_base 7: mod_base = OTHER; note = 2'-O-methyluridine-3'-phosphate
  modified_base 8: mod_base = OTHER; note = 2'-fluorocytidine-3'-phosphate
  modified_base 9: mod_base = OTHER; note = 2'-fluorouridine-3'-phosphate
  modified_base 10: mod_base = OTHER; note = 2'-O-methyladenosine-3'-phosphate
  modified_base 11: mod_base = OTHER; note = 2'-O-methyluridine-3'-phosphate
  modified_base 12: mod_base = OTHER; note = 2'-O-methyladenosine-3'-phosphate
  modified_base 13: mod_base = OTHER; note = 2'-O-methyluridine-3'-phosphate
  modified_base 14: mod_base = OTHER; note = 2'-fluoroadenosine-3'-phosphate
  modified_base 15: mod_base = OTHER; note = 2'-O-methyluridine-3'-phosphate
  modified_base 16: mod_base = OTHER; note = 2'-fluorocytidine-3'-phosphate
  modified_base 17: mod_base = OTHER; note = 2'-O-methyladenosine-3'-phosphate
  modified_base 18: mod_base = OTHER; note = 2'-O-methyluridine-3'-phosphate
  modified_base 19: mod_base = OTHER; note = 2'-O-methylcytidine-3'-phosphate
  modified_base 20: mod_base = OTHER; note = 2'-O-methyladenosine-3'-phosphate
  modified_base 21: mod_base = OTHER; note = 2'-O-methylcytidine-3'-phosphorothioate
  modified_base 22: mod_base = OTHER; note = 2'-O-methylcytidine-3'-phosphorothioate
  modified_base 23: mod_base = OTHER; note = 2'-O-methyladenosine-3'-phosphate
ttaaagtctatatatcatcacca

SEQ ID NO: 2864 - RNA, 23 nt, synthetic construct
  source 1..23: mol_type = other RNA
  modified_base 1: mod_base = OTHER; note = Vinyl-phosphonate 2'-O-methyluridine-3'-phosphorothioate
  modified_base 2: mod_base = OTHER; note = 2'-fluorouridine -3'-phosphorothioate
  modified_base 3: mod_base = OTHER; note = 2'-O-methyluridine-3'-phosphate
  modified_base 4: mod_base = OTHER; note = 2'-O-methylguanosine-3'-phosphate
  modified_base 5: mod_base = OTHER; note = 2'-O-methyluridine-3'-phosphate
  modified_base 6: mod_base = OTHER; note = 2'-fluorouridine-3'-phosphate
  modified_base 7: mod_base = OTHER; note = 2'-O-methylcytidine-3'-phosphate
  modified_base 8: mod_base = OTHER; note = 2'-fluorocytidine-3'-phosphate
  modified_base 9: mod_base = OTHER; note = 2'-fluorocytidine-3'-phosphate
  modified_base 10: mod_base = OTHER; note = 2'-O-methyluridine-3'-phosphate
  modified_base 11: mod_base = OTHER; note = 2'-O-methyluridine-3'-phosphate
  modified_base 12: mod_base = OTHER; note = 2'-O-methylcytidine-3'-phosphate
  modified_base 13: mod_base = OTHER; note = 2'-O-methyladenosine-3'-phosphate
  modified_base 14: mod_base = OTHER; note = 2'-fluoroadenosine-3'-phosphate
  modified_base 15: mod_base = OTHER; note = 2'-O-methyladenosine-3'-phosphate
  modified_base 16: mod_base = OTHER; note = 2'-fluoroguanosine-3'-phosphate
  modified_base 17: mod_base = OTHER; note = 2'-O-methyluridine-3'-phosphate
  modified_base 18: mod_base = OTHER; note = 2'-O-methyladenosine-3'-phosphate
  modified_base 19: mod_base = OTHER; note = 2'-O-methylguanosine-3'-phosphate
  modified_base 20: mod_base = OTHER; note = 2'-O-methylcytidine-3'-phosphate
  modified_base 21: mod_base = OTHER; note = 2'-O-methylcytidine-3'-phosphorothioate
  modified_base 22: mod_base = OTHER; note = 2'-O-methyluridine-3'-phosphorothioate
  modified_base 23: mod_base = OTHER; note = 2'-O-methylguanosine-3'-phosphate
tttgttcccttcaaagtagcctg

SEQ ID NO: 2865 - RNA, 23 nt, synthetic construct
  source 1..23: mol_type = other RNA
  modified_base 1: mod_base = OTHER; note = Vinyl-phosphonate 2'-O-methyluridine-3'-phosphorothioate
  modified_base 2: mod_base = OTHER; note = 2'-fluoroadenosine-3'-phosphorothioate
  modified_base 3: mod_base = OTHER; note = 2'-O-methyladenosine-3'-phosphate
  modified_base 4: mod_base = OTHER; note = 2'-O-methylguanosine-3'-phosphate
  modified_base 5: mod_base = OTHER; note = 2'-O-methylcytidine-3'-phosphate
  modified_base 6: mod_base = OTHER; note = 2'-fluorocytidine-3'-phosphate
  modified_base 7: mod_base = OTHER; note = 2'-O-methyladenosine-3'-phosphate
  modified_base 8: mod_base = OTHER; note = 2'-fluorouridine-3'-phosphate
  modified_base 9: mod_base = OTHER; note = 2'-fluoroadenosine-3'-phosphate
  modified_base 10: mod_base = OTHER; note = 2'-O-methylguanosine-3'-phosphate
  modified_base 11: mod_base = OTHER; note = 2'-O-methyladenosine-3'-phosphate
  modified_base 12: mod_base = OTHER; note = 2'-O-methyladenosine-3'-phosphate
  modified_base 13: mod_base = OTHER; note = 2'-O-methyluridine-3'-phosphate
  modified_base 14: mod_base = OTHER; note = 2'-fluorocytidine-3'-phosphate
  modified_base 15: mod_base = OTHER; note = 2'-O-methyladenosine-3'-phosphate
  modified_base 16: mod_base = OTHER; note = 2'-fluoroguanosine-3'-phosphate
  modified_base 17: mod_base = OTHER; note = 2'-O-methyladenosine-3'-phosphate
  modified_base 18: mod_base = OTHER; note = 2'-O-methylguanosine-3'-phosphate
  modified_base 19: mod_base = OTHER; note = 2'-O-methylcytidine-3'-phosphate
  modified_base 20: mod_base = OTHER; note = 2'-O-methyladenosine-3'-phosphate
  modified_base 21: mod_base = OTHER; note = 2'-O-methylguanosine-3'-phosphorothioate
  modified_base 22: mod_base = OTHER; note = 2'-O-methylguanosine-3'-phosphorothioate
  modified_base 23: mod_base = OTHER; note = 2'-O-methylcytidine-3'-phosphate
taagccatagaatcagagcaggc

SEQ ID NO: 2866 - RNA, 23 nt, synthetic construct
  source 1..23: mol_type = other RNA
  modified_base 1: mod_base = OTHER; note = Vinyl-phosphonate 2'-O-methyluridine-3'-phosphorothioate
  modified_base 2: mod_base = OTHER; note = 2'-fluorocytidine-3'-phosphorothioate
  modified_base 3: mod_base = OTHER; note = 2'-O-methyluridine-3'-phosphate
  modified_base 4: mod_base = OTHER; note = 2'-O-methyluridine-3'-phosphate
  modified_base 5: mod_base = OTHER; note = 2'-O-methylcytidine-3'-phosphate
  modified_base 6: mod_base = OTHER; note = 2'-fluoroadenosine-3'-phosphate
  modified_base 7: mod_base = OTHER; note = 2'-O-methylguanosine-3'-phosphate
  modified_base 8: mod_base = OTHER; note = 2'-fluorocytidine-3'-phosphate
  modified_base 9: mod_base = OTHER; note = 2'-fluorouridine-3'-phosphate
  modified_base 10: mod_base = OTHER; note = 2'-O-methylcytidine-3'-phosphate
  modified_base 11: mod_base = OTHER; note = 2'-O-methyladenosine-3'-phosphate
  modified_base 12: mod_base = OTHER; note = 2'-O-methylguanosine-3'-phosphate
  modified_base 13: mod_base = OTHER; note = 2'-O-methyladenosine-3'-phosphate
  modified_base 14: mod_base = OTHER; note = 2'-fluoroadenosine-3'-phosphate
  modified_base 15: mod_base = OTHER; note = 2'-O-methylguanosine-3'-phosphate
  modified_base 16: mod_base = OTHER; note = 2'-fluorocytidine-3'-phosphate
  modified_base 17: mod_base = OTHER; note = 2'-O-methyladenosine-3'-phosphate
  modified_base 18: mod_base = OTHER; note = 2'-O-methyladenosine-3'-phosphate
  modified_base 19: mod_base = OTHER; note = 2'-O-methyluridine-3'-phosphate
  modified_base 20: mod_base = OTHER; note = 2'-O-methylcytidine-3'-phosphate
  modified_base 21: mod_base = OTHER; note = 2'-O-methyluridine-3'-phosphorothioate
  modified_base 22: mod_base = OTHER; note = 2'-O-methyluridine-3'-phosphorothioate
  modified_base 23: mod_base = OTHER; note = 2'-O-methyluridine-3'-phosphate
tcttcagctcagaagcaatcttt

SEQ ID NO: 2867 - RNA, 23 nt, synthetic construct
  source 1..23: mol_type = other RNA
  modified_base 1: mod_base = OTHER; note = Vinyl-phosphonate 2'-O-methyluridine-3'-phosphorothioate
  modified_base 2: mod_base = OTHER; note = 2'-fluorocytidine-3'-phosphorothioate
  modified_base 3: mod_base = OTHER; note = 2'-O-methyluridine-3'-phosphate
  modified_base 4: mod_base = OTHER; note = 2'-O-methylguanosine-3'-phosphate
  modified_base 5: mod_base = OTHER; note = 2'-O-methylcytidine-3'-phosphate
  modified_base 6: mod_base = OTHER; note = 2'-fluoroadenosine-3'-phosphate
  modified_base 7: mod_base = OTHER; note = 2'-O-methyluridine-3'-phosphate
  modified_base 8: mod_base = OTHER; note = 2'-fluoroadenosine-3'-phosphate
  modified_base 9: mod_base = OTHER; note = 2'-fluorocytidine-3'-phosphate
  modified_base 10: mod_base = OTHER; note = 2'-O-methyladenosine-3'-phosphate
  modified_base 11: mod_base = OTHER; note = 2'-O-methylcytidine-3'-phosphate
  modified_base 12: mod_base = OTHER; note = 2'-O-methyladenosine-3'-phosphate
  modified_base 13: mod_base = OTHER; note = 2'-O-methyladenosine-3'-phosphate
  modified_base 14: mod_base = OTHER; note = 2'-fluoroguanosine-3'-phosphate
  modified_base 15: mod_base = OTHER; note = 2'-O-methyladenosine-3'-phosphate
  modified_base 16: mod_base = OTHER; note = 2'-fluoroguanosine-3'-phosphate
  modified_base 17: mod_base = OTHER; note = 2'-O-methyladenosine-3'-phosphate
  modified_base 18: mod_base = OTHER; note = 2'-O-methyluridine-3'-phosphate
  modified_base 19: mod_base = OTHER; note = 2'-O-methylguanosine-3'-phosphate
  modified_base 20: mod_base = OTHER; note = 2'-O-methylguanosine-3'-phosphate
  modified_base 21: mod_base = OTHER; note = 2'-O-methylcytidine-3'-phosphorothioate
  modified_base 22: mod_base = OTHER; note = 2'-O-methyladenosine-3'-phosphorothioate
  modified_base 23: mod_base = OTHER; note = 2'-O-methylcytidine-3'-phosphate
tctgcatacacaagagatggcac

SEQ ID NO: 2868 - RNA, 23 nt, synthetic construct
  source 1..23: mol_type = other RNA
  modified_base 1: mod_base = OTHER; note = Vinyl-phosphonate 2'-O-methyluridine-3'-phosphorothioate
  modified_base 2: mod_base = OTHER; note = 2'-fluoroadenosine-3'-phosphorothioate
  modified_base 3: mod_base = OTHER; note = 2'-O-methyluridine-3'-phosphate
  modified_base 4: mod_base = OTHER; note = 2'-O-methylguanosine-3'-phosphate
  modified_base 5: mod_base = OTHER; note = 2'-O-methylcytidine-3'-phosphate
  modified_base 6: mod_base = OTHER; note = 2'-fluoroadenosine-3'-phosphate
  modified_base 7: mod_base = OTHER; note = 2'-O-methyladenosine-3'-phosphate
  modified_base 8: mod_base = OTHER; note = 2'-fluoroadenosine-3'-phosphate
  modified_base 9: mod_base = OTHER; note = 2'-fluorouridine-3'-phosphate
  modified_base 10: mod_base = OTHER; note = 2'-O-methylguanosine-3'-phosphate
  modified_base 11: mod_base = OTHER; note = 2'-O-methylguanosine-3'-phosphate
  modified_base 12: mod_base = OTHER; note = 2'-O-methyladenosine-3'-phosphate
  modified_base 13: mod_base = OTHER; note = 2'-O-methyladenosine-3'-phosphate
  modified_base 14: mod_base = OTHER; note = 2'-fluoroadenosine-3'-phosphate
  modified_base 15: mod_base = OTHER; note = 2'-O-methyluridine-3'-phosphate
  modified_base 16: mod_base = OTHER; note = 2'-fluoroguanosine-3'-phosphate
  modified_base 17: mod_base = OTHER; note = 2'-O-methyluridine-3'-phosphate
  modified_base 18: mod_base = OTHER; note = 2'-O-methylguanosine-3'-phosphate
  modified_base 19: mod_base = OTHER; note = 2'-O-methylguanosine-3'-phosphate
  modified_base 20: mod_base = OTHER; note = 2'-O-methylcytidine-3'-phosphate
  modified_base 21: mod_base = OTHER; note = 2'-O-methyluridine-3'-phosphorothioate
  modified_base 22: mod_base = OTHER; note = 2'-O-methylguanosine-3'-phosphorothioate
  modified_base 23: mod_base = OTHER; note = 2'-O-methyluridine-3'-phosphate
tatgcaaatggaaatgtggctgt

SEQ ID NO: 2869 - RNA, 23 nt, synthetic construct
  source 1..23: mol_type = other RNA
  modified_base 1: mod_base = OTHER; note = Vinyl-phosphonate 2'-O-methyluridine-3'-phosphorothioate
  modified_base 2: mod_base = OTHER; note = 2'-fluoroguanosine-3'-phosphorothioate
  modified_base 3: mod_base = OTHER; note = 2'-O-methyluridine-3'-phosphate
  modified_base 4: mod_base = OTHER; note = 2'-O-methylcytidine-3'-phosphate
  modified_base 5: mod_base = OTHER; note = 2'-O-methyladenosine-3'-phosphate
  modified_base 6: mod_base = OTHER; note = 2'-fluoroadenosine-3'-phosphate
  modified_base 7: mod_base = OTHER; note = 2'-O-methyladenosine-3'-phosphate
  modified_base 8: mod_base = OTHER; note = 2'-fluoroadenosine-3'-phosphate
  modified_base 9: mod_base = OTHER; note = 2'-fluorocytidine-3'-phosphate
  modified_base 10: mod_base = OTHER; note = 2'-O-methylcytidine-3'-phosphate
  modified_base 11: mod_base = OTHER; note = 2'-O-methyluridine-3'-phosphate
  modified_base 12: mod_base = OTHER; note = 2'-O-methyluridine-3'-phosphate
  modified_base 13: mod_base = OTHER; note = 2'-O-methylcytidine-3'-phosphate
  modified_base 14: mod_base = OTHER; note = 2'-fluorouridine-3'-phosphate
  modified_base 15: mod_base = OTHER; note = 2'-O-methylguanosine-3'-phosphate
  modified_base 16: mod_base = OTHER; note = 2'-fluorouridine-3'-phosphate
  modified_base 17: mod_base = OTHER; note = 2'-O-methylcytidine-3'-phosphate
  modified_base 18: mod_base = OTHER; note = 2'-O-methyluridine-3'-phosphate
  modified_base 19: mod_base = OTHER; note = 2'-O-methylguanosine-3'-phosphate
  modified_base 20: mod_base = OTHER; note = 2'-O-methylguanosine-3'-phosphate
  modified_base 21: mod_base = OTHER; note = 2'-O-methyladenosine-3'-phosphorothioate
  modified_base 22: mod_base = OTHER; note = 2'-O-methylcytidine-3'-phosphorothioate
  modified_base 23: mod_base = OTHER; note = 2'-O-methylcytidine-3'-phosphate
tgtcaaaaccttctgtctggacc

SEQ ID NO: 2870 - RNA, 23 nt, synthetic construct
  source 1..23: mol_type = other RNA
  modified_base 1: mod_base = OTHER; note = Vinyl-phosphonate 2'-O-methyluridine-3'-phosphorothioate
  modified_base 2: mod_base = OTHER; note = 2'-fluorouridine -3'-phosphorothioate
  modified_base 3: mod_base = OTHER; note = 2'-O-methylcytidine-3'-phosphate
  modified_base 4: mod_base = OTHER; note = 2'-O-methyluridine-3'-phosphate
  modified_base 5: mod_base = OTHER; note = 2'-O-methylguanosine-3'-phosphate
  modified_base 6: mod_base = OTHER; note = 2'-fluorocytidine-3'-phosphate
  modified_base 7: mod_base = OTHER; note = 2'-O-methyladenosine-3'-phosphate
  modified_base 8: mod_base = OTHER; note = 2'-fluorocytidine-3'-phosphate
  modified_base 9: mod_base = OTHER; note = 2'-fluoroguanosine-3'-phosphate
  modified_base 10: mod_base = OTHER; note = 2'-O-methylguanosine-3'-phosphate
  modified_base 11: mod_base = OTHER; note = 2'-O-methyluridine-3'-phosphate
  modified_base 12: mod_base = OTHER; note = 2'-O-methylguanosine-3'-phosphate
  modified_base 13: mod_base = OTHER; note = 2'-O-methyluridine-3'-phosphate
  modified_base 14: mod_base = OTHER; note = 2'-fluoroadenosine-3'-phosphate
  modified_base 15: mod_base = OTHER; note = 2'-O-methyluridine-3'-phosphate
  modified_base 16: mod_base = OTHER; note = 2'-fluorocytidine-3'-phosphate
  modified_base 17: mod_base = OTHER; note = 2'-O-methylguanosine-3'-phosphate
  modified_base 18: mod_base = OTHER; note = 2'-O-methyladenosine-3'-phosphate
  modified_base 19: mod_base = OTHER; note = 2'-O-methylguanosine-3'-phosphate
  modified_base 20: mod_base = OTHER; note = 2'-O-methyladenosine-3'-phosphate
  modified_base 21: mod_base = OTHER; note = 2'-O-methylguanosine-3'-phosphorothioate
  modified_base 22: mod_base = OTHER; note = 2'-O-methyladenosine-3'-phosphorothioate
  modified_base 23: mod_base = OTHER; note = 2'-O-methylguanosine-3'-phosphate
ttctgcacggtgtatcgagagag

SEQ ID NO: 2871 - RNA, 23 nt, synthetic construct
  source 1..23: mol_type = other RNA
  modified_base 1: mod_base = OTHER; note = Vinyl-phosphonate 2'-O-methyluridine-3'-phosphorothioate
  modified_base 2: mod_base = OTHER; note = 2'-fluoroadenosine-3'-phosphorothioate
  modified_base 3: mod_base = OTHER; note = 2'-O-methyluridine-3'-phosphate
  modified_base 4: mod_base = OTHER; note = 2'-O-methyladenosine-3'-phosphate
  modified_base 5: mod_base = OTHER; note = 2'-O-methyladenosine-3'-phosphate
  modified_base 6: mod_base = OTHER; note = 2'-fluoroadenosine-3'-phosphate
  modified_base 7: mod_base = OTHER; note = 2'-O-methyladenosine-3'-phosphate
  modified_base 8: mod_base = OTHER; note = 2'-fluoroadenosine-3'-phosphate
  modified_base 9: mod_base = OTHER; note = 2'-fluorouridine-3'-phosphate
  modified_base 10: mod_base = OTHER; note = 2'-O-methyladenosine-3'-phosphate
  modified_base 11: mod_base = OTHER; note = 2'-O-methyladenosine-3'-phosphate
  modified_base 12: mod_base = OTHER; note = 2'-O-methyladenosine-3'-phosphate
  modified_base 13: mod_base = OTHER; note = 2'-O-methyladenosine-3'-phosphate
  modified_base 14: mod_base = OTHER; note = 2'-fluoroadenosine-3'-phosphate
  modified_base 15: mod_base = OTHER; note = 2'-O-methylguanosine-3'-phosphate
  modified_base 16: mod_base = OTHER; note = 2'-fluorouridine-3'-phosphate
  modified_base 17: mod_base = OTHER; note = 2'-O-methylguanosine-3'-phosphate
  modified_base 18: mod_base = OTHER; note = 2'-O-methylcytidine-3'-phosphate
  modified_base 19: mod_base = OTHER; note = 2'-O-methylguanosine-3'-phosphate
  modified_base 20: mod_base = OTHER; note = 2'-O-methylcytidine-3'-phosphate
  modified_base 21: mod_base = OTHER; note = 2'-O-methylcytidine-3'-phosphorothioate
  modified_base 22: mod_base = OTHER; note = 2'-O-methyluridine-3'-phosphorothioate
  modified_base 23: mod_base = OTHER; note = 2'-O-methyluridine-3'-phosphate
tataaaaataaaaagtgcgcctt

SEQ ID NO: 2872 - RNA, 23 nt, synthetic construct
  source 1..23: mol_type = other RNA
  modified_base 1: mod_base = OTHER; note = Vinyl-phosphonate 2'-O-methyluridine-3'-phosphorothioate
  modified_base 2: mod_base = OTHER; note = 2'-fluorocytidine-3'-phosphorothioate
  modified_base 3: mod_base = OTHER; note = 2'-O-methyluridine-3'-phosphate
  modified_base 4: mod_base = OTHER; note = 2'-O-methyluridine-3'-phosphate
  modified_base 5: mod_base = OTHER; note = 2'-O-methyluridine-3'-phosphate
  modified_base 6: mod_base = OTHER; note = 2'-fluoroguanosine-3'-phosphate
  modified_base 7: mod_base = OTHER; note = 2'-O-methyladenosine-3'-phosphate
  modified_base 8: mod_base = OTHER; note = 2'-fluoroadenosine-3'-phosphate
  modified_base 9: mod_base = OTHER; note = 2'-fluoroadenosine-3'-phosphate
  modified_base 10: mod_base = OTHER; note = 2'-O-methylguanosine-3'-phosphate
  modified_base 11: mod_base = OTHER; note = 2'-O-methyluridine-3'-phosphate
  modified_base 12: mod_base = OTHER; note = 2'-O-methylguanosine-3'-phosphate
  modified_base 13: mod_base = OTHER; note = 2'-O-methylguanosine-3'-phosphate
  modified_base 14: mod_base = OTHER; note = 2'-fluorocytidine-3'-phosphate
  modified_base 15: mod_base = OTHER; note = 2'-O-methyladenosine-3'-phosphate
  modified_base 16: mod_base = OTHER; note = 2'-fluoroadenosine-3'-phosphate
  modified_base 17: mod_base = OTHER; note = 2'-O-methylcytidine-3'-phosphate
  modified_base 18: mod_base = OTHER; note = 2'-O-methylguanosine-3'-phosphate
  modified_base 19: mod_base = OTHER; note = 2'-O-methylcytidine-3'-phosphate
  modified_base 20: mod_base = OTHER; note = 2'-O-methyluridine-3'-phosphate
  modified_base 21: mod_base = OTHER; note = 2'-O-methylcytidine-3'-phosphorothioate
  modified_base 22: mod_base = OTHER; note = 2'-O-methylguanosine-3'-phosphorothioate
  modified_base 23: mod_base = OTHER; note = 2'-O-methylcytidine-3'-phosphate
tctttgaaagtggcaacgctcgc

SEQ ID NO: 2873 - RNA, 23 nt, synthetic construct
  source 1..23: mol_type = other RNA
  modified_base 1: mod_base = OTHER; note = Vinyl-phosphonate 2'-O-methyluridine-3'-phosphorothioate
  modified_base 2: mod_base = OTHER; note = 2'-fluorouridine -3'-phosphorothioate
  modified_base 3: mod_base = OTHER; note = 2'-O-methylguanosine-3'-phosphate
  modified_base 4: mod_base = OTHER; note = 2'-O-methyladenosine-3'-phosphate
  modified_base 5: mod_base = OTHER; note = 2'-O-methyladenosine-3'-phosphate
  modified_base 6: mod_base = OTHER; note = 2'-fluoroguanosine-3'-phosphate
  modified_base 7: mod_base = OTHER; note = 2'-O-methylguanosine-3'-phosphate
  modified_base 8: mod_base = OTHER; note = 2'-fluorocytidine-3'-phosphate
  modified_base 9: mod_base = OTHER; note = 2'-fluoroadenosine-3'-phosphate
  modified_base 10: mod_base = OTHER; note = 2'-O-methylguanosine-3'-phosphate
  modified_base 11: mod_base = OTHER; note = 2'-O-methyluridine-3'-phosphate
  modified_base 12: mod_base = OTHER; note = 2'-O-methyladenosine-3'-phosphate
  modified_base 13: mod_base = OTHER; note = 2'-O-methyladenosine-3'-phosphate
  modified_base 14: mod_base = OTHER; note = 2'-fluorouridine-3'-phosphate
  modified_base 15: mod_base = OTHER; note = 2'-O-methylguanosine-3'-phosphate
  modified_base 16: mod_base = OTHER; note = 2'-fluoroadenosine-3'-phosphate
  modified_base 17: mod_base = OTHER; note = 2'-O-methyluridine-3'-phosphate
  modified_base 18: mod_base = OTHER; note = 2'-O-methylguanosine-3'-phosphate
  modified_base 19: mod_base = OTHER; note = 2'-O-methylcytidine-3'-phosphate
  modified_base 20: mod_base = OTHER; note = 2'-O-methyladenosine-3'-phosphate
  modified_base 21: mod_base = OTHER; note = 2'-O-methyladenosine-3'-phosphorothioate
  modified_base 22: mod_base = OTHER; note = 2'-O-methyladenosine-3'-phosphorothioate
  modified_base 23: mod_base = OTHER; note = 2'-O-methyluridine-3'-phosphate
ttgaaggcagtaatgatgcaaat

SEQ ID NO: 2874 - RNA, 23 nt, synthetic construct
  source 1..23: mol_type = other RNA
  modified_base 1: mod_base = OTHER; note = Vinyl-phosphonate 2'-O-methyluridine-3'-phosphorothioate
  modified_base 2: mod_base = OTHER; note = 2'-fluorocytidine-3'-phosphorothioate
  modified_base 3: mod_base = OTHER; note = 2'-O-methylguanosine-3'-phosphate
  modified_base 4: mod_base = OTHER; note = 2'-O-methyladenosine-3'-phosphate
  modified_base 5: mod_base = OTHER; note = 2'-O-methylcytidine-3'-phosphate
  modified_base 6: mod_base = OTHER; note = 2'-fluorouridine-3'-phosphate
  modified_base 7: mod_base = OTHER; note = 2'-O-methylcytidine-3'-phosphate
  modified_base 8: mod_base = OTHER; note = 2'-fluoroadenosine-3'-phosphate
  modified_base 9: mod_base = OTHER; note = 2'-fluoroguanosine-3'-phosphate
  modified_base 10: mod_base = OTHER; note = 2'-O-methylcytidine-3'-phosphate
  modified_base 11: mod_base = OTHER; note = 2'-O-methyluridine-3'-phosphate
  modified_base 12: mod_base = OTHER; note = 2'-O-methylcytidine-3'-phosphate
  modified_base 13: mod_base = OTHER; note = 2'-O-methyluridine-3'-phosphate
  modified_base 14: mod_base = OTHER; note = 2'-fluorouridine-3'-phosphate
  modified_base 15: mod_base = OTHER; note = 2'-O-methylcytidine-3'-phosphate
  modified_base 16: mod_base = OTHER; note = 2'-fluorouridine-3'-phosphate
  modified_base 17: mod_base = OTHER; note = 2'-O-methyluridine-3'-phosphate
  modified_base 18: mod_base = OTHER; note = 2'-O-methylguanosine-3'-phosphate
  modified_base 19: mod_base = OTHER; note = 2'-O-methylcytidine-3'-phosphate
  modified_base 20: mod_base = OTHER; note = 2'-O-methylguanosine-3'-phosphate
  modified_base 21: mod_base = OTHER; note = 2'-O-methylcytidine-3'-phosphorothioate
  modified_base 22: mod_base = OTHER; note = 2'-O-methyladenosine-3'-phosphorothioate
  modified_base 23: mod_base = OTHER; note = 2'-O-methylguanosine-3'-phosphate
tcgactcagctcttcttgcgcag

SEQ ID NO: 2875 - RNA, 23 nt, synthetic construct
  source 1..23: mol_type = other RNA
  modified_base 1: mod_base = OTHER; note = Vinyl-phosphonate 2'-O-methyluridine-3'-phosphorothioate
  modified_base 2: mod_base = OTHER; note = 2'-fluorouridine -3'-phosphorothioate
  modified_base 3: mod_base = OTHER; note = 2'-O-methylguanosine-3'-phosphate
  modified_base 4: mod_base = OTHER; note = 2'-O-methyluridine-3'-phosphate
  modified_base 5: mod_base = OTHER; note = 2'-O-methyluridine-3'-phosphate
  modified_base 6: mod_base = OTHER; note = 2'-fluoroguanosine-3'-phosphate
  modified_base 7: mod_base = OTHER; note = 2'-O-methylguanosine-3'-phosphate
  modified_base 8: mod_base = OTHER; note = 2'-fluorocytidine-3'-phosphate
  modified_base 9: mod_base = OTHER; note = 2'-fluoroadenosine-3'-phosphate
  modified_base 10: mod_base = OTHER; note = 2'-O-methylguanosine-3'-phosphate
  modified_base 11: mod_base = OTHER; note = 2'-O-methylcytidine-3'-phosphate
  modified_base 12: mod_base = OTHER; note = 2'-O-methyladenosine-3'-phosphate
  modified_base 13: mod_base = OTHER; note = 2'-O-methyladenosine-3'-phosphate
  modified_base 14: mod_base = OTHER; note = 2'-fluoroadenosine-3'-phosphate
  modified_base 15: mod_base = OTHER; note = 2'-O-methyluridine-3'-phosphate
  modified_base 16: mod_base = OTHER; note = 2'-fluorouridine-3'-phosphate
  modified_base 17: mod_base = OTHER; note = 2'-O-methylcytidine-3'-phosphate
  modified_base 18: mod_base = OTHER; note = 2'-O-methylcytidine-3'-phosphate
  modified_base 19: mod_base = OTHER; note = 2'-O-methylguanosine-3'-phosphate
  modified_base 20: mod_base = OTHER; note = 2'-O-methylcytidine-3'-phosphate
  modified_base 21: mod_base = OTHER; note = 2'-O-methyladenosine-3'-phosphorothioate
  modified_base 22: mod_base = OTHER; note = 2'-O-methylguanosine-3'-phosphorothioate
  modified_base 23: mod_base = OTHER; note = 2'-O-methyluridine-3'-phosphate
ttgttggcagcaaattccgcagt

SEQ ID NO: 2876 - RNA, 23 nt, synthetic construct
  source 1..23: mol_type = other RNA
  modified_base 1: mod_base = OTHER; note = Vinyl-phosphonate 2'-O-methyluridine-3'-phosphorothioate
  modified_base 2: mod_base = OTHER; note = 2'-fluorouridine -3'-phosphorothioate
  modified_base 3: mod_base = OTHER; note = 2'-O-methyluridine-3'-phosphate
  modified_base 4: mod_base = OTHER; note = 2'-O-methylcytidine-3'-phosphate
  modified_base 5: mod_base = OTHER; note = 2'-O-methyluridine-3'-phosphate
  modified_base 6: mod_base = OTHER; note = 2'-fluorocytidine-3'-phosphate
  modified_base 7: mod_base = OTHER; note = 2'-O-methyladenosine-3'-phosphate
  modified_base 8: mod_base = OTHER; note = 2'-fluorouridine-3'-phosphate
  modified_base 9: mod_base = OTHER; note = 2'-fluoroadenosine-3'-phosphate
  modified_base 10: mod_base = OTHER; note = 2'-O-methylguanosine-3'-phosphate
  modified_base 11: mod_base = OTHER; note = 2'-O-methylguanosine-3'-phosphate
  modified_base 12: mod_base = OTHER; note = 2'-O-methylcytidine-3'-phosphate
  modified_base 13: mod_base = OTHER; note = 2'-O-methyladenosine-3'-phosphate
  modified_base 14: mod_base = OTHER; note = 2'-fluorouridine-3'-phosphate
  modified_base 15: mod_base = OTHER; note = 2'-O-methyluridine-3'-phosphate
  modified_base 16: mod_base = OTHER; note = 2'-fluoroguanosine-3'-phosphate
  modified_base 17: mod_base = OTHER; note = 2'-O-methylcytidine-3'-phosphate
  modified_base 18: mod_base = OTHER; note = 2'-O-methyladenosine-3'-phosphate
  modified_base 19: mod_base = OTHER; note = 2'-O-methylcytidine-3'-phosphate
  modified_base 20: mod_base = OTHER; note = 2'-O-methyladenosine-3'-phosphate
  modified_base 21: mod_base = OTHER; note = 2'-O-methylcytidine-3'-phosphorothioate
  modified_base 22: mod_base = OTHER; note = 2'-O-methyladenosine-3'-phosphorothioate
  modified_base 23: mod_base = OTHER; note = 2'-O-methylguanosine-3'-phosphate
tttctcataggcattgcacacag

SEQ ID NO: 2877 - RNA, 23 nt, synthetic construct
  source 1..23: mol_type = other RNA
  modified_base 1: mod_base = OTHER; note = Vinyl-phosphonate 2'-O-methyluridine-3'-phosphorothioate
  modified_base 2: mod_base = OTHER; note = 2'-fluorocytidine-3'-phosphorothioate
  modified_base 3: mod_base = OTHER; note = 2'-O-methyluridine-3'-phosphate
  modified_base 4: mod_base = OTHER; note = 2'-O-methyluridine-3'-phosphate
  modified_base 5: mod_base = OTHER; note = 2'-O-methyluridine-3'-phosphate
  modified_base 6: mod_base = OTHER; note = 2'-fluorouridine-3'-phosphate
  modified_base 7: mod_base = OTHER; note = 2'-O-methylguanosine-3'-phosphate
  modified_base 8: mod_base = OTHER; note = 2'-fluorocytidine-3'-phosphate
  modified_base 9: mod_base = OTHER; note = 2'-fluoroadenosine-3'-phosphate
  modified_base 10: mod_base = OTHER; note = 2'-O-methyladenosine-3'-phosphate
  modified_base 11: mod_base = OTHER; note = 2'-O-methyluridine-3'-phosphate
  modified_base 12: mod_base = OTHER; note = 2'-O-methyladenosine-3'-phosphate
  modified_base 13: mod_base = OTHER; note = 2'-O-methyluridine-3'-phosphate
  modified_base 14: mod_base = OTHER; note = 2'-fluorouridine-3'-phosphate
  modified_base 15: mod_base = OTHER; note = 2'-O-methyluridine-3'-phosphate
  modified_base 16: mod_base = OTHER; note = 2'-fluoroguanosine-3'-phosphate
  modified_base 17: mod_base = OTHER; note = 2'-O-methyladenosine-3'-phosphate
  modified_base 18: mod_base = OTHER; note = 2'-O-methyladenosine-3'-phosphate
  modified_base 19: mod_base = OTHER; note = 2'-O-methyluridine-3'-phosphate
  modified_base 20: mod_base = OTHER; note = 2'-O-methyluridine-3'-phosphate
  modified_base 21: mod_base = OTHER; note = 2'-O-methylcytidine-3'-phosphorothioate
  modified_base 22: mod_base = OTHER; note = 2'-O-methyluridine-3'-phosphorothioate
  modified_base 23: mod_base = OTHER; note = 2'-O-methylguanosine-3'-phosphate
tcttttgcaatatttgaattctg

SEQ ID NO: 2878 - RNA, 23 nt, synthetic construct
  source 1..23: mol_type = other RNA
  modified_base 1: mod_base = OTHER; note = Vinyl-phosphonate 2'-O-methyluridine-3'-phosphorothioate
  modified_base 2: mod_base = OTHER; note = 2'-fluoroguanosine-3'-phosphorothioate
  modified_base 3: mod_base = OTHER; note = 2'-O-methylguanosine-3'-phosphate
  modified_base 4: mod_base = OTHER; note = 2'-O-methylcytidine-3'-phosphate
  modified_base 5: mod_base = OTHER; note = 2'-O-methyluridine-3'-phosphate
  modified_base 6: mod_base = OTHER; note = 2'-fluorocytidine-3'-phosphate
  modified_base 7: mod_base = OTHER; note = 2'-O-methyluridine-3'-phosphate
  modified_base 8: mod_base = OTHER; note = 2'-fluoroadenosine-3'-phosphate
  modified_base 9: mod_base = OTHER; note = 2'-fluorocytidine-3'-phosphate
  modified_base 10: mod_base = OTHER; note = 2'-O-methyladenosine-3'-phosphate
  modified_base 11: mod_base = OTHER; note = 2'-O-methyladenosine-3'-phosphate
  modified_base 12: mod_base = OTHER; note = 2'-O-methyladenosine-3'-phosphate
  modified_base 13: mod_base = OTHER; note = 2'-O-methylguanosine-3'-phosphate
  modified_base 14: mod_base = OTHER; note = 2'-fluorocytidine-3'-phosphate
  modified_base 15: mod_base = OTHER; note = 2'-O-methyladenosine-3'-phosphate
  modified_base 16: mod_base = OTHER; note = 2'-fluorocytidine-3'-phosphate
  modified_base 17: mod_base = OTHER; note = 2'-O-methyladenosine-3'-phosphate
  modified_base 18: mod_base = OTHER; note = 2'-O-methylcytidine-3'-phosphate
  modified_base 19: mod_base = OTHER; note = 2'-O-methyladenosine-3'-phosphate
  modified_base 20: mod_base = OTHER; note = 2'-O-methylguanosine-3'-phosphate
  modified_base 21: mod_base = OTHER; note = 2'-O-methylguanosine-3'-phosphorothioate
  modified_base 22: mod_base = OTHER; note = 2'-O-methylcytidine-3'-phosphorothioate
  modified_base 23: mod_base = OTHER; note = 2'-O-methylcytidine-3'-phosphate
tggctctacaaagcacacaggcc

SEQ ID NO: 2879 - RNA, 23 nt, synthetic construct
  source 1..23: mol_type = other RNA
  modified_base 1: mod_base = OTHER; note = Vinyl-phosphonate 2'-O-methyluridine-3'-phosphorothioate
  modified_base 2: mod_base = OTHER; note = 2'-fluorocytidine-3'-phosphorothioate
  modified_base 3: mod_base = OTHER; note = 2'-O-methyluridine-3'-phosphate
  modified_base 4: mod_base = OTHER; note = 2'-O-methylguanosine-3'-phosphate
  modified_base 5: mod_base = OTHER; note = 2'-O-methyladenosine-3'-phosphate
  modified_base 6: mod_base = OTHER; note = 2'-fluorocytidine-3'-phosphate
  modified_base 7: mod_base = OTHER; note = 2'-O-methyluridine-3'-phosphate
  modified_base 8: mod_base = OTHER; note = 2'-fluorocytidine-3'-phosphate
  modified_base 9: mod_base = OTHER; note = 2'-fluorouridine-3'-phosphate
  modified_base 10: mod_base = OTHER; note = 2'-O-methyluridine-3'-phosphate
  modified_base 11: mod_base = OTHER; note = 2'-O-methylcytidine-3'-phosphate
  modified_base 12: mod_base = OTHER; note = 2'-O-methylcytidine-3'-phosphate
  modified_base 13: mod_base = OTHER; note = 2'-O-methyluridine-3'-phosphate
  modified_base 14: mod_base = OTHER; note = 2'-fluorouridine-3'-phosphate
  modified_base 15: mod_base = OTHER; note = 2'-O-methylguanosine-3'-phosphate
  modified_base 16: mod_base = OTHER; note = 2'-fluorouridine-3'-phosphate
  modified_base 17: mod_base = OTHER; note = 2'-O-methylcytidine-3'-phosphate
  modified_base 18: mod_base = OTHER; note = 2'-O-methyluridine-3'-phosphate
  modified_base 19: mod_base = OTHER; note = 2'-O-methylguanosine-3'-phosphate
  modified_base 20: mod_base = OTHER; note = 2'-O-methylguanosine-3'-phosphate
  modified_base 21: mod_base = OTHER; note = 2'-O-methyladenosine-3'-phosphorothioate
  modified_base 22: mod_base = OTHER; note = 2'-O-methylguanosine-3'-phosphorothioate
  modified_base 23: mod_base = OTHER; note = 2'-O-methylguanosine-3'-phosphate
tctgactcttccttgtctggagg

SEQ ID NO: 2880 - RNA, 23 nt, synthetic construct
  source 1..23: mol_type = other RNA
  modified_base 1: mod_base = OTHER; note = Vinyl-phosphonate 2'-O-methyluridine-3'-phosphorothioate
  modified_base 2: mod_base = OTHER; note = 2'-fluorocytidine-3'-phosphorothioate
  modified_base 3: mod_base = OTHER; note = 2'-O-methylguanosine-3'-phosphate
  modified_base 4: mod_base = OTHER; note = 2'-O-methylcytidine-3'-phosphate
  modified_base 5: mod_base = OTHER; note = 2'-O-methyluridine-3'-phosphate
  modified_base 6: mod_base = OTHER; note = 2'-fluoroguanosine-3'-phosphate
  modified_base 7: mod_base = OTHER; note = 2'-O-methyladenosine-3'-phosphate
  modified_base 8: mod_base = OTHER; note = 2'-fluorouridine-3'-phosphate
  modified_base 9: mod_base = OTHER; note = 2'-fluoroguanosine-3'-phosphate
  modified_base 10: mod_base = OTHER; note = 2'-O-methylcytidine-3'-phosphate
  modified_base 11: mod_base = OTHER; note = 2'-O-methyluridine-3'-phosphate
  modified_base 12: mod_base = OTHER; note = 2'-O-methylguanosine-3'-phosphate
  modified_base 13: mod_base = OTHER; note = 2'-O-methyluridine-3'-phosphate
  modified_base 14: mod_base = OTHER; note = 2'-fluorouridine-3'-phosphate
  modified_base 15: mod_base = OTHER; note = 2'-O-methyluridine-3'-phosphate
  modified_base 16: mod_base = OTHER; note = 2'-fluorocytidine-3'-phosphate
  modified_base 17: mod_base = OTHER; note = 2'-O-methyluridine-3'-phosphate
  modified_base 18: mod_base = OTHER; note = 2'-O-methylguanosine-3'-phosphate
  modified_base 19: mod_base = OTHER; note = 2'-O-methylguanosine-3'-phosphate
  modified_base 20: mod_base = OTHER; note = 2'-O-methylcytidine-3'-phosphate
  modified_base 21: mod_base = OTHER; note = 2'-O-methyladenosine-3'-phosphorothioate
  modified_base 22: mod_base = OTHER; note = 2'-O-methylcytidine-3'-phosphorothioate
  modified_base 23: mod_base = OTHER; note = 2'-O-methyluridine-3'-phosphate
tcgctgatgctgtttctggcact

SEQ ID NO: 2881 - RNA, 23 nt, synthetic construct
  source 1..23: mol_type = other RNA
  modified_base 1: mod_base = OTHER; note = Vinyl-phosphonate 2'-O-methyluridine-3'-phosphorothioate
  modified_base 2: mod_base = OTHER; note = 2'-fluoroadenosine-3'-phosphorothioate
  modified_base 3: mod_base = OTHER; note = 2'-O-methyladenosine-3'-phosphate
  modified_base 4: mod_base = OTHER; note = 2'-O-methylguanosine-3'-phosphate
  modified_base 5: mod_base = OTHER; note = 2'-O-methylguanosine-3'-phosphate
  modified_base 6: mod_base = OTHER; note = 2'-fluorocytidine-3'-phosphate
  modified_base 7: mod_base = OTHER; note = 2'-O-methylguanosine-3'-phosphate
  modified_base 8: mod_base = OTHER; note = 2'-fluorouridine-3'-phosphate
  modified_base 9: mod_base = OTHER; note = 2'-fluoroadenosine-3'-phosphate
  modified_base 10: mod_base = OTHER; note = 2'-O-methyluridine-3'-phosphate
  modified_base 11: mod_base = OTHER; note = 2'-O-methylcytidine-3'-phosphate
  modified_base 12: mod_base = OTHER; note = 2'-O-methylcytidine-3'-phosphate
  modified_base 13: mod_base = OTHER; note = 2'-O-methyladenosine-3'-phosphate
  modified_base 14: mod_base = OTHER; note = 2'-fluorouridine-3'-phosphate
  modified_base 15: mod_base = OTHER; note = 2'-O-methyladenosine-3'-phosphate
  modified_base 16: mod_base = OTHER; note = 2'-fluorouridine-3'-phosphate
  modified_base 17: mod_base = OTHER; note = 2'-O-methyluridine-3'-phosphate
  modified_base 18: mod_base = OTHER; note = 2'-O-methyladenosine-3'-phosphate
  modified_base 19: mod_base = OTHER; note = 2'-O-methyluridine-3'-phosphate
  modified_base 20: mod_base = OTHER; note = 2'-O-methylguanosine-3'-phosphate
  modified_base 21: mod_base = OTHER; note = 2'-O-methylcytidine-3'-phosphorothioate
  modified_base 22: mod_base = OTHER; note = 2'-O-methyladenosine-3'-phosphorothioate
  modified_base 23: mod_base = OTHER; note = 2'-O-methylguanosine-3'-phosphate
taaggcgtatccatattatgcag

SEQ ID NO: 2882 - RNA, 23 nt, synthetic construct
  source 1..23: mol_type = other RNA
  modified_base 1: mod_base = OTHER; note = Vinyl-phosphonate 2'-O-methyluridine-3'-phosphorothioate
  modified_base 2: mod_base = OTHER; note = 2'-fluoroadenosine-3'-phosphorothioate
  modified_base 3: mod_base = OTHER; note = 2'-O-methylguanosine-3'-phosphate
  modified_base 4: mod_base = OTHER; note = 2'-O-methylcytidine-3'-phosphate
  modified_base 5: mod_base = OTHER; note = 2'-O-methyladenosine-3'-phosphate
  modified_base 6: mod_base = OTHER; note = 2'-fluorouridine-3'-phosphate
  modified_base 7: mod_base = OTHER; note = 2'-O-methylcytidine-3'-phosphate
  modified_base 8: mod_base = OTHER; note = 2'-fluoroadenosine-3'-phosphate
  modified_base 9: mod_base = OTHER; note = 2'-fluorouridine-3'-phosphate
  modified_base 10: mod_base = OTHER; note = 2'-O-methylcytidine-3'-phosphate
  modified_base 11: mod_base = OTHER; note = 2'-O-methyladenosine-3'-phosphate
  modified_base 12: mod_base = OTHER; note = 2'-O-methylguanosine-3'-phosphate
  modified_base 13: mod_base = OTHER; note = 2'-O-methylguanosine-3'-phosphate
  modified_base 14: mod_base = OTHER; note = 2'-fluoroadenosine-3'-phosphate
  modified_base 15: mod_base = OTHER; note = 2'-O-methyluridine-3'-phosphate
  modified_base 16: mod_base = OTHER; note = 2'-fluoroguanosine-3'-phosphate
  modified_base 17: mod_base = OTHER; note = 2'-O-methyladenosine-3'-phosphate
  modified_base 18: mod_base = OTHER; note = 2'-O-methylguanosine-3'-phosphate
  modified_base 19: mod_base = OTHER; note = 2'-O-methylguanosine-3'-phosphate
  modified_base 20: mod_base = OTHER; note = 2'-O-methylcytidine-3'-phosphate
  modified_base 21: mod_base = OTHER; note = 2'-O-methyluridine-3'-phosphorothioate
  modified_base 22: mod_base = OTHER; note = 2'-O-methylguanosine-3'-phosphorothioate
  modified_base 23: mod_base = OTHER; note = 2'-O-methyladenosine-3'-phosphate
tagcatcatcaggatgaggctga

SEQ ID NO: 2883 - RNA, 23 nt, synthetic construct
  source 1..23: mol_type = other RNA
  modified_base 1: mod_base = OTHER; note = Vinyl-phosphonate 2'-O-methyluridine-3'-phosphorothioate
  modified_base 2: mod_base = OTHER; note = 2'-fluorocytidine-3'-phosphorothioate
  modified_base 3: mod_base = OTHER; note = 2'-O-methyladenosine-3'-phosphate
  modified_base 4: mod_base = OTHER; note = 2'-O-methyladenosine-3'-phosphate
  modified_base 5: mod_base = OTHER; note = 2'-O-methylcytidine-3'-phosphate
  modified_base 6: mod_base = OTHER; note = 2'-fluorocytidine-3'-phosphate
  modified_base 7: mod_base = OTHER; note = 2'-O-methylcytidine-3'-phosphate
  modified_base 8: mod_base = OTHER; note = 2'-fluorouridine-3'-phosphate
  modified_base 9: mod_base = OTHER; note = 2'-fluoroguanosine-3'-phosphate
  modified_base 10: mod_base = OTHER; note = 2'-O-methylcytidine-3'-phosphate
  modified_base 11: mod_base = OTHER; note = 2'-O-methyluridine-3'-phosphate
  modified_base 12: mod_base = OTHER; note = 2'-O-methylcytidine-3'-phosphate
  modified_base 13: mod_base = OTHER; note = 2'-O-methyladenosine-3'-phosphate
  modified_base 14: mod_base = OTHER; note = 2'-fluoroadenosine-3'-phosphate
  modified_base 15: mod_base = OTHER; note = 2'-O-methylguanosine-3'-phosphate
  modified_base 16: mod_base = OTHER; note = 2'-fluoroadenosine-3'-phosphate
  modified_base 17: mod_base = OTHER; note = 2'-O-methylguanosine-3'-phosphate
  modified_base 18: mod_base = OTHER; note = 2'-O-methylguanosine-3'-phosphate
  modified_base 19: mod_base = OTHER; note = 2'-O-methylcytidine-3'-phosphate
  modified_base 20: mod_base = OTHER; note = 2'-O-methyluridine-3'-phosphate
  modified_base 21: mod_base = OTHER; note = 2'-O-methyluridine-3'-phosphorothioate
  modified_base 22: mod_base = OTHER; note = 2'-O-methylguanosine-3'-phosphorothioate
  modified_base 23: mod_base = OTHER; note = 2'-O-methylguanosine-3'-phosphate
tcaaccctgctcaagaggcttgg

SEQ ID NO: 2884 - RNA, 23 nt, synthetic construct
  source 1..23: mol_type = other RNA
  modified_base 1: mod_base = OTHER; note = Vinyl-phosphonate 2'-O-methyluridine-3'-phosphorothioate
  modified_base 2: mod_base = OTHER; note = 2'-fluoroguanosine-3'-phosphorothioate
  modified_base 3: mod_base = OTHER; note = 2'-O-methylcytidine-3'-phosphate
  modified_base 4: mod_base = OTHER; note = 2'-O-methyluridine-3'-phosphate
  modified_base 5: mod_base = OTHER; note = 2'-O-methyluridine-3'-phosphate
  modified_base 6: mod_base = OTHER; note = 2'-fluorocytidine-3'-phosphate
  modified_base 7: mod_base = OTHER; note = 2'-O-methyladenosine-3'-phosphate
  modified_base 8: mod_base = OTHER; note = 2'-fluoroadenosine-3'-phosphate
  modified_base 9: mod_base = OTHER; note = 2'-fluorocytidine-3'-phosphate
  modified_base 10: mod_base = OTHER; note = 2'-O-methyluridine-3'-phosphate
  modified_base 11: mod_base = OTHER; note = 2'-O-methyluridine-3'-phosphate
  modified_base 12: mod_base = OTHER; note = 2'-O-methylcytidine-3'-phosphate
  modified_base 13: mod_base = OTHER; note = 2'-O-methyluridine-3'-phosphate
  modified_base 14: mod_base = OTHER; note = 2'-fluorouridine-3'-phosphate
  modified_base 15: mod_base = OTHER; note = 2'-O-methylcytidine-3'-phosphate
  modified_base 16: mod_base = OTHER; note = 2'-fluorocytidine-3'-phosphate
  modified_base 17: mod_base = OTHER; note = 2'-O-methylcytidine-3'-phosphate
  modified_base 18: mod_base = OTHER; note = 2'-O-methyluridine-3'-phosphate
  modified_base 19: mod_base = OTHER; note = 2'-O-methyluridine-3'-phosphate
  modified_base 20: mod_base = OTHER; note = 2'-O-methyluridine-3'-phosphate
  modified_base 21: mod_base = OTHER; note = 2'-O-methyladenosine-3'-phosphorothioate
  modified_base 22: mod_base = OTHER; note = 2'-O-methyladenosine-3'-phosphorothioate
  modified_base 23: mod_base = OTHER; note = 2'-O-methyluridine-3'-phosphate
tgcttcaacttcttccctttaat

SEQ ID NO: 2885 - RNA, 23 nt, synthetic construct
  source 1..23: mol_type = other RNA
  modified_base 1: mod_base = OTHER; note = Vinyl-phosphonate 2'-O-methyluridine-3'-phosphorothioate
  modified_base 2: mod_base = OTHER; note = 2'-fluoroadenosine-3'-phosphorothioate
  modified_base 3: mod_base = OTHER; note = 2'-O-methylcytidine-3'-phosphate
  modified_base 4: mod_base = OTHER; note = 2'-O-methylcytidine-3'-phosphate
  modified_base 5: mod_base = OTHER; note = 2'-O-methyladenosine-3'-phosphate
  modified_base 6: mod_base = OTHER; note = 2'-fluorocytidine-3'-phosphate
  modified_base 7: mod_base = OTHER; note = 2'-O-methylcytidine-3'-phosphate
  modified_base 8: mod_base = OTHER; note = 2'-fluorouridine-3'-phosphate
  modified_base 9: mod_base = OTHER; note = 2'-fluorouridine-3'-phosphate
  modified_base 10: mod_base = OTHER; note = 2'-O-methylcytidine-3'-phosphate
  modified_base 11: mod_base = OTHER; note = 2'-O-methyluridine-3'-phosphate
  modified_base 12: mod_base = OTHER; note = 2'-O-methylcytidine-3'-phosphate
  modified_base 13: mod_base = OTHER; note = 2'-O-methyladenosine-3'-phosphate
  modified_base 14: mod_base = OTHER; note = 2'-fluoroadenosine-3'-phosphate
  modified_base 15: mod_base = OTHER; note = 2'-O-methyluridine-3'-phosphate
  modified_base 16: mod_base = OTHER; note = 2'-fluoroguanosine-3'-phosphate
  modified_base 17: mod_base = OTHER; note = 2'-O-methylcytidine-3'-phosphate
  modified_base 18: mod_base = OTHER; note = 2'-O-methyluridine-3'-phosphate
  modified_base 19: mod_base = OTHER; note = 2'-O-methylguanosine-3'-phosphate
  modified_base 20: mod_base = OTHER; note = 2'-O-methylcytidine-3'-phosphate
  modified_base 21: mod_base = OTHER; note = 2'-O-methylcytidine-3'-phosphorothioate
  modified_base 22: mod_base = OTHER; note = 2'-O-methylcytidine-3'-phosphorothioate
  modified_base 23: mod_base = OTHER; note = 2'-O-methyladenosine-3'-phosphate
taccaccttctcaatgctgccca

SEQ ID NO: 2886 - RNA, 23 nt, synthetic construct
  source 1..23: mol_type = other RNA
  modified_base 1: mod_base = OTHER; note = Vinyl-phosphonate 2'-O-methyluridine-3'-phosphorothioate
  modified_base 2: mod_base = OTHER; note = 2'-fluorocytidine-3'-phosphorothioate
  modified_base 3: mod_base = OTHER; note = 2'-O-methylguanosine-3'-phosphate
  modified_base 4: mod_base = OTHER; note = 2'-O-methylguanosine-3'-phosphate
  modified_base 5: mod_base = OTHER; note = 2'-O-methyladenosine-3'-phosphate
  modified_base 6: mod_base = OTHER; note = 2'-fluoroadenosine-3'-phosphate
  modified_base 7: mod_base = OTHER; note = 2'-O-methylguanosine-3'-phosphate
  modified_base 8: mod_base = OTHER; note = 2'-fluoroadenosine-3'-phosphate
  modified_base 9: mod_base = OTHER; note = 2'-fluoroadenosine-3'-phosphate
  modified_base 10: mod_base = OTHER; note = 2'-O-methylguanosine-3'-phosphate
  modified_base 11: mod_base = OTHER; note = 2'-O-methylcytidine-3'-phosphate
  modified_base 12: mod_base = OTHER; note = 2'-O-methyluridine-3'-phosphate
  modified_base 13: mod_base = OTHER; note = 2'-O-methylguanosine-3'-phosphate
  modified_base 14: mod_base = OTHER; note = 2'-fluorouridine-3'-phosphate
  modified_base 15: mod_base = OTHER; note = 2'-O-methylcytidine-3'-phosphate
  modified_base 16: mod_base = OTHER; note = 2'-fluoroguanosine-3'-phosphate
  modified_base 17: mod_base = OTHER; note = 2'-O-methylcytidine-3'-phosphate
  modified_base 18: mod_base = OTHER; note = 2'-O-methyluridine-3'-phosphate
  modified_base 19: mod_base = OTHER; note = 2'-O-methylguanosine-3'-phosphate
  modified_base 20: mod_base = OTHER; note = 2'-O-methyladenosine-3'-phosphate
  modified_base 21: mod_base = OTHER; note = 2'-O-methylcytidine-3'-phosphorothioate
  modified_base 22: mod_base = OTHER; note = 2'-O-methylcytidine-3'-phosphorothioate
  modified_base 23: mod_base = OTHER; note = 2'-O-methylcytidine-3'-phosphate
tcggaagaagctgtcgctgaccc

SEQ ID NO: 2887 - RNA, 23 nt, synthetic construct
  source 1..23: mol_type = other RNA
  modified_base 1: mod_base = OTHER; note = Vinyl-phosphonate 2'-O-methyluridine-3'-phosphorothioate
  modified_base 2: mod_base = OTHER; note = 2'-fluorocytidine-3'-phosphorothioate
  modified_base 3: mod_base = OTHER; note = 2'-O-methyluridine-3'-phosphate
  modified_base 4: mod_base = OTHER; note = 2'-O-methyluridine-3'-phosphate
  modified_base 5: mod_base = OTHER; note = 2'-O-methylguanosine-3'-phosphate
  modified_base 6: mod_base = OTHER; note = 2'-fluoroguanosine-3'-phosphate
  modified_base 7: mod_base = OTHER; note = 2'-O-methyluridine-3'-phosphate
  modified_base 8: mod_base = OTHER; note = 2'-fluorouridine-3'-phosphate
  modified_base 9: mod_base = OTHER; note = 2'-fluoroguanosine-3'-phosphate
  modified_base 10: mod_base = OTHER; note = 2'-O-methyladenosine-3'-phosphate
  modified_base 11: mod_base = OTHER; note = 2'-O-methylguanosine-3'-phosphate
  modified_base 12: mod_base = OTHER; note = 2'-O-methylguanosine-3'-phosphate
  modified_base 13: mod_base = OTHER; note = 2'-O-methyladenosine-3'-phosphate
  modified_base 14: mod_base = OTHER; note = 2'-fluoroguanosine-3'-phosphate
  modified_base 15: mod_base = OTHER; note = 2'-O-methyladenosine-3'-phosphate
  modified_base 16: mod_base = OTHER; note = 2'-fluorocytidine-3'-phosphate
  modified_base 17: mod_base = OTHER; note = 2'-O-methyladenosine-3'-phosphate
  modified_base 18: mod_base = OTHER; note = 2'-O-methylguanosine-3'-phosphate
  modified_base 19: mod_base = OTHER; note = 2'-O-methylcytidine-3'-phosphate
  modified_base 20: mod_base = OTHER; note = 2'-O-methyladenosine-3'-phosphate
  modified_base 21: mod_base = OTHER; note = 2'-O-methylguanosine-3'-phosphorothioate
  modified_base 22: mod_base = OTHER; note = 2'-O-methylguanosine-3'-phosphorothioate
  modified_base 23: mod_base = OTHER; note = 2'-O-methylguanosine-3'-phosphate
tcttggttgaggagacagcaggg

SEQ ID NO: 2888 - RNA, 23 nt, synthetic construct
  source 1..23: mol_type = other RNA
  modified_base 1: mod_base = OTHER; note = Vinyl-phosphonate 2'-O-methyluridine-3'-phosphorothioate
  modified_base 2: mod_base = OTHER; note = 2'-fluoroadenosine-3'-phosphorothioate
  modified_base 3: mod_base = OTHER; note = 2'-O-methylguanosine-3'-phosphate
  modified_base 4: mod_base = OTHER; note = 2'-O-methyluridine-3'-phosphate
  modified_base 5: mod_base = OTHER; note = 2'-O-methylcytidine-3'-phosphate
  modified_base 6: mod_base = OTHER; note = 2'-fluorouridine-3'-phosphate
  modified_base 7: mod_base = OTHER; note = 2'-O-methylcytidine-3'-phosphate
  modified_base 8: mod_base = OTHER; note = 2'-fluorocytidine-3'-phosphate
  modified_base 9: mod_base = OTHER; note = 2'-fluoroadenosine-3'-phosphate
  modified_base 10: mod_base = OTHER; note = 2'-O-methyladenosine-3'-phosphate
  modified_base 11: mod_base = OTHER; note = 2'-O-methyluridine-3'-phosphate
  modified_base 12: mod_base = OTHER; note = 2'-O-methyluridine-3'-phosphate
  modified_base 13: mod_base = OTHER; note = 2'-O-methylcytidine-3'-phosphate
  modified_base 14: mod_base = OTHER; note = 2'-fluorouridine-3'-phosphate
  modified_base 15: mod_base = OTHER; note = 2'-O-methyluridine-3'-phosphate
  modified_base 16: mod_base = OTHER; note = 2'-fluorocytidine-3'-phosphate
  modified_base 17: mod_base = OTHER; note = 2'-O-methylcytidine-3'-phosphate
  modified_base 18: mod_base = OTHER; note = 2'-O-methyluridine-3'-phosphate
  modified_base 19: mod_base = OTHER; note = 2'-O-methylcytidine-3'-phosphate
  modified_base 20: mod_base = OTHER; note = 2'-O-methylcytidine-3'-phosphate
  modified_base 21: mod_base = OTHER; note = 2'-O-methyluridine-3'-phosphorothioate
  modified_base 22: mod_base = OTHER; note = 2'-O-methylcytidine-3'-phosphorothioate
  modified_base 23: mod_base = OTHER; note = 2'-O-methylcytidine-3'-phosphate
tagtctccaattcttcctcctcc

SEQ ID NO: 2889 - RNA, 23 nt, synthetic construct
  source 1..23: mol_type = other RNA
  modified_base 1: mod_base = OTHER; note = Vinyl-phosphonate 2'-O-methyluridine-3'-phosphorothioate
  modified_base 2: mod_base = OTHER; note = 2'-fluoroadenosine-3'-phosphorothioate
  modified_base 3: mod_base = OTHER; note = 2'-O-methylcytidine-3'-phosphate
  modified_base 4: mod_base = OTHER; note = 2'-O-methylcytidine-3'-phosphate
  modified_base 5: mod_base = OTHER; note = 2'-O-methyluridine-3'-phosphate
  modified_base 6: mod_base = OTHER; note = 2'-fluorouridine-3'-phosphate
  modified_base 7: mod_base = OTHER; note = 2'-O-methylcytidine-3'-phosphate
  modified_base 8: mod_base = OTHER; note = 2'-fluoroadenosine-3'-phosphate
  modified_base 9: mod_base = OTHER; note = 2'-fluoroguanosine-3'-phosphate
  modified_base 10: mod_base = OTHER; note = 2'-O-methyladenosine-3'-phosphate
  modified_base 11: mod_base = OTHER; note = 2'-O-methylguanosine-3'-phosphate
  modified_base 12: mod_base = OTHER; note = 2'-O-methyluridine-3'-phosphate
  modified_base 13: mod_base = OTHER; note = 2'-O-methylguanosine-3'-phosphate
  modified_base 14: mod_base = OTHER; note = 2'-fluoroguanosine-3'-phosphate
  modified_base 15: mod_base = OTHER; note = 2'-O-methyluridine-3'-phosphate
  modified_base 16: mod_base = OTHER; note = 2'-fluoroguanosine-3'-phosphate
  modified_base 17: mod_base = OTHER; note = 2'-O-methyladenosine-3'-phosphate
  modified_base 18: mod_base = OTHER; note = 2'-O-methylcytidine-3'-phosphate
  modified_base 19: mod_base = OTHER; note = 2'-O-methyladenosine-3'-phosphate
  modified_base 20: mod_base = OTHER; note = 2'-O-methylguanosine-3'-phosphate
  modified_base 21: mod_base = OTHER; note = 2'-O-methylguanosine-3'-phosphorothioate
  modified_base 22: mod_base = OTHER; note = 2'-O-methyladenosine-3'-phosphorothioate
  modified_base 23: mod_base = OTHER; note = 2'-O-methylguanosine-3'-phosphate
taccttcagagtggtgacaggag

SEQ ID NO: 2890 - RNA, 23 nt, synthetic construct
  source 1..23: mol_type = other RNA
  modified_base 1: mod_base = OTHER; note = Vinyl-phosphonate 2'-O-methyluridine-3'-phosphorothioate
  modified_base 2: mod_base = OTHER; note = 2'-fluorouridine -3'-phosphorothioate
  modified_base 3: mod_base = OTHER; note = 2'-O-methylguanosine-3'-phosphate
  modified_base 4: mod_base = OTHER; note = 2'-O-methyluridine-3'-phosphate
  modified_base 5: mod_base = OTHER; note = 2'-O-methylguanosine-3'-phosphate
  modified_base 6: mod_base = OTHER; note = 2'-fluoroguanosine-3'-phosphate
  modified_base 7: mod_base = OTHER; note = 2'-O-methylcytidine-3'-phosphate
  modified_base 8: mod_base = OTHER; note = 2'-fluorouridine-3'-phosphate
  modified_base 9: mod_base = OTHER; note = 2'-fluoroadenosine-3'-phosphate
  modified_base 10: mod_base = OTHER; note = 2'-O-methyluridine-3'-phosphate
  modified_base 11: mod_base = OTHER; note = 2'-O-methyladenosine-3'-phosphate
  modified_base 12: mod_base = OTHER; note = 2'-O-methylcytidine-3'-phosphate
  modified_base 13: mod_base = OTHER; note = 2'-O-methyladenosine-3'-phosphate
  modified_base 14: mod_base = OTHER; note = 2'-fluorouridine-3'-phosphate
  modified_base 15: mod_base = OTHER; note = 2'-O-methyladenosine-3'-phosphate
  modified_base 16: mod_base = OTHER; note = 2'-fluoroadenosine-3'-phosphate
  modified_base 17: mod_base = OTHER; note = 2'-O-methyladenosine-3'-phosphate
  modified_base 18: mod_base = OTHER; note = 2'-O-methylguanosine-3'-phosphate
  modified_base 19: mod_base = OTHER; note = 2'-O-methyluridine-3'-phosphate
  modified_base 20: mod_base = OTHER; note = 2'-O-methylcytidine-3'-phosphate
  modified_base 21: mod_base = OTHER; note = 2'-O-methyluridine-3'-phosphorothioate
  modified_base 22: mod_base = OTHER; note = 2'-O-methyladenosine-3'-phosphorothioate
  modified_base 23: mod_base = OTHER; note = 2'-O-methyluridine-3'-phosphate
ttgtggctatacataaagtctat

SEQ ID NO: 2891 - RNA, 23 nt, synthetic construct
  source 1..23: mol_type = other RNA
  modified_base 1: mod_base = OTHER; note = Vinyl-phosphonate 2'-O-methyluridine-3'-phosphorothioate
  modified_base 2: mod_base = OTHER; note = 2'-fluoroadenosine-3'-phosphorothioate
  modified_base 3: mod_base = OTHER; note = 2'-O-methyladenosine-3'-phosphate
  modified_base 4: mod_base = OTHER; note = 2'-O-methyladenosine-3'-phosphate
  modified_base 5: mod_base = OTHER; note = 2'-O-methyladenosine-3'-phosphate
  modified_base 6: mod_base = OTHER; note = 2'-fluoroadenosine-3'-phosphate
  modified_base 7: mod_base = OTHER; note = 2'-O-methylguanosine-3'-phosphate
  modified_base 8: mod_base = OTHER; note = 2'-fluorocytidine-3'-phosphate
  modified_base 9: mod_base = OTHER; note = 2'-fluoroadenosine-3'-phosphate
  modified_base 10: mod_base = OTHER; note = 2'-O-methylguanosine-3'-phosphate
  modified_base 11: mod_base = OTHER; note = 2'-O-methylguanosine-3'-phosphate
  modified_base 12: mod_base = OTHER; note = 2'-O-methylcytidine-3'-phosphate
  modified_base 13: mod_base = OTHER; note = 2'-O-methyladenosine-3'-phosphate
  modified_base 14: mod_base = OTHER; note = 2'-fluorouridine-3'-phosphate
  modified_base 15: mod_base = OTHER; note = 2'-O-methylguanosine-3'-phosphate
  modified_base 16: mod_base = OTHER; note = 2'-fluorocytidine-3'-phosphate
  modified_base 17: mod_base = OTHER; note = 2'-O-methylguanosine-3'-phosphate
  modified_base 18: mod_base = OTHER; note = 2'-O-methyluridine-3'-phosphate
  modified_base 19: mod_base = OTHER; note = 2'-O-methyladenosine-3'-phosphate
  modified_base 20: mod_base = OTHER; note = 2'-O-methyladenosine-3'-phosphate
  modified_base 21: mod_base = OTHER; note = 2'-O-methylcytidine-3'-phosphorothioate
  modified_base 22: mod_base = OTHER; note = 2'-O-methyladenosine-3'-phosphorothioate
  modified_base 23: mod_base = OTHER; note = 2'-O-methylcytidine-3'-phosphate
taaaaagcaggcatgcgtaacac

SEQ ID NO: 2892 - RNA, 23 nt, synthetic construct
  source 1..23: mol_type = other RNA
  modified_base 1: mod_base = OTHER; note = Vinyl-phosphonate 2'-O-methyluridine-3'-phosphorothioate
  modified_base 2: mod_base = OTHER; note = 2'-fluorocytidine-3'-phosphorothioate
  modified_base 3: mod_base = OTHER; note = 2'-O-methyladenosine-3'-phosphate
  modified_base 4: mod_base = OTHER; note = 2'-O-methyluridine-3'-phosphate
  modified_base 5: mod_base = OTHER; note = 2'-O-methyluridine-3'-phosphate
  modified_base 6: mod_base = OTHER; note = 2'-fluoroguanosine-3'-phosphate
  modified_base 7: mod_base = OTHER; note = 2'-O-methylguanosine-3'-phosphate
  modified_base 8: mod_base = OTHER; note = 2'-fluorocytidine-3'-phosphate
  modified_base 9: mod_base = OTHER; note = 2'-fluoroadenosine-3'-phosphate
  modified_base 10: mod_base = OTHER; note = 2'-O-methylguanosine-3'-phosphate
  modified_base 11: mod_base = OTHER; note = 2'-O-methylcytidine-3'-phosphate
  modified_base 12: mod_base = OTHER; note = 2'-O-methyluridine-3'-phosphate
  modified_base 13: mod_base = OTHER; note = 2'-O-methylguanosine-3'-phosphate
  modified_base 14: mod_base = OTHER; note = 2'-fluorouridine-3'-phosphate
  modified_base 15: mod_base = OTHER; note = 2'-O-methylguanosine-3'-phosphate
  modified_base 16: mod_base = OTHER; note = 2'-fluoroadenosine-3'-phosphate
  modified_base 17: mod_base = OTHER; note = 2'-O-methyladenosine-3'-phosphate
  modified_base 18: mod_base = OTHER; note = 2'-O-methylcytidine-3'-phosphate
  modified_base 19: mod_base = OTHER; note = 2'-O-methyluridine-3'-phosphate
  modified_base 20: mod_base = OTHER; note = 2'-O-methylguanosine-3'-phosphate
  modified_base 21: mod_base = OTHER; note = 2'-O-methylguanosine-3'-phosphorothioate
  modified_base 22: mod_base = OTHER; note = 2'-O-methylguanosine-3'-phosphorothioate
  modified_base 23: mod_base = OTHER; note = 2'-O-methyluridine-3'-phosphate
tcattggcagctgtgaactgggt

SEQ ID NO: 2893 - RNA, 23 nt, synthetic construct
  source 1..23: mol_type = other RNA
  modified_base 1: mod_base = OTHER; note = Vinyl-phosphonate 2'-O-methyluridine-3'-phosphorothioate
  modified_base 2: mod_base = OTHER; note = 2'-fluoroadenosine-3'-phosphorothioate
  modified_base 3: mod_base = OTHER; note = 2'-O-methylguanosine-3'-phosphate
  modified_base 4: mod_base = OTHER; note = 2'-O-methyluridine-3'-phosphate
  modified_base 5: mod_base = OTHER; note = 2'-O-methylguanosine-3'-phosphate
  modified_base 6: mod_base = OTHER; note = 2'-fluorocytidine-3'-phosphate
  modified_base 7: mod_base = OTHER; note = 2'-O-methyladenosine-3'-phosphate
  modified_base 8: mod_base = OTHER; note = 2'-fluorouridine-3'-phosphate
  modified_base 9: mod_base = OTHER; note = 2'-fluoroadenosine-3'-phosphate
  modified_base 10: mod_base = OTHER; note = 2'-O-methylcytidine-3'-phosphate
  modified_base 11: mod_base = OTHER; note = 2'-O-methyladenosine-3'-phosphate
  modified_base 12: mod_base = OTHER; note = 2'-O-methylcytidine-3'-phosphate
  modified_base 13: mod_base = OTHER; note = 2'-O-methyladenosine-3'-phosphate
  modified_base 14: mod_base = OTHER; note = 2'-fluorocytidine-3'-phosphate
  modified_base 15: mod_base = OTHER; note = 2'-O-methylguanosine-3'-phosphate
  modified_base 16: mod_base = OTHER; note = 2'-fluorouridine-3'-phosphate
  modified_base 17: mod_base = OTHER; note = 2'-O-methylguanosine-3'-phosphate
  modified_base 18: mod_base = OTHER; note = 2'-O-methylcytidine-3'-phosphate
  modified_base 19: mod_base = OTHER; note = 2'-O-methylcytidine-3'-phosphate
  modified_base 20: mod_base = OTHER; note = 2'-O-methyluridine-3'-phosphate
  modified_base 21: mod_base = OTHER; note = 2'-O-methylguanosine-3'-phosphorothioate
  modified_base 22: mod_base = OTHER; note = 2'-O-methylcytidine-3'-phosphorothioate
  modified_base 23: mod_base = OTHER; note = 2'-O-methyladenosine-3'-phosphate
tagtgcatacacacgtgcctgca

SEQ ID NO: 2894 - RNA, 23 nt, synthetic construct
  source 1..23: mol_type = other RNA
  modified_base 1: mod_base = OTHER; note = Vinyl-phosphonate 2'-O-methyluridine-3'-phosphorothioate
  modified_base 2: mod_base = OTHER; note = 2'-fluoroadenosine-3'-phosphorothioate
  modified_base 3: mod_base = OTHER; note = 2'-O-methylguanosine-3'-phosphate
  modified_base 4: mod_base = OTHER; note = 2'-O-methylguanosine-3'-phosphate
  modified_base 5: mod_base = OTHER; note = 2'-O-methylcytidine-3'-phosphate
  modified_base 6: mod_base = OTHER; note = 2'-fluorocytidine-3'-phosphate
  modified_base 7: mod_base = OTHER; note = 2'-O-methyluridine-3'-phosphate
  modified_base 8: mod_base = OTHER; note = 2'-fluorouridine-3'-phosphate
  modified_base 9: mod_base = OTHER; note = 2'-fluorouridine-3'-phosphate
  modified_base 10: mod_base = OTHER; note = 2'-O-methylguanosine-3'-phosphate
  modified_base 11: mod_base = OTHER; note = 2'-O-methyluridine-3'-phosphate
  modified_base 12: mod_base = OTHER; note = 2'-O-methyluridine-3'-phosphate
  modified_base 13: mod_base = OTHER; note = 2'-O-methylguanosine-3'-phosphate
  modified_base 14: mod_base = OTHER; note = 2'-fluoroadenosine-3'-phosphate
  modified_base 15: mod_base = OTHER; note = 2'-O-methylcytidine-3'-phosphate
  modified_base 16: mod_base = OTHER; note = 2'-fluorouridine-3'-phosphate
  modified_base 17: mod_base = OTHER; note = 2'-O-methylguanosine-3'-phosphate
  modified_base 18: mod_base = OTHER; note = 2'-O-methylcytidine-3'-phosphate
  modified_base 19: mod_base = OTHER; note = 2'-O-methylcytidine-3'-phosphate
  modified_base 20: mod_base = OTHER; note = 2'-O-methyladenosine-3'-phosphate
  modified_base 21: mod_base = OTHER; note = 2'-O-methyluridine-3'-phosphorothioate
  modified_base 22: mod_base = OTHER; note = 2'-O-methylcytidine-3'-phosphorothioate
  modified_base 23: mod_base = OTHER; note = 2'-O-methylcytidine-3'-phosphate
taggcctttgttgactgccatcc

SEQ ID NO: 2895 - RNA, 23 nt, synthetic construct
  source 1..23: mol_type = other RNA
  modified_base 1: mod_base = OTHER; note = Vinyl-phosphonate 2'-O-methyluridine-3'-phosphorothioate
  modified_base 2: mod_base = OTHER; note = 2'-fluoroadenosine-3'-phosphorothioate
  modified_base 3: mod_base = OTHER; note = 2'-O-methyluridine-3'-phosphate
  modified_base 4: mod_base = OTHER; note = 2'-O-methylcytidine-3'-phosphate
  modified_base 5: mod_base = OTHER; note = 2'-O-methyluridine-3'-phosphate
  modified_base 6: mod_base = OTHER; note = 2'-fluorouridine-3'-phosphate
  modified_base 7: mod_base = OTHER; note = 2'-O-methyluridine-3'-phosphate
  modified_base 8: mod_base = OTHER; note = 2'-fluorouridine-3'-phosphate
  modified_base 9: mod_base = OTHER; note = 2'-fluoroguanosine-3'-phosphate
  modified_base 10: mod_base = OTHER; note = 2'-O-methylguanosine-3'-phosphate
  modified_base 11: mod_base = OTHER; note = 2'-O-methylcytidine-3'-phosphate
  modified_base 12: mod_base = OTHER; note = 2'-O-methylcytidine-3'-phosphate
  modified_base 13: mod_base = OTHER; note = 2'-O-methyladenosine-3'-phosphate
  modified_base 14: mod_base = OTHER; note = 2'-fluorocytidine-3'-phosphate
  modified_base 15: mod_base = OTHER; note = 2'-O-methyladenosine-3'-phosphate
  modified_base 16: mod_base = OTHER; note = 2'-fluoroadenosine-3'-phosphate
  modified_base 17: mod_base = OTHER; note = 2'-O-methylguanosine-3'-phosphate
  modified_base 18: mod_base = OTHER; note = 2'-O-methyluridine-3'-phosphate
  modified_base 19: mod_base = OTHER; note = 2'-O-methyluridine-3'-phosphate
  modified_base 20: mod_base = OTHER; note = 2'-O-methyluridine-3'-phosphate
  modified_base 21: mod_base = OTHER; note = 2'-O-methylguanosine-3'-phosphorothioate
  modified_base 22: mod_base = OTHER; note = 2'-O-methylguanosine-3'-phosphorothioate
  modified_base 23: mod_base = OTHER; note = 2'-O-methyluridine-3'-phosphate
tatcttttggccacaagtttggt

SEQ ID NO: 2896 - RNA, 23 nt, synthetic construct
  source 1..23: mol_type = other RNA
  modified_base 1: mod_base = OTHER; note = Vinyl-phosphonate 2'-O-methyluridine-3'-phosphorothioate
  modified_base 2: mod_base = OTHER; note = 2'-fluoroguanosine-3'-phosphorothioate
  modified_base 3: mod_base = OTHER; note = 2'-O-methyladenosine-3'-phosphate
  modified_base 4: mod_base = OTHER; note = 2'-O-methylguanosine-3'-phosphate
  modified_base 5: mod_base = OTHER; note = 2'-O-methyladenosine-3'-phosphate
  modified_base 6: mod_base = OTHER; note = 2'-fluoroguanosine-3'-phosphate
  modified_base 7: mod_base = OTHER; note = 2'-O-methyladenosine-3'-phosphate
  modified_base 8: mod_base = OTHER; note = 2'-fluoroguanosine-3'-phosphate
  modified_base 9: mod_base = OTHER; note = 2'-fluoroguanosine-3'-phosphate
  modified_base 10: mod_base = OTHER; note = 2'-O-methylguanosine-3'-phosphate
  modified_base 11: mod_base = OTHER; note = 2'-O-methyluridine-3'-phosphate
  modified_base 12: mod_base = OTHER; note = 2'-O-methylguanosine-3'-phosphate
  modified_base 13: mod_base = OTHER; note = 2'-O-methyluridine-3'-phosphate
  modified_base 14: mod_base = OTHER; note = 2'-fluorouridine-3'-phosphate
  modified_base 15: mod_base = OTHER; note = 2'-O-methylguanosine-3'-phosphate
  modified_base 16: mod_base = OTHER; note = 2'-fluoroguanosine-3'-phosphate
  modified_base 17: mod_base = OTHER; note = 2'-O-methyluridine-3'-phosphate
  modified_base 18: mod_base = OTHER; note = 2'-O-methylcytidine-3'-phosphate
  modified_base 19: mod_base = OTHER; note = 2'-O-methyladenosine-3'-phosphate
  modified_base 20: mod_base = OTHER; note = 2'-O-methylguanosine-3'-phosphate
  modified_base 21: mod_base = OTHER; note = 2'-O-methyladenosine-3'-phosphorothioate
  modified_base 22: mod_base = OTHER; note = 2'-O-methylguanosine-3'-phosphorothioate
  modified_base 23: mod_base = OTHER; note = 2'-O-methylcytidine-3'-phosphate
tgagagagggtgttggtcagagc

SEQ ID NO: 2897 - RNA, 23 nt, synthetic construct
  source 1..23: mol_type = other RNA
  modified_base 1: mod_base = OTHER; note = Vinyl-phosphonate 2'-O-methyluridine-3'-phosphorothioate
  modified_base 2: mod_base = OTHER; note = 2'-fluoroguanosine-3'-phosphorothioate
  modified_base 3: mod_base = OTHER; note = 2'-O-methyladenosine-3'-phosphate
  modified_base 4: mod_base = OTHER; note = 2'-O-methylguanosine-3'-phosphate
  modified_base 5: mod_base = OTHER; note = 2'-O-methyluridine-3'-phosphate
  modified_base 6: mod_base = OTHER; note = 2'-fluoroguanosine-3'-phosphate
  modified_base 7: mod_base = OTHER; note = 2'-O-methylguanosine-3'-phosphate
  modified_base 8: mod_base = OTHER; note = 2'-fluoroguanosine-3'-phosphate
  modified_base 9: mod_base = OTHER; note = 2'-fluoroadenosine-3'-phosphate
  modified_base 10: mod_base = OTHER; note = 2'-O-methyluridine-3'-phosphate
  modified_base 11: mod_base = OTHER; note = 2'-O-methyluridine-3'-phosphate
  modified_base 12: mod_base = OTHER; note = 2'-O-methyluridine-3'-phosphate
  modified_base 13: mod_base = OTHER; note = 2'-O-methyladenosine-3'-phosphate
  modified_base 14: mod_base = OTHER; note = 2'-fluorouridine-3'-phosphate
  modified_base 15: mod_base = OTHER; note = 2'-O-methyladenosine-3'-phosphate
  modified_base 16: mod_base = OTHER; note = 2'-fluoroadenosine-3'-phosphate
  modified_base 17: mod_base = OTHER; note = 2'-O-methyluridine-3'-phosphate
  modified_base 18: mod_base = OTHER; note = 2'-O-methylguanosine-3'-phosphate
  modified_base 19: mod_base = OTHER; note = 2'-O-methyluridine-3'-phosphate
  modified_base 20: mod_base = OTHER; note = 2'-O-methylguanosine-3'-phosphate
  modified_base 21: mod_base = OTHER; note = 2'-O-methyladenosine-3'-phosphorothioate
  modified_base 22: mod_base = OTHER; note = 2'-O-methyluridine-3'-phosphorothioate
  modified_base 23: mod_base = OTHER; note = 2'-O-methyladenosine-3'-phosphate
tgagtgggatttataatgtgata

SEQ ID NO: 2898 - RNA, 23 nt, synthetic construct
  source 1..23: mol_type = other RNA
  modified_base 1: mod_base = OTHER; note = Vinyl-phosphonate 2'-O-methyluridine-3'-phosphorothioate
  modified_base 2: mod_base = OTHER; note = 2'-fluorouridine -3'-phosphorothioate
  modified_base 3: mod_base = OTHER; note = 2'-O-methylcytidine-3'-phosphate
  modified_base 4: mod_base = OTHER; note = 2'-O-methyladenosine-3'-phosphate
  modified_base 5: mod_base = OTHER; note = 2'-O-methylcytidine-3'-phosphate
  modified_base 6: mod_base = OTHER; note = 2'-fluorouridine-3'-phosphate
  modified_base 7: mod_base = OTHER; note = 2'-O-methylguanosine-3'-phosphate
  modified_base 8: mod_base = OTHER; note = 2'-fluoroadenosine-3'-phosphate
  modified_base 9: mod_base = OTHER; note = 2'-fluoroadenosine-3'-phosphate
  modified_base 10: mod_base = OTHER; note = 2'-O-methylcytidine-3'-phosphate
  modified_base 11: mod_base = OTHER; note = 2'-O-methyluridine-3'-phosphate
  modified_base 12: mod_base = OTHER; note = 2'-O-methyluridine-3'-phosphate
  modified_base 13: mod_base = OTHER; note = 2'-O-methylguanosine-3'-phosphate
  modified_base 14: mod_base = OTHER; note = 2'-fluorouridine-3'-phosphate
  modified_base 15: mod_base = OTHER; note = 2'-O-methyluridine-3'-phosphate
  modified_base 16: mod_base = OTHER; note = 2'-fluorocytidine-3'-phosphate
  modified_base 17: mod_base = OTHER; note = 2'-O-methyluridine-3'-phosphate
  modified_base 18: mod_base = OTHER; note = 2'-O-methylcytidine-3'-phosphate
  modified_base 19: mod_base = OTHER; note = 2'-O-methylcytidine-3'-phosphate
  modified_base 20: mod_base = OTHER; note = 2'-O-methyluridine-3'-phosphate
  modified_base 21: mod_base = OTHER; note = 2'-O-methylcytidine-3'-phosphorothioate
  modified_base 22: mod_base = OTHER; note = 2'-O-methyladenosine-3'-phosphorothioate
  modified_base 23: mod_base = OTHER; note = 2'-O-methylguanosine-3'-phosphate
ttcactgaacttgttctcctcag

SEQ ID NO: 2899 - RNA, 23 nt, synthetic construct
  source 1..23: mol_type = other RNA
  modified_base 1: mod_base = OTHER; note = Vinyl-phosphonate 2'-O-methyluridine-3'-phosphorothioate
  modified_base 2: mod_base = OTHER; note = 2'-fluorouridine -3'-phosphorothioate
  modified_base 3: mod_base = OTHER; note = 2'-O-methylguanosine-3'-phosphate
  modified_base 4: mod_base = OTHER; note = 2'-O-methylcytidine-3'-phosphate
  modified_base 5: mod_base = OTHER; note = 2'-O-methyladenosine-3'-phosphate
  modified_base 6: mod_base = OTHER; note = 2'-fluoroguanosine-3'-phosphate
  modified_base 7: mod_base = OTHER; note = 2'-O-methylcytidine-3'-phosphate
  modified_base 8: mod_base = OTHER; note = 2'-fluoroadenosine-3'-phosphate
  modified_base 9: mod_base = OTHER; note = 2'-fluorocytidine-3'-phosphate
  modified_base 10: mod_base = OTHER; note = 2'-O-methyladenosine-3'-phosphate
  modified_base 11: mod_base = OTHER; note = 2'-O-methyluridine-3'-phosphate
  modified_base 12: mod_base = OTHER; note = 2'-O-methyluridine-3'-phosphate
  modified_base 13: mod_base = OTHER; note = 2'-O-methylcytidine-3'-phosphate
  modified_base 14: mod_base = OTHER; note = 2'-fluorouridine-3'-phosphate
  modified_base 15: mod_base = OTHER; note = 2'-O-methylcytidine-3'-phosphate
  modified_base 16: mod_base = OTHER; note = 2'-fluorocytidine-3'-phosphate
  modified_base 17: mod_base = OTHER; note = 2'-O-methyluridine-3'-phosphate
  modified_base 18: mod_base = OTHER; note = 2'-O-methylguanosine-3'-phosphate
  modified_base 19: mod_base = OTHER; note = 2'-O-methylcytidine-3'-phosphate
  modified_base 20: mod_base = OTHER; note = 2'-O-methyluridine-3'-phosphate
  modified_base 21: mod_base = OTHER; note = 2'-O-methylcytidine-3'-phosphorothioate
  modified_base 22: mod_base = OTHER; note = 2'-O-methyladenosine-3'-phosphorothioate
  modified_base 23: mod_base = OTHER; note = 2'-O-methylguanosine-3'-phosphate
ttgcagcacattctcctgctcag

SEQ ID NO: 2900 - RNA, 23 nt, synthetic construct
  source 1..23: mol_type = other RNA
  modified_base 1: mod_base = OTHER; note = Vinyl-phosphonate 2'-O-methyluridine-3'-phosphorothioate
  modified_base 2: mod_base = OTHER; note = 2'-fluorouridine -3'-phosphorothioate
  modified_base 3: mod_base = OTHER; note = 2'-O-methyladenosine-3'-phosphate
  modified_base 4: mod_base = OTHER; note = 2'-O-methylguanosine-3'-phosphate
  modified_base 5: mod_base = OTHER; note = 2'-O-methyluridine-3'-phosphate
  modified_base 6: mod_base = OTHER; note = 2'-fluoroguanosine-3'-phosphate
  modified_base 7: mod_base = OTHER; note = 2'-O-methylcytidine-3'-phosphate
  modified_base 8: mod_base = OTHER; note = 2'-fluorouridine-3'-phosphate
  modified_base 9: mod_base = OTHER; note = 2'-fluoroguanosine-3'-phosphate
  modified_base 10: mod_base = OTHER; note = 2'-O-methylguanosine-3'-phosphate
  modified_base 11: mod_base = OTHER; note = 2'-O-methyluridine-3'-phosphate
  modified_base 12: mod_base = OTHER; note = 2'-O-methylguanosine-3'-phosphate
  modified_base 13: mod_base = OTHER; note = 2'-O-methyluridine-3'-phosphate
  modified_base 14: mod_base = OTHER; note = 2'-fluoroadenosine-3'-phosphate
  modified_base 15: mod_base = OTHER; note = 2'-O-methylguanosine-3'-phosphate
  modified_base 16: mod_base = OTHER; note = 2'-fluoroguanosine-3'-phosphate
  modified_base 17: mod_base = OTHER; note = 2'-O-methyluridine-3'-phosphate
  modified_base 18: mod_base = OTHER; note = 2'-O-methylcytidine-3'-phosphate
  modified_base 19: mod_base = OTHER; note = 2'-O-methyluridine-3'-phosphate
  modified_base 20: mod_base = OTHER; note = 2'-O-methyluridine-3'-phosphate
  modified_base 21: mod_base = OTHER; note = 2'-O-methylcytidine-3'-phosphorothioate
  modified_base 22: mod_base = OTHER; note = 2'-O-methyluridine-3'-phosphorothioate
  modified_base 23: mod_base = OTHER; note = 2'-O-methylguanosine-3'-phosphate
ttagtgctggtgtaggtcttctg

SEQ ID NO: 2901 - RNA, 23 nt, synthetic construct
  source 1..23: mol_type = other RNA
  modified_base 1: mod_base = OTHER; note = Vinyl-phosphonate 2'-O-methyluridine-3'-phosphorothioate
  modified_base 2: mod_base = OTHER; note = 2'-fluorocytidine-3'-phosphorothioate
  modified_base 3: mod_base = OTHER; note = 2'-O-methyladenosine-3'-phosphate
  modified_base 4: mod_base = OTHER; note = 2'-O-methyluridine-3'-phosphate
  modified_base 5: mod_base = OTHER; note = 2'-O-methylcytidine-3'-phosphate
  modified_base 6: mod_base = OTHER; note = 2'-fluorocytidine-3'-phosphate
  modified_base 7: mod_base = OTHER; note = 2'-O-methyladenosine-3'-phosphate
  modified_base 8: mod_base = OTHER; note = 2'-fluoroguanosine-3'-phosphate
  modified_base 9: mod_base = OTHER; note = 2'-fluorocytidine-3'-phosphate
  modified_base 10: mod_base = OTHER; note = 2'-O-methyladenosine-3'-phosphate
  modified_base 11: mod_base = OTHER; note = 2'-O-methyladenosine-3'-phosphate
  modified_base 12: mod_base = OTHER; note = 2'-O-methylguanosine-3'-phosphate
  modified_base 13: mod_base = OTHER; note = 2'-O-methylguanosine-3'-phosphate
  modified_base 14: mod_base = OTHER; note = 2'-fluorouridine-3'-phosphate
  modified_base 15: mod_base = OTHER; note = 2'-O-methylguanosine-3'-phosphate
  modified_base 16: mod_base = OTHER; note = 2'-fluoroadenosine-3'-phosphate
  modified_base 17: mod_base = OTHER; note = 2'-O-methylguanosine-3'-phosphate
  modified_base 18: mod_base = OTHER; note = 2'-O-methylguanosine-3'-phosphate
  modified_base 19: mod_base = OTHER; note = 2'-O-methylcytidine-3'-phosphate
  modified_base 20: mod_base = OTHER; note = 2'-O-methylcytidine-3'-phosphate
  modified_base 21: mod_base = OTHER; note = 2'-O-methyluridine-3'-phosphorothioate
  modified_base 22: mod_base = OTHER; note = 2'-O-methyluridine-3'-phosphorothioate
  modified_base 23: mod_base = OTHER; note = 2'-O-methyluridine-3'-phosphate
tcatccagcaaggtgaggccttt

SEQ ID NO: 2902 - RNA, 23 nt, synthetic construct
  source 1..23: mol_type = other RNA
  modified_base 1: mod_base = OTHER; note = Vinyl-phosphonate 2'-O-methyluridine-3'-phosphorothioate
  modified_base 2: mod_base = OTHER; note = 2'-fluorocytidine-3'-phosphorothioate
  modified_base 3: mod_base = OTHER; note = 2'-O-methyluridine-3'-phosphate
  modified_base 4: mod_base = OTHER; note = 2'-O-methylguanosine-3'-phosphate
  modified_base 5: mod_base = OTHER; note = 2'-O-methyluridine-3'-phosphate
  modified_base 6: mod_base = OTHER; note = 2'-fluoroguanosine-3'-phosphate
  modified_base 7: mod_base = OTHER; note = 2'-O-methyladenosine-3'-phosphate
  modified_base 8: mod_base = OTHER; note = 2'-fluoroguanosine-3'-phosphate
  modified_base 9: mod_base = OTHER; note = 2'-fluorocytidine-3'-phosphate
  modified_base 10: mod_base = OTHER; note = 2'-O-methyladenosine-3'-phosphate
  modified_base 11: mod_base = OTHER; note = 2'-O-methyladenosine-3'-phosphate
  modified_base 12: mod_base = OTHER; note = 2'-O-methylguanosine-3'-phosphate
  modified_base 13: mod_base = OTHER; note = 2'-O-methylcytidine-3'-phosphate
  modified_base 14: mod_base = OTHER; note = 2'-fluoroadenosine-3'-phosphate
  modified_base 15: mod_base = OTHER; note = 2'-O-methylguanosine-3'-phosphate
  modified_base 16: mod_base = OTHER; note = 2'-fluorocytidine-3'-phosphate
  modified_base 17: mod_base = OTHER; note = 2'-O-methyluridine-3'-phosphate
  modified_base 18: mod_base = OTHER; note = 2'-O-methylguanosine-3'-phosphate
  modified_base 19: mod_base = OTHER; note = 2'-O-methylguanosine-3'-phosphate
  modified_base 20: mod_base = OTHER; note = 2'-O-methylcytidine-3'-phosphate
  modified_base 21: mod_base = OTHER; note = 2'-O-methyluridine-3'-phosphorothioate
  modified_base 22: mod_base = OTHER; note = 2'-O-methylcytidine-3'-phosphorothioate
  modified_base 23: mod_base = OTHER; note = 2'-O-methyluridine-3'-phosphate
tctgtgagcaagcagctggctct

SEQ ID NO: 2903 - RNA, 23 nt, synthetic construct
  source 1..23: mol_type = other RNA
  modified_base 1: mod_base = OTHER; note = Vinyl-phosphonate 2'-O-methyluridine-3'-phosphorothioate
  modified_base 2: mod_base = OTHER; note = 2'-fluoroadenosine-3'-phosphorothioate
  modified_base 3: mod_base = OTHER; note = 2'-O-methylcytidine-3'-phosphate
  modified_base 4: mod_base = OTHER; note = 2'-O-methylcytidine-3'-phosphate
  modified_base 5: mod_base = OTHER; note = 2'-O-methyluridine-3'-phosphate
  modified_base 6: mod_base = OTHER; note = 2'-fluorocytidine-3'-phosphate
  modified_base 7: mod_base = OTHER; note = 2'-O-methyladenosine-3'-phosphate
  modified_base 8: mod_base = OTHER; note = 2'-fluoroguanosine-3'-phosphate
  modified_base 9: mod_base = OTHER; note = 2'-fluorouridine-3'-phosphate
  modified_base 10: mod_base = OTHER; note = 2'-O-methylcytidine-3'-phosphate
  modified_base 11: mod_base = OTHER; note = 2'-O-methyluridine-3'-phosphate
  modified_base 12: mod_base = OTHER; note = 2'-O-methylcytidine-3'-phosphate
  modified_base 13: mod_base = OTHER; note = 2'-O-methyladenosine-3'-phosphate
  modified_base 14: mod_base = OTHER; note = 2'-fluorocytidine-3'-phosphate
  modified_base 15: mod_base = OTHER; note = 2'-O-methyladenosine-3'-phosphate
  modified_base 16: mod_base = OTHER; note = 2'-fluoroguanosine-3'-phosphate
  modified_base 17: mod_base = OTHER; note = 2'-O-methyladenosine-3'-phosphate
  modified_base 18: mod_base = OTHER; note = 2'-O-methylguanosine-3'-phosphate
  modified_base 19: mod_base = OTHER; note = 2'-O-methylcytidine-3'-phosphate
  modified_base 20: mod_base = OTHER; note = 2'-O-methylcytidine-3'-phosphate
  modified_base 21: mod_base = OTHER; note = 2'-O-methylcytidine-3'-phosphorothioate
  modified_base 22: mod_base = OTHER; note = 2'-O-methyladenosine-3'-phosphorothioate
  modified_base 23: mod_base = OTHER; note = 2'-O-methylguanosine-3'-phosphate
tacctcagtctcacagagcccag

SEQ ID NO: 2904 - RNA, 23 nt, synthetic construct
  source 1..23: mol_type = other RNA
  modified_base 1: mod_base = OTHER; note = Vinyl-phosphonate 2'-O-methyluridine-3'-phosphorothioate
  modified_base 2: mod_base = OTHER; note = 2'-fluorouridine -3'-phosphorothioate
  modified_base 3: mod_base = OTHER; note = 2'-O-methylguanosine-3'-phosphate
  modified_base 4: mod_base = OTHER; note = 2'-O-methyluridine-3'-phosphate
  modified_base 5: mod_base = OTHER; note = 2'-O-methylcytidine-3'-phosphate
  modified_base 6: mod_base = OTHER; note = 2'-fluorocytidine-3'-phosphate
  modified_base 7: mod_base = OTHER; note = 2'-O-methylcytidine-3'-phosphate
  modified_base 8: mod_base = OTHER; note = 2'-fluoroguanosine-3'-phosphate
  modified_base 9: mod_base = OTHER; note = 2'-fluoroguanosine-3'-phosphate
  modified_base 10: mod_base = OTHER; note = 2'-O-methyladenosine-3'-phosphate
  modified_base 11: mod_base = OTHER; note = 2'-O-methyladenosine-3'-phosphate
  modified_base 12: mod_base = OTHER; note = 2'-O-methyluridine-3'-phosphate
  modified_base 13: mod_base = OTHER; note = 2'-O-methyluridine-3'-phosphate
  modified_base 14: mod_base = OTHER; note = 2'-fluorocytidine-3'-phosphate
  modified_base 15: mod_base = OTHER; note = 2'-O-methylguanosine-3'-phosphate
  modified_base 16: mod_base = OTHER; note = 2'-fluorocytidine-3'-phosphate
  modified_base 17: mod_base = OTHER; note = 2'-O-methyluridine-3'-phosphate
  modified_base 18: mod_base = OTHER; note = 2'-O-methylcytidine-3'-phosphate
  modified_base 19: mod_base = OTHER; note = 2'-O-methyluridine-3'-phosphate
  modified_base 20: mod_base = OTHER; note = 2'-O-methylcytidine-3'-phosphate
  modified_base 21: mod_base = OTHER; note = 2'-O-methylguanosine-3'-phosphorothioate
  modified_base 22: mod_base = OTHER; note = 2'-O-methylguanosine-3'-phosphorothioate
  modified_base 23: mod_base = OTHER; note = 2'-O-methylguanosine-3'-phosphate
ttgtcccggaattcgctctcggg

SEQ ID NO: 2905 - RNA, 23 nt, synthetic construct
  source 1..23: mol_type = other RNA
  modified_base 1: mod_base = OTHER; note = Vinyl-phosphonate 2'-O-methyluridine-3'-phosphorothioate
  modified_base 2: mod_base = OTHER; note = 2'-fluorouridine -3'-phosphorothioate
  modified_base 3: mod_base = OTHER; note = 2'-O-methyluridine-3'-phosphate
  modified_base 4: mod_base = OTHER; note = 2'-O-methylcytidine-3'-phosphate
  modified_base 5: mod_base = OTHER; note = 2'-O-methyluridine-3'-phosphate
  modified_base 6: mod_base = OTHER; note = 2'-fluoroguanosine-3'-phosphate
  modified_base 7: mod_base = OTHER; note = 2'-O-methylcytidine-3'-phosphate
  modified_base 8: mod_base = OTHER; note = 2'-fluoroadenosine-3'-phosphate
  modified_base 9: mod_base = OTHER; note = 2'-fluoroguanosine-3'-phosphate
  modified_base 10: mod_base = OTHER; note = 2'-O-methylguanosine-3'-phosphate
  modified_base 11: mod_base = OTHER; note = 2'-O-methylguanosine-3'-phosphate
  modified_base 12: mod_base = OTHER; note = 2'-O-methyluridine-3'-phosphate
  modified_base 13: mod_base = OTHER; note = 2'-O-methyladenosine-3'-phosphate
  modified_base 14: mod_base = OTHER; note = 2'-fluorouridine-3'-phosphate
  modified_base 15: mod_base = OTHER; note = 2'-O-methylguanosine-3'-phosphate
  modified_base 16: mod_base = OTHER; note = 2'-fluorouridine-3'-phosphate
  modified_base 17: mod_base = OTHER; note = 2'-O-methylguanosine-3'-phosphate
  modified_base 18: mod_base = OTHER; note = 2'-O-methylcytidine-3'-phosphate
  modified_base 19: mod_base = OTHER; note = 2'-O-methylcytidine-3'-phosphate
  modified_base 20: mod_base = OTHER; note = 2'-O-methyladenosine-3'-phosphate
  modified_base 21: mod_base = OTHER; note = 2'-O-methylcytidine-3'-phosphorothioate
  modified_base 22: mod_base = OTHER; note = 2'-O-methyladenosine-3'-phosphorothioate
  modified_base 23: mod_base = OTHER; note = 2'-O-methylcytidine-3'-phosphate
tttctgcagggtatgtgccacac

SEQ ID NO: 2906 - RNA, 23 nt, synthetic construct
  source 1..23: mol_type = other RNA
  modified_base 1: mod_base = OTHER; note = Vinyl-phosphonate 2'-O-methyluridine-3'-phosphorothioate
  modified_base 2: mod_base = OTHER; note = 2'-fluorouridine -3'-phosphorothioate
  modified_base 3: mod_base = OTHER; note = 2'-O-methyladenosine-3'-phosphate
  modified_base 4: mod_base = OTHER; note = 2'-O-methyladenosine-3'-phosphate
  modified_base 5: mod_base = OTHER; note = 2'-O-methyluridine-3'-phosphate
  modified_base 6: mod_base = OTHER; note = 2'-fluoroguanosine-3'-phosphate
  modified_base 7: mod_base = OTHER; note = 2'-O-methylcytidine-3'-phosphate
  modified_base 8: mod_base = OTHER; note = 2'-fluoroadenosine-3'-phosphate
  modified_base 9: mod_base = OTHER; note = 2'-fluorocytidine-3'-phosphate
  modified_base 10: mod_base = OTHER; note = 2'-O-methylcytidine-3'-phosphate
  modified_base 11: mod_base = OTHER; note = 2'-O-methyladenosine-3'-phosphate
  modified_base 12: mod_base = OTHER; note = 2'-O-methylcytidine-3'-phosphate
  modified_base 13: mod_base = OTHER; note = 2'-O-methyluridine-3'-phosphate
  modified_base 14: mod_base = OTHER; note = 2'-fluoroguanosine-3'-phosphate
  modified_base 15: mod_base = OTHER; note = 2'-O-methyluridine-3'-phosphate
  modified_base 16: mod_base = OTHER; note = 2'-fluoroguanosine-3'-phosphate
  modified_base 17: mod_base = OTHER; note = 2'-O-methyluridine-3'-phosphate
  modified_base 18: mod_base = OTHER; note = 2'-O-methylcytidine-3'-phosphate
  modified_base 19: mod_base = OTHER; note = 2'-O-methylcytidine-3'-phosphate
  modified_base 20: mod_base = OTHER; note = 2'-O-methyladenosine-3'-phosphate
  modified_base 21: mod_base = OTHER; note = 2'-O-methylcytidine-3'-phosphorothioate
  modified_base 22: mod_base = OTHER; note = 2'-O-methylcytidine-3'-phosphorothioate
  modified_base 23: mod_base = OTHER; note = 2'-O-methyladenosine-3'-phosphate
ttaatgcaccactgtgtccacca

SEQ ID NO: 2907 - RNA, 23 nt, synthetic construct
  source 1..23: mol_type = other RNA
  modified_base 1: mod_base = OTHER; note = Vinyl-phosphonate 2'-O-methyluridine-3'-phosphorothioate
  modified_base 2: mod_base = OTHER; note = 2'-fluorocytidine-3'-phosphorothioate
  modified_base 3: mod_base = OTHER; note = 2'-O-methyluridine-3'-phosphate
  modified_base 4: mod_base = OTHER; note = 2'-O-methyluridine-3'-phosphate
  modified_base 5: mod_base = OTHER; note = 2'-O-methylguanosine-3'-phosphate
  modified_base 6: mod_base = OTHER; note = 2'-fluoroguanosine-3'-phosphate
  modified_base 7: mod_base = OTHER; note = 2'-O-methylguanosine-3'-phosphate
  modified_base 8: mod_base = OTHER; note = 2'-fluoroadenosine-3'-phosphate
  modified_base 9: mod_base = OTHER; note = 2'-fluoroguanosine-3'-phosphate
  modified_base 10: mod_base = OTHER; note = 2'-O-methyladenosine-3'-phosphate
  modified_base 11: mod_base = OTHER; note = 2'-O-methylcytidine-3'-phosphate
  modified_base 12: mod_base = OTHER; note = 2'-O-methyluridine-3'-phosphate
  modified_base 13: mod_base = OTHER; note = 2'-O-methyluridine-3'-phosphate
  modified_base 14: mod_base = OTHER; note = 2'-fluorocytidine-3'-phosphate
  modified_base 15: mod_base = OTHER; note = 2'-O-methyluridine-3'-phosphate
  modified_base 16: mod_base = OTHER; note = 2'-fluoroguanosine-3'-phosphate
  modified_base 17: mod_base = OTHER; note = 2'-O-methylguanosine-3'-phosphate
  modified_base 18: mod_base = OTHER; note = 2'-O-methylguanosine-3'-phosphate
  modified_base 19: mod_base = OTHER; note = 2'-O-methylcytidine-3'-phosphate
  modified_base 20: mod_base = OTHER; note = 2'-O-methyluridine-3'-phosphate
  modified_base 21: mod_base = OTHER; note = 2'-O-methyluridine-3'-phosphorothioate
  modified_base 22: mod_base = OTHER; note = 2'-O-methylguanosine-3'-phosphorothioate
  modified_base 23: mod_base = OTHER; note = 2'-O-methylcytidine-3'-phosphate
tcttgggagacttctgggcttgc

SEQ ID NO: 2908 - RNA, 23 nt, synthetic construct
  source 1..23: mol_type = other RNA
  modified_base 1: mod_base = OTHER; note = Vinyl-phosphonate 2'-O-methyluridine-3'-phosphorothioate
  modified_base 2: mod_base = OTHER; note = 2'-fluorocytidine-3'-phosphorothioate
  modified_base 3: mod_base = OTHER; note = 2'-O-methyladenosine-3'-phosphate
  modified_base 4: mod_base = OTHER; note = 2'-O-methyluridine-3'-phosphate
  modified_base 5: mod_base = OTHER; note = 2'-O-methylcytidine-3'-phosphate
  modified_base 6: mod_base = OTHER; note = 2'-fluorouridine-3'-phosphate
  modified_base 7: mod_base = OTHER; note = 2'-O-methylguanosine-3'-phosphate
  modified_base 8: mod_base = OTHER; note = 2'-fluoroadenosine-3'-phosphate
  modified_base 9: mod_base = OTHER; note = 2'-fluorouridine-3'-phosphate
  modified_base 10: mod_base = OTHER; note = 2'-O-methyladenosine-3'-phosphate
  modified_base 11: mod_base = OTHER; note = 2'-O-methylguanosine-3'-phosphate
  modified_base 12: mod_base = OTHER; note = 2'-O-methylguanosine-3'-phosphate
  modified_base 13: mod_base = OTHER; note = 2'-O-methylguanosine-3'-phosphate
  modified_base 14: mod_base = OTHER; note = 2'-fluoroadenosine-3'-phosphate
  modified_base 15: mod_base = OTHER; note = 2'-O-methylcytidine-3'-phosphate
  modified_base 16: mod_base = OTHER; note = 2'-fluoroadenosine-3'-phosphate
  modified_base 17: mod_base = OTHER; note = 2'-O-methyluridine-3'-phosphate
  modified_base 18: mod_base = OTHER; note = 2'-O-methylguanosine-3'-phosphate
  modified_base 19: mod_base = OTHER; note = 2'-O-methylguanosine-3'-phosphate
  modified_base 20: mod_base = OTHER; note = 2'-O-methylcytidine-3'-phosphate
  modified_base 21: mod_base = OTHER; note = 2'-O-methylcytidine-3'-phosphorothioate
  modified_base 22: mod_base = OTHER; note = 2'-O-methylcytidine-3'-phosphorothioate
  modified_base 23: mod_base = OTHER; note = 2'-O-methyluridine-3'-phosphate
tcatctgatagggacatggccct

SEQ ID NO: 2909 - RNA, 23 nt, synthetic construct
  source 1..23: mol_type = other RNA
  modified_base 1: mod_base = OTHER; note = Vinyl-phosphonate 2'-O-methyluridine-3'-phosphorothioate
  modified_base 2: mod_base = OTHER; note = 2'-fluorouridine -3'-phosphorothioate
  modified_base 3: mod_base = OTHER; note = 2'-O-methylguanosine-3'-phosphate
  modified_base 4: mod_base = OTHER; note = 2'-O-methyluridine-3'-phosphate
  modified_base 5: mod_base = OTHER; note = 2'-O-methyluridine-3'-phosphate
  modified_base 6: mod_base = OTHER; note = 2'-fluoroadenosine-3'-phosphate
  modified_base 7: mod_base = OTHER; note = 2'-O-methylguanosine-3'-phosphate
  modified_base 8: mod_base = OTHER; note = 2'-fluoroadenosine-3'-phosphate
  modified_base 9: mod_base = OTHER; note = 2'-fluoroguanosine-3'-phosphate
  modified_base 10: mod_base = OTHER; note = 2'-O-methyladenosine-3'-phosphate
  modified_base 11: mod_base = OTHER; note = 2'-O-methyladenosine-3'-phosphate
  modified_base 12: mod_base = OTHER; note = 2'-O-methyladenosine-3'-phosphate
  modified_base 13: mod_base = OTHER; note = 2'-O-methylcytidine-3'-phosphate
  modified_base 14: mod_base = OTHER; note = 2'-fluorocytidine-3'-phosphate
  modified_base 15: mod_base = OTHER; note = 2'-O-methylcytidine-3'-phosphate
  modified_base 16: mod_base = OTHER; note = 2'-fluoroguanosine-3'-phosphate
  modified_base 17: mod_base = OTHER; note = 2'-O-methylcytidine-3'-phosphate
  modified_base 18: mod_base = OTHER; note = 2'-O-methylcytidine-3'-phosphate
  modified_base 19: mod_base = OTHER; note = 2'-O-methylguanosine-3'-phosphate
  modified_base 20: mod_base = OTHER; note = 2'-O-methylguanosine-3'-phosphate
  modified_base 21: mod_base = OTHER; note = 2'-O-methylcytidine-3'-phosphorothioate
  modified_base 22: mod_base = OTHER; note = 2'-O-methylcytidine-3'-phosphorothioate
  modified_base 23: mod_base = OTHER; note = 2'-O-methylcytidine-3'-phosphate
ttgttagagaaacccgccggccc

SEQ ID NO: 2910 - RNA, 23 nt, synthetic construct
  source 1..23: mol_type = other RNA
  modified_base 1: mod_base = OTHER; note = Vinyl-phosphonate 2'-O-methyluridine-3'-phosphorothioate
  modified_base 2: mod_base = OTHER; note = 2'-fluoroguanosine-3'-phosphorothioate
  modified_base 3: mod_base = OTHER; note = 2'-O-methyluridine-3'-phosphate
  modified_base 4: mod_base = OTHER; note = 2'-O-methylguanosine-3'-phosphate
  modified_base 5: mod_base = OTHER; note = 2'-O-methylguanosine-3'-phosphate
  modified_base 6: mod_base = OTHER; note = 2'-fluoroadenosine-3'-phosphate
  modified_base 7: mod_base = OTHER; note = 2'-O-methylguanosine-3'-phosphate
  modified_base 8: mod_base = OTHER; note = 2'-fluoroadenosine-3'-phosphate
  modified_base 9: mod_base = OTHER; note = 2'-fluorouridine-3'-phosphate
  modified_base 10: mod_base = OTHER; note = 2'-O-methylguanosine-3'-phosphate
  modified_base 11: mod_base = OTHER; note = 2'-O-methylguanosine-3'-phosphate
  modified_base 12: mod_base = OTHER; note = 2'-O-methyluridine-3'-phosphate
  modified_base 13: mod_base = OTHER; note = 2'-O-methylguanosine-3'-phosphate
  modified_base 14: mod_base = OTHER; note = 2'-fluorouridine-3'-phosphate
  modified_base 15: mod_base = OTHER; note = 2'-O-methylcytidine-3'-phosphate
  modified_base 16: mod_base = OTHER; note = 2'-fluorocytidine-3'-phosphate
  modified_base 17: mod_base = OTHER; note = 2'-O-methyluridine-3'-phosphate
  modified_base 18: mod_base = OTHER; note = 2'-O-methyluridine-3'-phosphate
  modified_base 19: mod_base = OTHER; note = 2'-O-methylcytidine-3'-phosphate
  modified_base 20: mod_base = OTHER; note = 2'-O-methyladenosine-3'-phosphate
  modified_base 21: mod_base = OTHER; note = 2'-O-methylguanosine-3'-phosphorothioate
  modified_base 22: mod_base = OTHER; note = 2'-O-methylcytidine-3'-phosphorothioate
  modified_base 23: mod_base = OTHER; note = 2'-O-methyluridine-3'-phosphate
tgtggagatggtgtccttcagct

SEQ ID NO: 2911 - RNA, 23 nt, synthetic construct
  source 1..23: mol_type = other RNA
  modified_base 1: mod_base = OTHER; note = Vinyl-phosphonate 2'-O-methyluridine-3'-phosphorothioate
  modified_base 2: mod_base = OTHER; note = 2'-fluorouridine -3'-phosphorothioate
  modified_base 3: mod_base = OTHER; note = 2'-O-methylcytidine-3'-phosphate
  modified_base 4: mod_base = OTHER; note = 2'-O-methyladenosine-3'-phosphate
  modified_base 5: mod_base = OTHER; note = 2'-O-methylcytidine-3'-phosphate
  modified_base 6: mod_base = OTHER; note = 2'-fluoroadenosine-3'-phosphate
  modified_base 7: mod_base = OTHER; note = 2'-O-methylguanosine-3'-phosphate
  modified_base 8: mod_base = OTHER; note = 2'-fluorocytidine-3'-phosphate
  modified_base 9: mod_base = OTHER; note = 2'-fluorocytidine-3'-phosphate
  modified_base 10: mod_base = OTHER; note = 2'-O-methylguanosine-3'-phosphate
  modified_base 11: mod_base = OTHER; note = 2'-O-methyladenosine-3'-phosphate
  modified_base 12: mod_base = OTHER; note = 2'-O-methylguanosine-3'-phosphate
  modified_base 13: mod_base = OTHER; note = 2'-O-methyladenosine-3'-phosphate
  modified_base 14: mod_base = OTHER; note = 2'-fluorouridine-3'-phosphate
  modified_base 15: mod_base = OTHER; note = 2'-O-methylguanosine-3'-phosphate
  modified_base 16: mod_base = OTHER; note = 2'-fluoroguanosine-3'-phosphate
  modified_base 17: mod_base = OTHER; note = 2'-O-methyluridine-3'-phosphate
  modified_base 18: mod_base = OTHER; note = 2'-O-methylguanosine-3'-phosphate
  modified_base 19: mod_base = OTHER; note = 2'-O-methylguanosine-3'-phosphate
  modified_base 20: mod_base = OTHER; note = 2'-O-methyluridine-3'-phosphate
  modified_base 21: mod_base = OTHER; note = 2'-O-methylcytidine-3'-phosphorothioate
  modified_base 22: mod_base = OTHER; note = 2'-O-methyluridine-3'-phosphorothioate
  modified_base 23: mod_base = OTHER; note = 2'-O-methylguanosine-3'-phosphate
ttcacagccgagatggtggtctg

SEQ ID NO: 2912 - RNA, 23 nt, synthetic construct
  source 1..23: mol_type = other RNA
  modified_base 1: mod_base = OTHER; note = Vinyl-phosphonate 2'-O-methyluridine-3'-phosphorothioate
  modified_base 2: mod_base = OTHER; note = 2'-fluorouridine -3'-phosphorothioate
  modified_base 3: mod_base = OTHER; note = 2'-O-methylguanosine-3'-phosphate
  modified_base 4: mod_base = OTHER; note = 2'-O-methylguanosine-3'-phosphate
  modified_base 5: mod_base = OTHER; note = 2'-O-methyluridine-3'-phosphate
  modified_base 6: mod_base = OTHER; note = 2'-fluoroguanosine-3'-phosphate
  modified_base 7: mod_base = OTHER; note = 2'-O-methyluridine-3'-phosphate
  modified_base 8: mod_base = OTHER; note = 2'-fluorocytidine-3'-phosphate
  modified_base 9: mod_base = OTHER; note = 2'-fluorocytidine-3'-phosphate
  modified_base 10: mod_base = OTHER; note = 2'-O-methylcytidine-3'-phosphate
  modified_base 11: mod_base = OTHER; note = 2'-O-methyluridine-3'-phosphate
  modified_base 12: mod_base = OTHER; note = 2'-O-methyluridine-3'-phosphate
  modified_base 13: mod_base = OTHER; note = 2'-O-methyladenosine-3'-phosphate
  modified_base 14: mod_base = OTHER; note = 2'-fluoroadenosine-3'-phosphate
  modified_base 15: mod_base = OTHER; note = 2'-O-methyladenosine-3'-phosphate
  modified_base 16: mod_base = OTHER; note = 2'-fluoroadenosine-3'-phosphate
  modified_base 17: mod_base = OTHER; note = 2'-O-methyladenosine-3'-phosphate
  modified_base 18: mod_base = OTHER; note = 2'-O-methylcytidine-3'-phosphate
  modified_base 19: mod_base = OTHER; note = 2'-O-methyluridine-3'-phosphate
  modified_base 20: mod_base = OTHER; note = 2'-O-methylguanosine-3'-phosphate
  modified_base 21: mod_base = OTHER; note = 2'-O-methylguanosine-3'-phosphorothioate
  modified_base 22: mod_base = OTHER; note = 2'-O-methylcytidine-3'-phosphorothioate
  modified_base 23: mod_base = OTHER; note = 2'-O-methyluridine-3'-phosphate
ttggtgtcccttaaaaactggct

SEQ ID NO: 2913 - RNA, 23 nt, synthetic construct
  source 1..23: mol_type = other RNA
  modified_base 1: mod_base = OTHER; note = Vinyl-phosphonate 2'-O-methyluridine-3'-phosphorothioate
  modified_base 2: mod_base = OTHER; note = 2'-fluoroadenosine-3'-phosphorothioate
  modified_base 3: mod_base = OTHER; note = 2'-O-methyluridine-3'-phosphate
  modified_base 4: mod_base = OTHER; note = 2'-O-methyluridine-3'-phosphate
  modified_base 5: mod_base = OTHER; note = 2'-O-methylcytidine-3'-phosphate
  modified_base 6: mod_base = OTHER; note = 2'-fluorocytidine-3'-phosphate
  modified_base 7: mod_base = OTHER; note = 2'-O-methylguanosine-3'-phosphate
  modified_base 8: mod_base = OTHER; note = 2'-fluorocytidine-3'-phosphate
  modified_base 9: mod_base = OTHER; note = 2'-fluoroadenosine-3'-phosphate
  modified_base 10: mod_base = OTHER; note = 2'-O-methylguanosine-3'-phosphate
  modified_base 11: mod_base = OTHER; note = 2'-O-methyluridine-3'-phosphate
  modified_base 12: mod_base = OTHER; note = 2'-O-methylguanosine-3'-phosphate
  modified_base 13: mod_base = OTHER; note = 2'-O-methyluridine-3'-phosphate
  modified_base 14: mod_base = OTHER; note = 2'-fluorocytidine-3'-phosphate
  modified_base 15: mod_base = OTHER; note = 2'-O-methyluridine-3'-phosphate
  modified_base 16: mod_base = OTHER; note = 2'-fluorocytidine-3'-phosphate
  modified_base 17: mod_base = OTHER; note = 2'-O-methyluridine-3'-phosphate
  modified_base 18: mod_base = OTHER; note = 2'-O-methylguanosine-3'-phosphate
  modified_base 19: mod_base = OTHER; note = 2'-O-methylguanosine-3'-phosphate
  modified_base 20: mod_base = OTHER; note = 2'-O-methylcytidine-3'-phosphate
  modified_base 21: mod_base = OTHER; note = 2'-O-methylcytidine-3'-phosphorothioate
  modified_base 22: mod_base = OTHER; note = 2'-O-methyladenosine-3'-phosphorothioate
  modified_base 23: mod_base = OTHER; note = 2'-O-methylcytidine-3'-phosphate
tattccgcagtgtctctggccac

SEQ ID NO: 2914 - RNA, 23 nt, synthetic construct
  source 1..23: mol_type = other RNA
  modified_base 1: mod_base = OTHER; note = Vinyl-phosphonate 2'-O-methyluridine-3'-phosphorothioate
  modified_base 2: mod_base = OTHER; note = 2'-fluoroadenosine-3'-phosphorothioate
  modified_base 3: mod_base = OTHER; note = 2'-O-methyladenosine-3'-phosphate
  modified_base 4: mod_base = OTHER; note = 2'-O-methylguanosine-3'-phosphate
  modified_base 5: mod_base = OTHER; note = 2'-O-methyluridine-3'-phosphate
  modified_base 6: mod_base = OTHER; note = 2'-fluoroguanosine-3'-phosphate
  modified_base 7: mod_base = OTHER; note = 2'-O-methylcytidine-3'-phosphate
  modified_base 8: mod_base = OTHER; note = 2'-fluorouridine-3'-phosphate
  modified_base 9: mod_base = OTHER; note = 2'-fluorocytidine-3'-phosphate
  modified_base 10: mod_base = OTHER; note = 2'-O-methylguanosine-3'-phosphate
  modified_base 11: mod_base = OTHER; note = 2'-O-methylcytidine-3'-phosphate
  modified_base 12: mod_base = OTHER; note = 2'-O-methylguanosine-3'-phosphate
  modified_base 13: mod_base = OTHER; note = 2'-O-methyladenosine-3'-phosphate
  modified_base 14: mod_base = OTHER; note = 2'-fluorouridine-3'-phosphate
  modified_base 15: mod_base = OTHER; note = 2'-O-methylguanosine-3'-phosphate
  modified_base 16: mod_base = OTHER; note = 2'-fluoroguanosine-3'-phosphate
  modified_base 17: mod_base = OTHER; note = 2'-O-methylguanosine-3'-phosphate
  modified_base 18: mod_base = OTHER; note = 2'-O-methyladenosine-3'-phosphate
  modified_base 19: mod_base = OTHER; note = 2'-O-methyladenosine-3'-phosphate
  modified_base 20: mod_base = OTHER; note = 2'-O-methylcytidine-3'-phosphate
  modified_base 21: mod_base = OTHER; note = 2'-O-methylguanosine-3'-phosphorothioate
  modified_base 22: mod_base = OTHER; note = 2'-O-methylcytidine-3'-phosphorothioate
  modified_base 23: mod_base = OTHER; note = 2'-O-methyluridine-3'-phosphate
taagtgctcgcgatgggaacgct

SEQ ID NO: 2915 - RNA, 23 nt, synthetic construct
  source 1..23: mol_type = other RNA
  modified_base 1: mod_base = OTHER; note = Vinyl-phosphonate 2'-O-methyluridine-3'-phosphorothioate
  modified_base 2: mod_base = OTHER; note = 2'-fluoroguanosine-3'-phosphorothioate
  modified_base 3: mod_base = OTHER; note = 2'-O-methyluridine-3'-phosphate
  modified_base 4: mod_base = OTHER; note = 2'-O-methylguanosine-3'-phosphate
  modified_base 5: mod_base = OTHER; note = 2'-O-methylguanosine-3'-phosphate
  modified_base 6: mod_base = OTHER; note = 2'-fluoroguanosine-3'-phosphate
  modified_base 7: mod_base = OTHER; note = 2'-O-methyluridine-3'-phosphate
  modified_base 8: mod_base = OTHER; note = 2'-fluorouridine-3'-phosphate
  modified_base 9: mod_base = OTHER; note = 2'-fluoroguanosine-3'-phosphate
  modified_base 10: mod_base = OTHER; note = 2'-O-methyluridine-3'-phosphate
  modified_base 11: mod_base = OTHER; note = 2'-O-methylcytidine-3'-phosphate
  modified_base 12: mod_base = OTHER; note = 2'-O-methylguanosine-3'-phosphate
  modified_base 13: mod_base = OTHER; note = 2'-O-methyladenosine-3'-phosphate
  modified_base 14: mod_base = OTHER; note = 2'-fluorouridine-3'-phosphate
  modified_base 15: mod_base = OTHER; note = 2'-O-methylguanosine-3'-phosphate
  modified_base 16: mod_base = OTHER; note = 2'-fluorouridine-3'-phosphate
  modified_base 17: mod_base = OTHER; note = 2'-O-methylcytidine-3'-phosphate
  modified_base 18: mod_base = OTHER; note = 2'-O-methylcytidine-3'-phosphate
  modified_base 19: mod_base = OTHER; note = 2'-O-methylcytidine-3'-phosphate
  modified_base 20: mod_base = OTHER; note = 2'-O-methylguanosine-3'-phosphate
  modified_base 21: mod_base = OTHER; note = 2'-O-methylguanosine-3'-phosphorothioate
  modified_base 22: mod_base = OTHER; note = 2'-O-methyladenosine-3'-phosphorothioate
  modified_base 23: mod_base = OTHER; note = 2'-O-methyladenosine-3'-phosphate
tgtgggttgtcgatgtcccggaa

SEQ ID NO: 2916 - RNA, 23 nt, synthetic construct
  source 1..23: mol_type = other RNA
  modified_base 1: mod_base = OTHER; note = Vinyl-phosphonate 2'-O-methyluridine-3'-phosphorothioate
  modified_base 2: mod_base = OTHER; note = 2'-fluorouridine -3'-phosphorothioate
  modified_base 3: mod_base = OTHER; note = 2'-O-methylguanosine-3'-phosphate
  modified_base 4: mod_base = OTHER; note = 2'-O-methylguanosine-3'-phosphate
  modified_base 5: mod_base = OTHER; note = 2'-O-methylguanosine-3'-phosphate
  modified_base 6: mod_base = OTHER; note = 2'-fluoroadenosine-3'-phosphate
  modified_base 7: mod_base = OTHER; note = 2'-O-methylguanosine-3'-phosphate
  modified_base 8: mod_base = OTHER; note = 2'-fluorocytidine-3'-phosphate
  modified_base 9: mod_base = OTHER; note = 2'-fluorocytidine-3'-phosphate
  modified_base 10: mod_base = OTHER; note = 2'-O-methyluridine-3'-phosphate
  modified_base 11: mod_base = OTHER; note = 2'-O-methyladenosine-3'-phosphate
  modified_base 12: mod_base = OTHER; note = 2'-O-methylguanosine-3'-phosphate
  modified_base 13: mod_base = OTHER; note = 2'-O-methyladenosine-3'-phosphate
  modified_base 14: mod_base = OTHER; note = 2'-fluorouridine-3'-phosphate
  modified_base 15: mod_base = OTHER; note = 2'-O-methylcytidine-3'-phosphate
  modified_base 16: mod_base = OTHER; note = 2'-fluoroadenosine-3'-phosphate
  modified_base 17: mod_base = OTHER; note = 2'-O-methyluridine-3'-phosphate
  modified_base 18: mod_base = OTHER; note = 2'-O-methylcytidine-3'-phosphate
  modified_base 19: mod_base = OTHER; note = 2'-O-methyladenosine-3'-phosphate
  modified_base 20: mod_base = OTHER; note = 2'-O-methylguanosine-3'-phosphate
  modified_base 21: mod_base = OTHER; note = 2'-O-methyladenosine-3'-phosphorothioate
  modified_base 22: mod_base = OTHER; note = 2'-O-methylguanosine-3'-phosphorothioate
  modified_base 23: mod_base = OTHER; note = 2'-O-methylguanosine-3'-phosphate
ttgggagcctagatcatcagagg

SEQ ID NO: 2917 - RNA, 23 nt, synthetic construct
  source 1..23: mol_type = other RNA
  modified_base 1: mod_base = OTHER; note = Vinyl-phosphonate 2'-O-methyluridine-3'-phosphorothioate
  modified_base 2: mod_base = OTHER; note = 2'-fluoroguanosine-3'-phosphorothioate
  modified_base 3: mod_base = OTHER; note = 2'-O-methyluridine-3'-phosphate
  modified_base 4: mod_base = OTHER; note = 2'-O-methylcytidine-3'-phosphate
  modified_base 5: mod_base = OTHER; note = 2'-O-methyluridine-3'-phosphate
  modified_base 6: mod_base = OTHER; note = 2'-fluoroguanosine-3'-phosphate
  modified_base 7: mod_base = OTHER; note = 2'-O-methylguanosine-3'-phosphate
  modified_base 8: mod_base = OTHER; note = 2'-fluoroadenosine-3'-phosphate
  modified_base 9: mod_base = OTHER; note = 2'-fluoroguanosine-3'-phosphate
  modified_base 10: mod_base = OTHER; note = 2'-O-methylguanosine-3'-phosphate
  modified_base 11: mod_base = OTHER; note = 2'-O-methylguanosine-3'-phosphate
  modified_base 12: mod_base = OTHER; note = 2'-O-methyluridine-3'-phosphate
  modified_base 13: mod_base = OTHER; note = 2'-O-methylcytidine-3'-phosphate
  modified_base 14: mod_base = OTHER; note = 2'-fluorouridine-3'-phosphate
  modified_base 15: mod_base = OTHER; note = 2'-O-methyluridine-3'-phosphate
  modified_base 16: mod_base = OTHER; note = 2'-fluorocytidine-3'-phosphate
  modified_base 17: mod_base = OTHER; note = 2'-O-methyluridine-3'-phosphate
  modified_base 18: mod_base = OTHER; note = 2'-O-methylguanosine-3'-phosphate
  modified_base 19: mod_base = OTHER; note = 2'-O-methylcytidine-3'-phosphate
  modified_base 20: mod_base = OTHER; note = 2'-O-methyladenosine-3'-phosphate
  modified_base 21: mod_base = OTHER; note = 2'-O-methylguanosine-3'-phosphorothioate
  modified_base 22: mod_base = OTHER; note = 2'-O-methylguanosine-3'-phosphorothioate
  modified_base 23: mod_base = OTHER; note = 2'-O-methylguanosine-3'-phosphate
tgtctggagggtcttctgcaggg

SEQ ID NO: 2918 - RNA, 23 nt, synthetic construct
  source 1..23: mol_type = other RNA
  modified_base 1: mod_base = OTHER; note = Vinyl-phosphonate 2'-O-methyluridine-3'-phosphorothioate
  modified_base 2: mod_base = OTHER; note = 2'-fluoroadenosine-3'-phosphorothioate
  modified_base 3: mod_base = OTHER; note = 2'-O-methylguanosine-3'-phosphate
  modified_base 4: mod_base = OTHER; note = 2'-O-methylguanosine-3'-phosphate
  modified_base 5: mod_base = OTHER; note = 2'-O-methylcytidine-3'-phosphate
  modified_base 6: mod_base = OTHER; note = 2'-fluoroadenosine-3'-phosphate
  modified_base 7: mod_base = OTHER; note = 2'-O-methylguanosine-3'-phosphate
  modified_base 8: mod_base = OTHER; note = 2'-fluorocytidine-3'-phosphate
  modified_base 9: mod_base = OTHER; note = 2'-fluorocytidine-3'-phosphate
  modified_base 10: mod_base = OTHER; note = 2'-O-methyladenosine-3'-phosphate
  modified_base 11: mod_base = OTHER; note = 2'-O-methyladenosine-3'-phosphate
  modified_base 12: mod_base = OTHER; note = 2'-O-methylguanosine-3'-phosphate
  modified_base 13: mod_base = OTHER; note = 2'-O-methylcytidine-3'-phosphate
  modified_base 14: mod_base = OTHER; note = 2'-fluorouridine-3'-phosphate
  modified_base 15: mod_base = OTHER; note = 2'-O-methyladenosine-3'-phosphate
  modified_base 16: mod_base = OTHER; note = 2'-fluorocytidine-3'-phosphate
  modified_base 17: mod_base = OTHER; note = 2'-O-methyluridine-3'-phosphate
  modified_base 18: mod_base = OTHER; note = 2'-O-methylguanosine-3'-phosphate
  modified_base 19: mod_base = OTHER; note = 2'-O-methylguanosine-3'-phosphate
  modified_base 20: mod_base = OTHER; note = 2'-O-methylcytidine-3'-phosphate
  modified_base 21: mod_base = OTHER; note = 2'-O-methylguanosine-3'-phosphorothioate
  modified_base 22: mod_base = OTHER; note = 2'-O-methylcytidine-3'-phosphorothioate
  modified_base 23: mod_base = OTHER; note = 2'-O-methyluridine-3'-phosphate
taggcagccaagctactggcgct

SEQ ID NO: 2919 - RNA, 23 nt, synthetic construct
  source 1..23: mol_type = other RNA
  modified_base 1: mod_base = OTHER; note = Vinyl-phosphonate 2'-O-methyluridine-3'-phosphorothioate
  modified_base 2: mod_base = OTHER; note = 2'-fluorouridine -3'-phosphorothioate
  modified_base 3: mod_base = OTHER; note = 2'-O-methylguanosine-3'-phosphate
  modified_base 4: mod_base = OTHER; note = 2'-O-methylguanosine-3'-phosphate
  modified_base 5: mod_base = OTHER; note = 2'-O-methyladenosine-3'-phosphate
  modified_base 6: mod_base = OTHER; note = 2'-fluorocytidine-3'-phosphate
  modified_base 7: mod_base = OTHER; note = 2'-O-methyluridine-3'-phosphate
  modified_base 8: mod_base = OTHER; note = 2'-fluorocytidine-3'-phosphate
  modified_base 9: mod_base = OTHER; note = 2'-fluoroadenosine-3'-phosphate
  modified_base 10: mod_base = OTHER; note = 2'-O-methylguanosine-3'-phosphate
  modified_base 11: mod_base = OTHER; note = 2'-O-methylcytidine-3'-phosphate
  modified_base 12: mod_base = OTHER; note = 2'-O-methylcytidine-3'-phosphate
  modified_base 13: mod_base = OTHER; note = 2'-O-methyluridine-3'-phosphate
  modified_base 14: mod_base = OTHER; note = 2'-fluoroguanosine-3'-phosphate
  modified_base 15: mod_base = OTHER; note = 2'-O-methyluridine-3'-phosphate
  modified_base 16: mod_base = OTHER; note = 2'-fluoroguanosine-3'-phosphate
  modified_base 17: mod_base = OTHER; note = 2'-O-methyladenosine-3'-phosphate
  modified_base 18: mod_base = OTHER; note = 2'-O-methyladenosine-3'-phosphate
  modified_base 19: mod_base = OTHER; note = 2'-O-methylguanosine-3'-phosphate
  modified_base 20: mod_base = OTHER; note = 2'-O-methylcytidine-3'-phosphate
  modified_base 21: mod_base = OTHER; note = 2'-O-methylguanosine-3'-phosphorothioate
  modified_base 22: mod_base = OTHER; note = 2'-O-methylguanosine-3'-phosphorothioate
  modified_base 23: mod_base = OTHER; note = 2'-O-methylcytidine-3'-phosphate
ttggactcagcctgtgaagcggc

SEQ ID NO: 2920 - RNA, 23 nt, synthetic construct
  source 1..23: mol_type = other RNA
  modified_base 1: mod_base = OTHER; note = Vinyl-phosphonate 2'-O-methyluridine-3'-phosphorothioate
  modified_base 2: mod_base = OTHER; note = 2'-fluorocytidine-3'-phosphorothioate
  modified_base 3: mod_base = OTHER; note = 2'-O-methylcytidine-3'-phosphate
  modified_base 4: mod_base = OTHER; note = 2'-O-methyladenosine-3'-phosphate
  modified_base 5: mod_base = OTHER; note = 2'-O-methyladenosine-3'-phosphate
  modified_base 6: mod_base = OTHER; note = 2'-fluoroadenosine-3'-phosphate
  modified_base 7: mod_base = OTHER; note = 2'-O-methyladenosine-3'-phosphate
  modified_base 8: mod_base = OTHER; note = 2'-fluoroguanosine-3'-phosphate
  modified_base 9: mod_base = OTHER; note = 2'-fluoroguanosine-3'-phosphate
  modified_base 10: mod_base = OTHER; note = 2'-O-methyladenosine-3'-phosphate
  modified_base 11: mod_base = OTHER; note = 2'-O-methyluridine-3'-phosphate
  modified_base 12: mod_base = OTHER; note = 2'-O-methylguanosine-3'-phosphate
  modified_base 13: mod_base = OTHER; note = 2'-O-methylcytidine-3'-phosphate
  modified_base 14: mod_base = OTHER; note = 2'-fluorouridine-3'-phosphate
  modified_base 15: mod_base = OTHER; note = 2'-O-methyladenosine-3'-phosphate
  modified_base 16: mod_base = OTHER; note = 2'-fluoroadenosine-3'-phosphate
  modified_base 17: mod_base = OTHER; note = 2'-O-methyladenosine-3'-phosphate
  modified_base 18: mod_base = OTHER; note = 2'-O-methyladenosine-3'-phosphate
  modified_base 19: mod_base = OTHER; note = 2'-O-methyladenosine-3'-phosphate
  modified_base 20: mod_base = OTHER; note = 2'-O-methyladenosine-3'-phosphate
  modified_base 21: mod_base = OTHER; note = 2'-O-methyladenosine-3'-phosphorothioate
  modified_base 22: mod_base = OTHER; note = 2'-O-methyladenosine-3'-phosphorothioate
  modified_base 23: mod_base = OTHER; note = 2'-O-methyladenosine-3'-phosphate
tccaaaaggatgctaaaaaaaaa

SEQ ID NO: 2921 - RNA, 23 nt, synthetic construct
  source 1..23: mol_type = other RNA
  modified_base 1: mod_base = OTHER; note = Vinyl-phosphonate 2'-O-methyluridine-3'-phosphorothioate
  modified_base 2: mod_base = OTHER; note = 2'-fluorouridine -3'-phosphorothioate
  modified_base 3: mod_base = OTHER; note = 2'-O-methylguanosine-3'-phosphate
  modified_base 4: mod_base = OTHER; note = 2'-O-methyladenosine-3'-phosphate
  modified_base 5: mod_base = OTHER; note = 2'-O-methylcytidine-3'-phosphate
  modified_base 6: mod_base = OTHER; note = 2'-fluorocytidine-3'-phosphate
  modified_base 7: mod_base = OTHER; note = 2'-O-methylcytidine-3'-phosphate
  modified_base 8: mod_base = OTHER; note = 2'-fluorouridine-3'-phosphate
  modified_base 9: mod_base = OTHER; note = 2'-fluoroguanosine-3'-phosphate
  modified_base 10: mod_base = OTHER; note = 2'-O-methylcytidine-3'-phosphate
  modified_base 11: mod_base = OTHER; note = 2'-O-methylguanosine-3'-phosphate
  modified_base 12: mod_base = OTHER; note = 2'-O-methylcytidine-3'-phosphate
  modified_base 13: mod_base = OTHER; note = 2'-O-methyluridine-3'-phosphate
  modified_base 14: mod_base = OTHER; note = 2'-fluorouridine-3'-phosphate
  modified_base 15: mod_base = OTHER; note = 2'-O-methyluridine-3'-phosphate
  modified_base 16: mod_base = OTHER; note = 2'-fluoroguanosine-3'-phosphate
  modified_base 17: mod_base = OTHER; note = 2'-O-methylguanosine-3'-phosphate
  modified_base 18: mod_base = OTHER; note = 2'-O-methylcytidine-3'-phosphate
  modified_base 19: mod_base = OTHER; note = 2'-O-methyluridine-3'-phosphate
  modified_base 20: mod_base = OTHER; note = 2'-O-methyluridine-3'-phosphate
  modified_base 21: mod_base = OTHER; note = 2'-O-methylcytidine-3'-phosphorothioate
  modified_base 22: mod_base = OTHER; note = 2'-O-methyluridine-3'-phosphorothioate
  modified_base 23: mod_base = OTHER; note = 2'-O-methylcytidine-3'-phosphate
ttgaccctgcgctttggcttctc

SEQ ID NO: 2922 - RNA, 23 nt, synthetic construct
  source 1..23: mol_type = other RNA
  modified_base 1: mod_base = OTHER; note = Vinyl-phosphonate 2'-O-methyluridine-3'-phosphorothioate
  modified_base 2: mod_base = OTHER; note = 2'-fluorouridine -3'-phosphorothioate
  modified_base 3: mod_base = OTHER; note = 2'-O-methylguanosine-3'-phosphate
  modified_base 4: mod_base = OTHER; note = 2'-O-methylguanosine-3'-phosphate
  modified_base 5: mod_base = OTHER; note = 2'-O-methyluridine-3'-phosphate
  modified_base 6: mod_base = OTHER; note = 2'-fluorocytidine-3'-phosphate
  modified_base 7: mod_base = OTHER; note = 2'-O-methylcytidine-3'-phosphate
  modified_base 8: mod_base = OTHER; note = 2'-fluorouridine-3'-phosphate
  modified_base 9: mod_base = OTHER; note = 2'-fluorocytidine-3'-phosphate
  modified_base 10: mod_base = OTHER; note = 2'-O-methyladenosine-3'-phosphate
  modified_base 11: mod_base = OTHER; note = 2'-O-methyluridine-3'-phosphate
  modified_base 12: mod_base = OTHER; note = 2'-O-methylguanosine-3'-phosphate
  modified_base 13: mod_base = OTHER; note = 2'-O-methyladenosine-3'-phosphate
  modified_base 14: mod_base = OTHER; note = 2'-fluorouridine-3'-phosphate
  modified_base 15: mod_base = OTHER; note = 2'-O-methylcytidine-3'-phosphate
  modified_base 16: mod_base = OTHER; note = 2'-fluorocytidine-3'-phosphate
  modified_base 17: mod_base = OTHER; note = 2'-O-methyluridine-3'-phosphate
  modified_base 18: mod_base = OTHER; note = 2'-O-methylcytidine-3'-phosphate
  modified_base 19: mod_base = OTHER; note = 2'-O-methylcytidine-3'-phosphate
  modified_base 20: mod_base = OTHER; note = 2'-O-methyluridine-3'-phosphate
  modified_base 21: mod_base = OTHER; note = 2'-O-methylcytidine-3'-phosphorothioate
  modified_base 22: mod_base = OTHER; note = 2'-O-methylcytidine-3'-phosphorothioate
  modified_base 23: mod_base = OTHER; note = 2'-O-methyluridine-3'-phosphate
ttggtcctcatgatcctcctcct

SEQ ID NO: 2923 - RNA, 23 nt, synthetic construct
  source 1..23: mol_type = other RNA
  modified_base 1: mod_base = OTHER; note = Vinyl-phosphonate 2'-O-methyluridine-3'-phosphorothioate
  modified_base 2: mod_base = OTHER; note = 2'-fluorocytidine-3'-phosphorothioate
  modified_base 3: mod_base = OTHER; note = 2'-O-methyladenosine-3'-phosphate
  modified_base 4: mod_base = OTHER; note = 2'-O-methylguanosine-3'-phosphate
  modified_base 5: mod_base = OTHER; note = 2'-O-methylcytidine-3'-phosphate
  modified_base 6: mod_base = OTHER; note = 2'-fluorouridine-3'-phosphate
  modified_base 7: mod_base = OTHER; note = 2'-O-methylguanosine-3'-phosphate
  modified_base 8: mod_base = OTHER; note = 2'-fluoroguanosine-3'-phosphate
  modified_base 9: mod_base = OTHER; note = 2'-fluorocytidine-3'-phosphate
  modified_base 10: mod_base = OTHER; note = 2'-O-methyluridine-3'-phosphate
  modified_base 11: mod_base = OTHER; note = 2'-O-methylguanosine-3'-phosphate
  modified_base 12: mod_base = OTHER; note = 2'-O-methyluridine-3'-phosphate
  modified_base 13: mod_base = OTHER; note = 2'-O-methyladenosine-3'-phosphate
  modified_base 14: mod_base = OTHER; note = 2'-fluoroadenosine-3'-phosphate
  modified_base 15: mod_base = OTHER; note = 2'-O-methyluridine-3'-phosphate
  modified_base 16: mod_base = OTHER; note = 2'-fluoroguanosine-3'-phosphate
  modified_base 17: mod_base = OTHER; note = 2'-O-methylcytidine-3'-phosphate
  modified_base 18: mod_base = OTHER; note = 2'-O-methylguanosine-3'-phosphate
  modified_base 19: mod_base = OTHER; note = 2'-O-methyluridine-3'-phosphate
  modified_base 20: mod_base = OTHER; note = 2'-O-methylguanosine-3'-phosphate
  modified_base 21: mod_base = OTHER; note = 2'-O-methylcytidine-3'-phosphorothioate
  modified_base 22: mod_base = OTHER; note = 2'-O-methylguanosine-3'-phosphorothioate
  modified_base 23: mod_base = OTHER; note = 2'-O-methylguanosine-3'-phosphate
tcagctggctgtaatgcgtgcgg

SEQ ID NO: 2924 - RNA, 23 nt, synthetic construct
  source 1..23: mol_type = other RNA
  modified_base 1: mod_base = OTHER; note = Vinyl-phosphonate 2'-O-methyluridine-3'-phosphorothioate
  modified_base 2: mod_base = OTHER; note = 2'-fluorocytidine-3'-phosphorothioate
  modified_base 3: mod_base = OTHER; note = 2'-O-methylguanosine-3'-phosphate
  modified_base 4: mod_base = OTHER; note = 2'-O-methyluridine-3'-phosphate
  modified_base 5: mod_base = OTHER; note = 2'-O-methylguanosine-3'-phosphate
  modified_base 6: mod_base = OTHER; note = 2'-fluoroguanosine-3'-phosphate
  modified_base 7: mod_base = OTHER; note = 2'-O-methyluridine-3'-phosphate
  modified_base 8: mod_base = OTHER; note = 2'-fluoroguanosine-3'-phosphate
  modified_base 9: mod_base = OTHER; note = 2'-fluoroguanosine-3'-phosphate
  modified_base 10: mod_base = OTHER; note = 2'-O-methyluridine-3'-phosphate
  modified_base 11: mod_base = OTHER; note = 2'-O-methyluridine-3'-phosphate
  modified_base 12: mod_base = OTHER; note = 2'-O-methyluridine-3'-phosphate
  modified_base 13: mod_base = OTHER; note = 2'-O-methyluridine-3'-phosphate
  modified_base 14: mod_base = OTHER; note = 2'-fluorocytidine-3'-phosphate
  modified_base 15: mod_base = OTHER; note = 2'-O-methyladenosine-3'-phosphate
  modified_base 16: mod_base = OTHER; note = 2'-fluoroadenosine-3'-phosphate
  modified_base 17: mod_base = OTHER; note = 2'-O-methyluridine-3'-phosphate
  modified_base 18: mod_base = OTHER; note = 2'-O-methylguanosine-3'-phosphate
  modified_base 19: mod_base = OTHER; note = 2'-O-methyladenosine-3'-phosphate
  modified_base 20: mod_base = OTHER; note = 2'-O-methyladenosine-3'-phosphate
  modified_base 21: mod_base = OTHER; note = 2'-O-methylguanosine-3'-phosphorothioate
  modified_base 22: mod_base = OTHER; note = 2'-O-methylguanosine-3'-phosphorothioate
  modified_base 23: mod_base = OTHER; note = 2'-O-methylguanosine-3'-phosphate
tcgtggtggttttcaatgaaggg

SEQ ID NO: 2925 - RNA, 23 nt, synthetic construct
  source 1..23: mol_type = other RNA
  modified_base 1: mod_base = OTHER; note = Vinyl-phosphonate 2'-O-methyluridine-3'-phosphorothioate
  modified_base 2: mod_base = OTHER; note = 2'-fluorouridine -3'-phosphorothioate
  modified_base 3: mod_base = OTHER; note = 2'-O-methyladenosine-3'-phosphate
  modified_base 4: mod_base = OTHER; note = 2'-O-methyluridine-3'-phosphate
  modified_base 5: mod_base = OTHER; note = 2'-O-methyluridine-3'-phosphate
  modified_base 6: mod_base = OTHER; note = 2'-fluoroadenosine-3'-phosphate
  modified_base 7: mod_base = OTHER; note = 2'-O-methyluridine-3'-phosphate
  modified_base 8: mod_base = OTHER; note = 2'-fluoroguanosine-3'-phosphate
  modified_base 9: mod_base = OTHER; note = 2'-fluorouridine-3'-phosphate
  modified_base 10: mod_base = OTHER; note = 2'-O-methylguanosine-3'-phosphate
  modified_base 11: mod_base = OTHER; note = 2'-O-methylguanosine-3'-phosphate
  modified_base 12: mod_base = OTHER; note = 2'-O-methylcytidine-3'-phosphate
  modified_base 13: mod_base = OTHER; note = 2'-O-methylcytidine-3'-phosphate
  modified_base 14: mod_base = OTHER; note = 2'-fluoroadenosine-3'-phosphate
  modified_base 15: mod_base = OTHER; note = 2'-O-methyluridine-3'-phosphate
  modified_base 16: mod_base = OTHER; note = 2'-fluorocytidine-3'-phosphate
  modified_base 17: mod_base = OTHER; note = 2'-O-methyladenosine-3'-phosphate
  modified_base 18: mod_base = OTHER; note = 2'-O-methyladenosine-3'-phosphate
  modified_base 19: mod_base = OTHER; note = 2'-O-methyladenosine-3'-phosphate
  modified_base 20: mod_base = OTHER; note = 2'-O-methyladenosine-3'-phosphate
  modified_base 21: mod_base = OTHER; note = 2'-O-methyladenosine-3'-phosphorothioate
  modified_base 22: mod_base = OTHER; note = 2'-O-methylguanosine-3'-phosphorothioate
  modified_base 23: mod_base = OTHER; note = 2'-O-methyladenosine-3'-phosphate
ttattatgtggccatcaaaaaga

SEQ ID NO: 2926 - RNA, 23 nt, synthetic construct
  source 1..23: mol_type = other RNA
  modified_base 1: mod_base = OTHER; note = Vinyl-phosphonate 2'-O-methyluridine-3'-phosphorothioate
  modified_base 2: mod_base = OTHER; note = 2'-fluoroguanosine-3'-phosphorothioate
  modified_base 3: mod_base = OTHER; note = 2'-O-methylguanosine-3'-phosphate
  modified_base 4: mod_base = OTHER; note = 2'-O-methyladenosine-3'-phosphate
  modified_base 5: mod_base = OTHER; note = 2'-O-methyluridine-3'-phosphate
  modified_base 6: mod_base = OTHER; note = 2'-fluorocytidine-3'-phosphate
  modified_base 7: mod_base = OTHER; note = 2'-O-methyluridine-3'-phosphate
  modified_base 8: mod_base = OTHER; note = 2'-fluorouridine-3'-phosphate
  modified_base 9: mod_base = OTHER; note = 2'-fluorouridine-3'-phosphate
  modified_base 10: mod_base = OTHER; note = 2'-O-methyluridine-3'-phosphate
  modified_base 11: mod_base = OTHER; note = 2'-O-methylcytidine-3'-phosphate
  modified_base 12: mod_base = OTHER; note = 2'-O-methylcytidine-3'-phosphate
  modified_base 13: mod_base = OTHER; note = 2'-O-methyluridine-3'-phosphate
  modified_base 14: mod_base = OTHER; note = 2'-fluorocytidine-3'-phosphate
  modified_base 15: mod_base = OTHER; note = 2'-O-methylcytidine-3'-phosphate
  modified_base 16: mod_base = OTHER; note = 2'-fluoroadenosine-3'-phosphate
  modified_base 17: mod_base = OTHER; note = 2'-O-methylguanosine-3'-phosphate
  modified_base 18: mod_base = OTHER; note = 2'-O-methylguanosine-3'-phosphate
  modified_base 19: mod_base = OTHER; note = 2'-O-methyluridine-3'-phosphate
  modified_base 20: mod_base = OTHER; note = 2'-O-methylguanosine-3'-phosphate
  modified_base 21: mod_base = OTHER; note = 2'-O-methylguanosine-3'-phosphorothioate
  modified_base 22: mod_base = OTHER; note = 2'-O-methyluridine-3'-phosphorothioate
  modified_base 23: mod_base = OTHER; note = 2'-O-methylcytidine-3'-phosphate
tggatcttttcctccaggtggtc

SEQ ID NO: 2927 - RNA, 23 nt, synthetic construct
  source 1..23: mol_type = other RNA
  modified_base 1: mod_base = OTHER; note = Vinyl-phosphonate 2'-O-methyluridine-3'-phosphorothioate
  modified_base 2: mod_base = OTHER; note = 2'-fluoroadenosine-3'-phosphorothioate
  modified_base 3: mod_base = OTHER; note = 2'-O-methylguanosine-3'-phosphate
  modified_base 4: mod_base = OTHER; note = 2'-O-methyladenosine-3'-phosphate
  modified_base 5: mod_base = OTHER; note = 2'-O-methylguanosine-3'-phosphate
  modified_base 6: mod_base = OTHER; note = 2'-fluoroguanosine-3'-phosphate
  modified_base 7: mod_base = OTHER; note = 2'-O-methylcytidine-3'-phosphate
  modified_base 8: mod_base = OTHER; note = 2'-fluorouridine-3'-phosphate
  modified_base 9: mod_base = OTHER; note = 2'-fluorouridine-3'-phosphate
  modified_base 10: mod_base = OTHER; note = 2'-O-methylguanosine-3'-phosphate
  modified_base 11: mod_base = OTHER; note = 2'-O-methylguanosine-3'-phosphate
  modified_base 12: mod_base = OTHER; note = 2'-O-methylcytidine-3'-phosphate
  modified_base 13: mod_base = OTHER; note = 2'-O-methyluridine-3'-phosphate
  modified_base 14: mod_base = OTHER; note = 2'-fluorouridine-3'-phosphate
  modified_base 15: mod_base = OTHER; note = 2'-O-methylguanosine-3'-phosphate
  modified_base 16: mod_base = OTHER; note = 2'-fluoroguanosine-3'-phosphate
  modified_base 17: mod_base = OTHER; note = 2'-O-methylcytidine-3'-phosphate
  modified_base 18: mod_base = OTHER; note = 2'-O-methylcytidine-3'-phosphate
  modified_base 19: mod_base = OTHER; note = 2'-O-methyluridine-3'-phosphate
  modified_base 20: mod_base = OTHER; note = 2'-O-methyluridine-3'-phosphate
  modified_base 21: mod_base = OTHER; note = 2'-O-methylguanosine-3'-phosphorothioate
  modified_base 22: mod_base = OTHER; note = 2'-O-methylguanosine-3'-phosphorothioate
  modified_base 23: mod_base = OTHER; note = 2'-O-methylguanosine-3'-phosphate
tagaggcttggcttggccttggg

SEQ ID NO: 2928 - RNA, 23 nt, synthetic construct
  source 1..23: mol_type = other RNA
  modified_base 1: mod_base = OTHER; note = Vinyl-phosphonate 2'-O-methyluridine-3'-phosphorothioate
  modified_base 2: mod_base = OTHER; note = 2'-fluorouridine -3'-phosphorothioate
  modified_base 3: mod_base = OTHER; note = 2'-O-methylcytidine-3'-phosphate
  modified_base 4: mod_base = OTHER; note = 2'-O-methylcytidine-3'-phosphate
  modified_base 5: mod_base = OTHER; note = 2'-O-methylguanosine-3'-phosphate
  modified_base 6: mod_base = OTHER; note = 2'-fluorouridine-3'-phosphate
  modified_base 7: mod_base = OTHER; note = 2'-O-methylguanosine-3'-phosphate
  modified_base 8: mod_base = OTHER; note = 2'-fluorouridine-3'-phosphate
  modified_base 9: mod_base = OTHER; note = 2'-fluorocytidine-3'-phosphate
  modified_base 10: mod_base = OTHER; note = 2'-O-methyluridine-3'-phosphate
  modified_base 11: mod_base = OTHER; note = 2'-O-methylguanosine-3'-phosphate
  modified_base 12: mod_base = OTHER; note = 2'-O-methyluridine-3'-phosphate
  modified_base 13: mod_base = OTHER; note = 2'-O-methylcytidine-3'-phosphate
  modified_base 14: mod_base = OTHER; note = 2'-fluorouridine-3'-phosphate
  modified_base 15: mod_base = OTHER; note = 2'-O-methylguanosine-3'-phosphate
  modified_base 16: mod_base = OTHER; note = 2'-fluoroguanosine-3'-phosphate
  modified_base 17: mod_base = OTHER; note = 2'-O-methyluridine-3'-phosphate
  modified_base 18: mod_base = OTHER; note = 2'-O-methylcytidine-3'-phosphate
  modified_base 19: mod_base = OTHER; note = 2'-O-methylcytidine-3'-phosphate
  modified_base 20: mod_base = OTHER; note = 2'-O-methyluridine-3'-phosphate
  modified_base 21: mod_base = OTHER; note = 2'-O-methylcytidine-3'-phosphorothioate
  modified_base 22: mod_base = OTHER; note = 2'-O-methyladenosine-3'-phosphorothioate
  modified_base 23: mod_base = OTHER; note = 2'-O-methyluridine-3'-phosphate
ttccgtgtctgtctggtcctcat

SEQ ID NO: 2929 - RNA, 23 nt, synthetic construct
  source 1..23: mol_type = other RNA
  modified_base 1: mod_base = OTHER; note = Vinyl-phosphonate 2'-O-methyluridine-3'-phosphorothioate
  modified_base 2: mod_base = OTHER; note = 2'-fluoroguanosine-3'-phosphorothioate
  modified_base 3: mod_base = OTHER; note = 2'-O-methyluridine-3'-phosphate
  modified_base 4: mod_base = OTHER; note = 2'-O-methyladenosine-3'-phosphate
  modified_base 5: mod_base = OTHER; note = 2'-O-methyladenosine-3'-phosphate
  modified_base 6: mod_base = OTHER; note = 2'-fluorocytidine-3'-phosphate
  modified_base 7: mod_base = OTHER; note = 2'-O-methylguanosine-3'-phosphate
  modified_base 8: mod_base = OTHER; note = 2'-fluorocytidine-3'-phosphate
  modified_base 9: mod_base = OTHER; note = 2'-fluorocytidine-3'-phosphate
  modified_base 10: mod_base = OTHER; note = 2'-O-methylcytidine-3'-phosphate
  modified_base 11: mod_base = OTHER; note = 2'-O-methyluridine-3'-phosphate
  modified_base 12: mod_base = OTHER; note = 2'-O-methyluridine-3'-phosphate
  modified_base 13: mod_base = OTHER; note = 2'-O-methylcytidine-3'-phosphate
  modified_base 14: mod_base = OTHER; note = 2'-fluoroadenosine-3'-phosphate
  modified_base 15: mod_base = OTHER; note = 2'-O-methylguanosine-3'-phosphate
  modified_base 16: mod_base = OTHER; note = 2'-fluoroguanosine-3'-phosphate
  modified_base 17: mod_base = OTHER; note = 2'-O-methylguanosine-3'-phosphate
  modified_base 18: mod_base = OTHER; note = 2'-O-methylcytidine-3'-phosphate
  modified_base 19: mod_base = OTHER; note = 2'-O-methyladenosine-3'-phosphate
  modified_base 20: mod_base = OTHER; note = 2'-O-methyluridine-3'-phosphate
  modified_base 21: mod_base = OTHER; note = 2'-O-methylcytidine-3'-phosphorothioate
  modified_base 22: mod_base = OTHER; note = 2'-O-methyluridine-3'-phosphorothioate
  modified_base 23: mod_base = OTHER; note = 2'-O-methylguanosine-3'-phosphate
tgtaacgcccttcagggcatctg

SEQ ID NO: 2930 - RNA, 23 nt, synthetic construct
  source 1..23: mol_type = other RNA
  modified_base 1: mod_base = OTHER; note = Vinyl-phosphonate 2'-O-methyluridine-3'-phosphorothioate
  modified_base 2: mod_base = OTHER; note = 2'-fluorouridine -3'-phosphorothioate
  modified_base 3: mod_base = OTHER; note = 2'-O-methylcytidine-3'-phosphate
  modified_base 4: mod_base = OTHER; note = 2'-O-methylguanosine-3'-phosphate
  modified_base 5: mod_base = OTHER; note = 2'-O-methylguanosine-3'-phosphate
  modified_base 6: mod_base = OTHER; note = 2'-fluorocytidine-3'-phosphate
  modified_base 7: mod_base = OTHER; note = 2'-O-methylcytidine-3'-phosphate
  modified_base 8: mod_base = OTHER; note = 2'-fluoroadenosine-3'-phosphate
  modified_base 9: mod_base = OTHER; note = 2'-fluoroguanosine-3'-phosphate
  modified_base 10: mod_base = OTHER; note = 2'-O-methylcytidine-3'-phosphate
  modified_base 11: mod_base = OTHER; note = 2'-O-methyluridine-3'-phosphate
  modified_base 12: mod_base = OTHER; note = 2'-O-methylcytidine-3'-phosphate
  modified_base 13: mod_base = OTHER; note = 2'-O-methylguanosine-3'-phosphate
  modified_base 14: mod_base = OTHER; note = 2'-fluoroadenosine-3'-phosphate
  modified_base 15: mod_base = OTHER; note = 2'-O-methylguanosine-3'-phosphate
  modified_base 16: mod_base = OTHER; note = 2'-fluorouridine-3'-phosphate
  modified_base 17: mod_base = OTHER; note = 2'-O-methylguanosine-3'-phosphate
  modified_base 18: mod_base = OTHER; note = 2'-O-methyluridine-3'-phosphate
  modified_base 19: mod_base = OTHER; note = 2'-O-methyluridine-3'-phosphate
  modified_base 20: mod_base = OTHER; note = 2'-O-methylguanosine-3'-phosphate
  modified_base 21: mod_base = OTHER; note = 2'-O-methylguanosine-3'-phosphorothioate
  modified_base 22: mod_base = OTHER; note = 2'-O-methylcytidine-3'-phosphorothioate
  modified_base 23: mod_base = OTHER; note = 2'-O-methyladenosine-3'-phosphate
ttcggccagctcgagtgttggca

SEQ ID NO: 2931 - RNA, 23 nt, synthetic construct
  source 1..23: mol_type = other RNA
  modified_base 1: mod_base = OTHER; note = Vinyl-phosphonate 2'-O-methyluridine-3'-phosphorothioate
  modified_base 2: mod_base = OTHER; note = 2'-fluorocytidine-3'-phosphorothioate
  modified_base 3: mod_base = OTHER; note = 2'-O-methylcytidine-3'-phosphate
  modified_base 4: mod_base = OTHER; note = 2'-O-methyluridine-3'-phosphate
  modified_base 5: mod_base = OTHER; note = 2'-O-methylguanosine-3'-phosphate
  modified_base 6: mod_base = OTHER; note = 2'-fluorocytidine-3'-phosphate
  modified_base 7: mod_base = OTHER; note = 2'-O-methyladenosine-3'-phosphate
  modified_base 8: mod_base = OTHER; note = 2'-fluoroguanosine-3'-phosphate
  modified_base 9: mod_base = OTHER; note = 2'-fluoroguanosine-3'-phosphate
  modified_base 10: mod_base = OTHER; note = 2'-O-methyluridine-3'-phosphate
  modified_base 11: mod_base = OTHER; note = 2'-O-methylguanosine-3'-phosphate
  modified_base 12: mod_base = OTHER; note = 2'-O-methylcytidine-3'-phosphate
  modified_base 13: mod_base = OTHER; note = 2'-O-methyladenosine-3'-phosphate
  modified_base 14: mod_base = OTHER; note = 2'-fluorouridine-3'-phosphate
  modified_base 15: mod_base = OTHER; note = 2'-O-methyladenosine-3'-phosphate
  modified_base 16: mod_base = OTHER; note = 2'-fluoroguanosine-3'-phosphate
  modified_base 17: mod_base = OTHER; note = 2'-O-methylcytidine-3'-phosphate
  modified_base 18: mod_base = OTHER; note = 2'-O-methylcytidine-3'-phosphate
  modified_base 19: mod_base = OTHER; note = 2'-O-methylcytidine-3'-phosphate
  modified_base 20: mod_base = OTHER; note = 2'-O-methyluridine-3'-phosphate
  modified_base 21: mod_base = OTHER; note = 2'-O-methylguanosine-3'-phosphorothioate
  modified_base 22: mod_base = OTHER; note = 2'-O-methylcytidine-3'-phosphorothioate
  modified_base 23: mod_base = OTHER; note = 2'-O-methyladenosine-3'-phosphate
tcctgcaggtgcatagccctgca

SEQ ID NO: 2932 - RNA, 23 nt, synthetic construct
  source 1..23: mol_type = other RNA
  modified_base 1: mod_base = OTHER; note = Vinyl-phosphonate 2'-O-methyluridine-3'-phosphorothioate
  modified_base 2: mod_base = OTHER; note = 2'-fluoroadenosine-3'-phosphorothioate
  modified_base 3: mod_base = OTHER; note = 2'-O-methylguanosine-3'-phosphate
  modified_base 4: mod_base = OTHER; note = 2'-O-methylguanosine-3'-phosphate
  modified_base 5: mod_base = OTHER; note = 2'-O-methyladenosine-3'-phosphate
  modified_base 6: mod_base = OTHER; note = 2'-fluoroguanosine-3'-phosphate
  modified_base 7: mod_base = OTHER; note = 2'-O-methylguanosine-3'-phosphate
  modified_base 8: mod_base = OTHER; note = 2'-fluorouridine-3'-phosphate
  modified_base 9: mod_base = OTHER; note = 2'-fluoroadenosine-3'-phosphate
  modified_base 10: mod_base = OTHER; note = 2'-O-methylcytidine-3'-phosphate
  modified_base 11: mod_base = OTHER; note = 2'-O-methyluridine-3'-phosphate
  modified_base 12: mod_base = OTHER; note = 2'-O-methylcytidine-3'-phosphate
  modified_base 13: mod_base = OTHER; note = 2'-O-methylcytidine-3'-phosphate
  modified_base 14: mod_base = OTHER; note = 2'-fluoroadenosine-3'-phosphate
  modified_base 15: mod_base = OTHER; note = 2'-O-methylcytidine-3'-phosphate
  modified_base 16: mod_base = OTHER; note = 2'-fluorocytidine-3'-phosphate
  modified_base 17: mod_base = OTHER; note = 2'-O-methyladenosine-3'-phosphate
  modified_base 18: mod_base = OTHER; note = 2'-O-methylcytidine-3'-phosphate
  modified_base 19: mod_base = OTHER; note = 2'-O-methylcytidine-3'-phosphate
  modified_base 20: mod_base = OTHER; note = 2'-O-methyluridine-3'-phosphate
  modified_base 21: mod_base = OTHER; note = 2'-O-methyluridine-3'-phosphorothioate
  modified_base 22: mod_base = OTHER; note = 2'-O-methylcytidine-3'-phosphorothioate
  modified_base 23: mod_base = OTHER; note = 2'-O-methyluridine-3'-phosphate
taggaggtactccaccaccttct

SEQ ID NO: 2933 - RNA, 23 nt, synthetic construct
  source 1..23: mol_type = other RNA
  modified_base 1: mod_base = OTHER; note = Vinyl-phosphonate 2'-O-methyluridine-3'-phosphorothioate
  modified_base 2: mod_base = OTHER; note = 2'-fluorocytidine-3'-phosphorothioate
  modified_base 3: mod_base = OTHER; note = 2'-O-methylcytidine-3'-phosphate
  modified_base 4: mod_base = OTHER; note = 2'-O-methyluridine-3'-phosphate
  modified_base 5: mod_base = OTHER; note = 2'-O-methylcytidine-3'-phosphate
  modified_base 6: mod_base = OTHER; note = 2'-fluoroguanosine-3'-phosphate
  modified_base 7: mod_base = OTHER; note = 2'-O-methylcytidine-3'-phosphate
  modified_base 8: mod_base = OTHER; note = 2'-fluorouridine-3'-phosphate
  modified_base 9: mod_base = OTHER; note = 2'-fluorocytidine-3'-phosphate
  modified_base 10: mod_base = OTHER; note = 2'-O-methylcytidine-3'-phosphate
  modified_base 11: mod_base = OTHER; note = 2'-O-methyluridine-3'-phosphate
  modified_base 12: mod_base = OTHER; note = 2'-O-methylcytidine-3'-phosphate
  modified_base 13: mod_base = OTHER; note = 2'-O-methyladenosine-3'-phosphate
  modified_base 14: mod_base = OTHER; note = 2'-fluoroadenosine-3'-phosphate
  modified_base 15: mod_base = OTHER; note = 2'-O-methylguanosine-3'-phosphate
  modified_base 16: mod_base = OTHER; note = 2'-fluorocytidine-3'-phosphate
  modified_base 17: mod_base = OTHER; note = 2'-O-methyluridine-3'-phosphate
  modified_base 18: mod_base = OTHER; note = 2'-O-methyluridine-3'-phosphate
  modified_base 19: mod_base = OTHER; note = 2'-O-methylcytidine-3'-phosphate
  modified_base 20: mod_base = OTHER; note = 2'-O-methyladenosine-3'-phosphate
  modified_base 21: mod_base = OTHER; note = 2'-O-methyladenosine-3'-phosphorothioate
  modified_base 22: mod_base = OTHER; note = 2'-O-methylcytidine-3'-phosphorothioate
  modified_base 23: mod_base = OTHER; note = 2'-O-methyluridine-3'-phosphate
tcctcgctcctcaagcttcaact

SEQ ID NO: 2934 - RNA, 23 nt, synthetic construct
  source 1..23: mol_type = other RNA
  modified_base 1: mod_base = OTHER; note = Vinyl-phosphonate 2'-O-methyluridine-3'-phosphorothioate
  modified_base 2: mod_base = OTHER; note = 2'-fluorocytidine-3'-phosphorothioate
  modified_base 3: mod_base = OTHER; note = 2'-O-methyluridine-3'-phosphate
  modified_base 4: mod_base = OTHER; note = 2'-O-methylguanosine-3'-phosphate
  modified_base 5: mod_base = OTHER; note = 2'-O-methylguanosine-3'-phosphate
  modified_base 6: mod_base = OTHER; note = 2'-fluoroguanosine-3'-phosphate
  modified_base 7: mod_base = OTHER; note = 2'-O-methyladenosine-3'-phosphate
  modified_base 8: mod_base = OTHER; note = 2'-fluorouridine-3'-phosphate
  modified_base 9: mod_base = OTHER; note = 2'-fluorocytidine-3'-phosphate
  modified_base 10: mod_base = OTHER; note = 2'-O-methylcytidine-3'-phosphate
  modified_base 11: mod_base = OTHER; note = 2'-O-methyladenosine-3'-phosphate
  modified_base 12: mod_base = OTHER; note = 2'-O-methylcytidine-3'-phosphate
  modified_base 13: mod_base = OTHER; note = 2'-O-methyladenosine-3'-phosphate
  modified_base 14: mod_base = OTHER; note = 2'-fluorouridine-3'-phosphate
  modified_base 15: mod_base = OTHER; note = 2'-O-methylguanosine-3'-phosphate
  modified_base 16: mod_base = OTHER; note = 2'-fluoroguanosine-3'-phosphate
  modified_base 17: mod_base = OTHER; note = 2'-O-methylcytidine-3'-phosphate
  modified_base 18: mod_base = OTHER; note = 2'-O-methylcytidine-3'-phosphate
  modified_base 19: mod_base = OTHER; note = 2'-O-methyladenosine-3'-phosphate
  modified_base 20: mod_base = OTHER; note = 2'-O-methylcytidine-3'-phosphate
  modified_base 21: mod_base = OTHER; note = 2'-O-methylguanosine-3'-phosphorothioate
  modified_base 22: mod_base = OTHER; note = 2'-O-methylguanosine-3'-phosphorothioate
  modified_base 23: mod_base = OTHER; note = 2'-O-methyluridine-3'-phosphate
tctgggatccacatggccacggt

SEQ ID NO: 2935 - RNA, 23 nt, synthetic construct
  source 1..23: mol_type = other RNA
  modified_base 1: mod_base = OTHER; note = Vinyl-phosphonate 2'-O-methyluridine-3'-phosphorothioate
  modified_base 2: mod_base = OTHER; note = 2'-fluoroguanosine-3'-phosphorothioate
  modified_base 3: mod_base = OTHER; note = 2'-O-methylguanosine-3'-phosphate
  modified_base 4: mod_base = OTHER; note = 2'-O-methyluridine-3'-phosphate
  modified_base 5: mod_base = OTHER; note = 2'-O-methylguanosine-3'-phosphate
  modified_base 6: mod_base = OTHER; note = 2'-fluoroguanosine-3'-phosphate
  modified_base 7: mod_base = OTHER; note = 2'-O-methylguanosine-3'-phosphate
  modified_base 8: mod_base = OTHER; note = 2'-fluorocytidine-3'-phosphate
  modified_base 9: mod_base = OTHER; note = 2'-fluorouridine-3'-phosphate
  modified_base 10: mod_base = OTHER; note = 2'-O-methyluridine-3'-phosphate
  modified_base 11: mod_base = OTHER; note = 2'-O-methylcytidine-3'-phosphate
  modified_base 12: mod_base = OTHER; note = 2'-O-methylcytidine-3'-phosphate
  modified_base 13: mod_base = OTHER; note = 2'-O-methyluridine-3'-phosphate
  modified_base 14: mod_base = OTHER; note = 2'-fluorouridine-3'-phosphate
  modified_base 15: mod_base = OTHER; note = 2'-O-methyladenosine-3'-phosphate
  modified_base 16: mod_base = OTHER; note = 2'-fluoroguanosine-3'-phosphate
  modified_base 17: mod_base = OTHER; note = 2'-O-methyluridine-3'-phosphate
  modified_base 18: mod_base = OTHER; note = 2'-O-methylguanosine-3'-phosphate
  modified_base 19: mod_base = OTHER; note = 2'-O-methylcytidine-3'-phosphate
  modified_base 20: mod_base = OTHER; note = 2'-O-methyluridine-3'-phosphate
  modified_base 21: mod_base = OTHER; note = 2'-O-methylguanosine-3'-phosphorothioate
  modified_base 22: mod_base = OTHER; note = 2'-O-methylguanosine-3'-phosphorothioate
  modified_base 23: mod_base = OTHER; note = 2'-O-methyluridine-3'-phosphate
tggtgggcttccttagtgctggt

SEQ ID NO: 2936 - RNA, 23 nt, synthetic construct
  source 1..23: mol_type = other RNA
  modified_base 1: mod_base = OTHER; note = Vinyl-phosphonate 2'-O-methyluridine-3'-phosphorothioate
  modified_base 2: mod_base = OTHER; note = 2'-fluorouridine -3'-phosphorothioate
  modified_base 3: mod_base = OTHER; note = 2'-O-methylcytidine-3'-phosphate
  modified_base 4: mod_base = OTHER; note = 2'-O-methyluridine-3'-phosphate
  modified_base 5: mod_base = OTHER; note = 2'-O-methylcytidine-3'-phosphate
  modified_base 6: mod_base = OTHER; note = 2'-fluoroguanosine-3'-phosphate
  modified_base 7: mod_base = OTHER; note = 2'-O-methylguanosine-3'-phosphate
  modified_base 8: mod_base = OTHER; note = 2'-fluoroguanosine-3'-phosphate
  modified_base 9: mod_base = OTHER; note = 2'-fluorocytidine-3'-phosphate
  modified_base 10: mod_base = OTHER; note = 2'-O-methyluridine-3'-phosphate
  modified_base 11: mod_base = OTHER; note = 2'-O-methylcytidine-3'-phosphate
  modified_base 12: mod_base = OTHER; note = 2'-O-methylcytidine-3'-phosphate
  modified_base 13: mod_base = OTHER; note = 2'-O-methyladenosine-3'-phosphate
  modified_base 14: mod_base = OTHER; note = 2'-fluorouridine-3'-phosphate
  modified_base 15: mod_base = OTHER; note = 2'-O-methylcytidine-3'-phosphate
  modified_base 16: mod_base = OTHER; note = 2'-fluoroadenosine-3'-phosphate
  modified_base 17: mod_base = OTHER; note = 2'-O-methylguanosine-3'-phosphate
  modified_base 18: mod_base = OTHER; note = 2'-O-methylcytidine-3'-phosphate
  modified_base 19: mod_base = OTHER; note = 2'-O-methylguanosine-3'-phosphate
  modified_base 20: mod_base = OTHER; note = 2'-O-methyladenosine-3'-phosphate
  modified_base 21: mod_base = OTHER; note = 2'-O-methylcytidine-3'-phosphorothioate
  modified_base 22: mod_base = OTHER; note = 2'-O-methyladenosine-3'-phosphorothioate
  modified_base 23: mod_base = OTHER; note = 2'-O-methylguanosine-3'-phosphate
ttctcgggctccatcagcgacag

SEQ ID NO: 2937 - RNA, 23 nt, synthetic construct
  source 1..23: mol_type = other RNA
  modified_base 1: mod_base = OTHER; note = Vinyl-phosphonate 2'-O-methyluridine-3'-phosphorothioate
  modified_base 2: mod_base = OTHER; note = 2'-fluoroadenosine-3'-phosphorothioate
  modified_base 3: mod_base = OTHER; note = 2'-O-methyluridine-3'-phosphate
  modified_base 4: mod_base = OTHER; note = 2'-O-methylguanosine-3'-phosphate
  modified_base 5: mod_base = OTHER; note = 2'-O-methyladenosine-3'-phosphate
  modified_base 6: mod_base = OTHER; note = 2'-fluorocytidine-3'-phosphate
  modified_base 7: mod_base = OTHER; note = 2'-O-methylguanosine-3'-phosphate
  modified_base 8: mod_base = OTHER; note = 2'-fluorocytidine-3'-phosphate
  modified_base 9: mod_base = OTHER; note = 2'-fluorouridine-3'-phosphate
  modified_base 10: mod_base = OTHER; note = 2'-O-methylguanosine-3'-phosphate
  modified_base 11: mod_base = OTHER; note = 2'-O-methylguanosine-3'-phosphate
  modified_base 12: mod_base = OTHER; note = 2'-O-methylguanosine-3'-phosphate
  modified_base 13: mod_base = OTHER; note = 2'-O-methylcytidine-3'-phosphate
  modified_base 14: mod_base = OTHER; note = 2'-fluorocytidine-3'-phosphate
  modified_base 15: mod_base = OTHER; note = 2'-O-methylguanosine-3'-phosphate
  modified_base 16: mod_base = OTHER; note = 2'-fluoroguanosine-3'-phosphate
  modified_base 17: mod_base = OTHER; note = 2'-O-methyladenosine-3'-phosphate
  modified_base 18: mod_base = OTHER; note = 2'-O-methyladenosine-3'-phosphate
  modified_base 19: mod_base = OTHER; note = 2'-O-methylguanosine-3'-phosphate
  modified_base 20: mod_base = OTHER; note = 2'-O-methyladenosine-3'-phosphate
  modified_base 21: mod_base = OTHER; note = 2'-O-methyladenosine-3'-phosphorothioate
  modified_base 22: mod_base = OTHER; note = 2'-O-methylguanosine-3'-phosphorothioate
  modified_base 23: mod_base = OTHER; note = 2'-O-methylcytidine-3'-phosphate
tatgacgctgggccggaagaagc

SEQ ID NO: 2938 - RNA, 23 nt, synthetic construct
  source 1..23: mol_type = other RNA
  modified_base 1: mod_base = OTHER; note = Vinyl-phosphonate 2'-O-methyluridine-3'-phosphorothioate
  modified_base 2: mod_base = OTHER; note = 2'-fluorouridine -3'-phosphorothioate
  modified_base 3: mod_base = OTHER; note = 2'-O-methyluridine-3'-phosphate
  modified_base 4: mod_base = OTHER; note = 2'-O-methylguanosine-3'-phosphate
  modified_base 5: mod_base = OTHER; note = 2'-O-methylcytidine-3'-phosphate
  modified_base 6: mod_base = OTHER; note = 2'-fluorouridine-3'-phosphate
  modified_base 7: mod_base = OTHER; note = 2'-O-methylguanosine-3'-phosphate
  modified_base 8: mod_base = OTHER; note = 2'-fluoroguanosine-3'-phosphate
  modified_base 9: mod_base = OTHER; note = 2'-fluorouridine-3'-phosphate
  modified_base 10: mod_base = OTHER; note = 2'-O-methylguanosine-3'-phosphate
  modified_base 11: mod_base = OTHER; note = 2'-O-methyluridine-3'-phosphate
  modified_base 12: mod_base = OTHER; note = 2'-O-methylcytidine-3'-phosphate
  modified_base 13: mod_base = OTHER; note = 2'-O-methylcytidine-3'-phosphate
  modified_base 14: mod_base = OTHER; note = 2'-fluoroadenosine-3'-phosphate
  modified_base 15: mod_base = OTHER; note = 2'-O-methylguanosine-3'-phosphate
  modified_base 16: mod_base = OTHER; note = 2'-fluoroguanosine-3'-phosphate
  modified_base 17: mod_base = OTHER; note = 2'-O-methyladenosine-3'-phosphate
  modified_base 18: mod_base = OTHER; note = 2'-O-methylguanosine-3'-phosphate
  modified_base 19: mod_base = OTHER; note = 2'-O-methylcytidine-3'-phosphate
  modified_base 20: mod_base = OTHER; note = 2'-O-methyladenosine-3'-phosphate
  modified_base 21: mod_base = OTHER; note = 2'-O-methylguanosine-3'-phosphorothioate
  modified_base 22: mod_base = OTHER; note = 2'-O-methylguanosine-3'-phosphorothioate
  modified_base 23: mod_base = OTHER; note = 2'-O-methylguanosine-3'-phosphate
tttgctggtgtccaggagcaggg

SEQ ID NO: 2939 - RNA, 23 nt, synthetic construct
  source 1..23: mol_type = other RNA
  modified_base 1: mod_base = OTHER; note = Vinyl-phosphonate 2'-O-methyluridine-3'-phosphorothioate
  modified_base 2: mod_base = OTHER; note = 2'-fluoroadenosine-3'-phosphorothioate
  modified_base 3: mod_base = OTHER; note = 2'-O-methyladenosine-3'-phosphate
  modified_base 4: mod_base = OTHER; note = 2'-O-methylguanosine-3'-phosphate
  modified_base 5: mod_base = OTHER; note = 2'-O-methylcytidine-3'-phosphate
  modified_base 6: mod_base = OTHER; note = 2'-fluoroguanosine-3'-phosphate
  modified_base 7: mod_base = OTHER; note = 2'-O-methylguanosine-3'-phosphate
  modified_base 8: mod_base = OTHER; note = 2'-fluorocytidine-3'-phosphate
  modified_base 9: mod_base = OTHER; note = 2'-fluoroguanosine-3'-phosphate
  modified_base 10: mod_base = OTHER; note = 2'-O-methylguanosine-3'-phosphate
  modified_base 11: mod_base = OTHER; note = 2'-O-methylguanosine-3'-phosphate
  modified_base 12: mod_base = OTHER; note = 2'-O-methyluridine-3'-phosphate
  modified_base 13: mod_base = OTHER; note = 2'-O-methyladenosine-3'-phosphate
  modified_base 14: mod_base = OTHER; note = 2'-fluorocytidine-3'-phosphate
  modified_base 15: mod_base = OTHER; note = 2'-O-methyluridine-3'-phosphate
  modified_base 16: mod_base = OTHER; note = 2'-fluorocytidine-3'-phosphate
  modified_base 17: mod_base = OTHER; note = 2'-O-methyladenosine-3'-phosphate
  modified_base 18: mod_base = OTHER; note = 2'-O-methylguanosine-3'-phosphate
  modified_base 19: mod_base = OTHER; note = 2'-O-methyladenosine-3'-phosphate
  modified_base 20: mod_base = OTHER; note = 2'-O-methyladenosine-3'-phosphate
  modified_base 21: mod_base = OTHER; note = 2'-O-methyladenosine-3'-phosphorothioate
  modified_base 22: mod_base = OTHER; note = 2'-O-methylguanosine-3'-phosphorothioate
  modified_base 23: mod_base = OTHER; note = 2'-O-methyluridine-3'-phosphate
taagcggcgggtactcagaaagt

SEQ ID NO: 2940 - RNA, 23 nt, synthetic construct
  source 1..23: mol_type = other RNA
  modified_base 1: mod_base = OTHER; note = Vinyl-phosphonate 2'-O-methyluridine-3'-phosphorothioate
  modified_base 2: mod_base = OTHER; note = 2'-fluoroadenosine-3'-phosphorothioate
  modified_base 3: mod_base = OTHER; note = 2'-O-methyladenosine-3'-phosphate
  modified_base 4: mod_base = OTHER; note = 2'-O-methylcytidine-3'-phosphate
  modified_base 5: mod_base = OTHER; note = 2'-O-methyluridine-3'-phosphate
  modified_base 6: mod_base = OTHER; note = 2'-fluoroguanosine-3'-phosphate
  modified_base 7: mod_base = OTHER; note = 2'-O-methylguanosine-3'-phosphate
  modified_base 8: mod_base = OTHER; note = 2'-fluoroguanosine-3'-phosphate
  modified_base 9: mod_base = OTHER; note = 2'-fluorouridine-3'-phosphate
  modified_base 10: mod_base = OTHER; note = 2'-O-methylguanosine-3'-phosphate
  modified_base 11: mod_base = OTHER; note = 2'-O-methylguanosine-3'-phosphate
  modified_base 12: mod_base = OTHER; note = 2'-O-methyladenosine-3'-phosphate
  modified_base 13: mod_base = OTHER; note = 2'-O-methylcytidine-3'-phosphate
  modified_base 14: mod_base = OTHER; note = 2'-fluoroadenosine-3'-phosphate
  modified_base 15: mod_base = OTHER; note = 2'-O-methylguanosine-3'-phosphate
  modified_base 16: mod_base = OTHER; note = 2'-fluorocytidine-3'-phosphate
  modified_base 17: mod_base = OTHER; note = 2'-O-methylcytidine-3'-phosphate
  modified_base 18: mod_base = OTHER; note = 2'-O-methyluridine-3'-phosphate
  modified_base 19: mod_base = OTHER; note = 2'-O-methylguanosine-3'-phosphate
  modified_base 20: mod_base = OTHER; note = 2'-O-methylcytidine-3'-phosphate
  modified_base 21: mod_base = OTHER; note = 2'-O-methylguanosine-3'-phosphorothioate
  modified_base 22: mod_base = OTHER; note = 2'-O-methylguanosine-3'-phosphorothioate
  modified_base 23: mod_base = OTHER; note = 2'-O-methyladenosine-3'-phosphate
taactgggtggacagcctgcgga

SEQ ID NO: 2941 - RNA, 23 nt, synthetic construct
  source 1..23: mol_type = other RNA
  modified_base 1: mod_base = OTHER; note = Vinyl-phosphonate 2'-O-methyluridine-3'-phosphorothioate
  modified_base 2: mod_base = OTHER; note = 2'-fluorocytidine-3'-phosphorothioate
  modified_base 3: mod_base = OTHER; note = 2'-O-methyladenosine-3'-phosphate
  modified_base 4: mod_base = OTHER; note = 2'-O-methylguanosine-3'-phosphate
  modified_base 5: mod_base = OTHER; note = 2'-O-methylguanosine-3'-phosphate
  modified_base 6: mod_base = OTHER; note = 2'-fluorouridine-3'-phosphate
  modified_base 7: mod_base = OTHER; note = 2'-O-methylguanosine-3'-phosphate
  modified_base 8: mod_base = OTHER; note = 2'-fluorocytidine-3'-phosphate
  modified_base 9: mod_base = OTHER; note = 2'-fluorocytidine-3'-phosphate
  modified_base 10: mod_base = OTHER; note = 2'-O-methylcytidine-3'-phosphate
  modified_base 11: mod_base = OTHER; note = 2'-O-methyladenosine-3'-phosphate
  modified_base 12: mod_base = OTHER; note = 2'-O-methyluridine-3'-phosphate
  modified_base 13: mod_base = OTHER; note = 2'-O-methylguanosine-3'-phosphate
  modified_base 14: mod_base = OTHER; note = 2'-fluorouridine-3'-phosphate
  modified_base 15: mod_base = OTHER; note = 2'-O-methylcytidine-3'-phosphate
  modified_base 16: mod_base = OTHER; note = 2'-fluoroadenosine-3'-phosphate
  modified_base 17: mod_base = OTHER; note = 2'-O-methylcytidine-3'-phosphate
  modified_base 18: mod_base = OTHER; note = 2'-O-methyladenosine-3'-phosphate
  modified_base 19: mod_base = OTHER; note = 2'-O-methylguanosine-3'-phosphate
  modified_base 20: mod_base = OTHER; note = 2'-O-methylcytidine-3'-phosphate
  modified_base 21: mod_base = OTHER; note = 2'-O-methylcytidine-3'-phosphorothioate
  modified_base 22: mod_base = OTHER; note = 2'-O-methylguanosine-3'-phosphorothioate
  modified_base 23: mod_base = OTHER; note = 2'-O-methyladenosine-3'-phosphate
tcaggtgcccatgtcacagccga

SEQ ID NO: 2942 - RNA, 23 nt, synthetic construct
  source 1..23: mol_type = other RNA
  modified_base 1: mod_base = OTHER; note = Vinyl-phosphonate 2'-O-methyluridine-3'-phosphorothioate
  modified_base 2: mod_base = OTHER; note = 2'-fluorocytidine-3'-phosphorothioate
  modified_base 3: mod_base = OTHER; note = 2'-O-methyladenosine-3'-phosphate
  modified_base 4: mod_base = OTHER; note = 2'-O-methylguanosine-3'-phosphate
  modified_base 5: mod_base = OTHER; note = 2'-O-methylguanosine-3'-phosphate
  modified_base 6: mod_base = OTHER; note = 2'-fluoroguanosine-3'-phosphate
  modified_base 7: mod_base = OTHER; note = 2'-O-methylcytidine-3'-phosphate
  modified_base 8: mod_base = OTHER; note = 2'-fluorouridine-3'-phosphate
  modified_base 9: mod_base = OTHER; note = 2'-fluoroguanosine-3'-phosphate
  modified_base 10: mod_base = OTHER; note = 2'-O-methylcytidine-3'-phosphate
  modified_base 11: mod_base = OTHER; note = 2'-O-methyluridine-3'-phosphate
  modified_base 12: mod_base = OTHER; note = 2'-O-methyladenosine-3'-phosphate
  modified_base 13: mod_base = OTHER; note = 2'-O-methylcytidine-3'-phosphate
  modified_base 14: mod_base = OTHER; note = 2'-fluorocytidine-3'-phosphate
  modified_base 15: mod_base = OTHER; note = 2'-O-methyluridine-3'-phosphate
  modified_base 16: mod_base = OTHER; note = 2'-fluorocytidine-3'-phosphate
  modified_base 17: mod_base = OTHER; note = 2'-O-methyladenosine-3'-phosphate
  modified_base 18: mod_base = OTHER; note = 2'-O-methylcytidine-3'-phosphate
  modified_base 19: mod_base = OTHER; note = 2'-O-methyluridine-3'-phosphate
  modified_base 20: mod_base = OTHER; note = 2'-O-methylguanosine-3'-phosphate
  modified_base 21: mod_base = OTHER; note = 2'-O-methyladenosine-3'-phosphorothioate
  modified_base 22: mod_base = OTHER; note = 2'-O-methyladenosine-3'-phosphorothioate
  modified_base 23: mod_base = OTHER; note = 2'-O-methylcytidine-3'-phosphate
tcagggctgctacctcactgaac

SEQ ID NO: 2943 - RNA, 23 nt, synthetic construct
  source 1..23: mol_type = other RNA
  modified_base 1: mod_base = OTHER; note = Vinyl-phosphonate 2'-O-methyluridine-3'-phosphorothioate
  modified_base 2: mod_base = OTHER; note = 2'-fluoroadenosine-3'-phosphorothioate
  modified_base 3: mod_base = OTHER; note = 2'-O-methylguanosine-3'-phosphate
  modified_base 4: mod_base = OTHER; note = 2'-O-methylguanosine-3'-phosphate
  modified_base 5: mod_base = OTHER; note = 2'-O-methyladenosine-3'-phosphate
  modified_base 6: mod_base = OTHER; note = 2'-fluorouridine-3'-phosphate
  modified_base 7: mod_base = OTHER; note = 2'-O-methylguanosine-3'-phosphate
  modified_base 8: mod_base = OTHER; note = 2'-fluoroguanosine-3'-phosphate
  modified_base 9: mod_base = OTHER; note = 2'-fluoroguanosine-3'-phosphate
  modified_base 10: mod_base = OTHER; note = 2'-O-methylcytidine-3'-phosphate
  modified_base 11: mod_base = OTHER; note = 2'-O-methyluridine-3'-phosphate
  modified_base 12: mod_base = OTHER; note = 2'-O-methylcytidine-3'-phosphate
  modified_base 13: mod_base = OTHER; note = 2'-O-methylcytidine-3'-phosphate
  modified_base 14: mod_base = OTHER; note = 2'-fluoroadenosine-3'-phosphate
  modified_base 15: mod_base = OTHER; note = 2'-O-methyluridine-3'-phosphate
  modified_base 16: mod_base = OTHER; note = 2'-fluoroguanosine-3'-phosphate
  modified_base 17: mod_base = OTHER; note = 2'-O-methyladenosine-3'-phosphate
  modified_base 18: mod_base = OTHER; note = 2'-O-methylcytidine-3'-phosphate
  modified_base 19: mod_base = OTHER; note = 2'-O-methylguanosine-3'-phosphate
  modified_base 20: mod_base = OTHER; note = 2'-O-methylcytidine-3'-phosphate
  modified_base 21: mod_base = OTHER; note = 2'-O-methyluridine-3'-phosphorothioate
  modified_base 22: mod_base = OTHER; note = 2'-O-methylguanosine-3'-phosphorothioate
  modified_base 23: mod_base = OTHER; note = 2'-O-methylguanosine-3'-phosphate
taggatgggctccatgacgctgg

SEQ ID NO: 2944 - RNA, 23 nt, synthetic construct
  source 1..23: mol_type = other RNA
  modified_base 1: mod_base = OTHER; note = Vinyl-phosphonate 2'-O-methyluridine-3'-phosphorothioate
  modified_base 2: mod_base = OTHER; note = 2'-fluorouridine -3'-phosphorothioate
  modified_base 3: mod_base = OTHER; note = 2'-O-methylcytidine-3'-phosphate
  modified_base 4: mod_base = OTHER; note = 2'-O-methyladenosine-3'-phosphate
  modified_base 5: mod_base = OTHER; note = 2'-O-methylguanosine-3'-phosphate
  modified_base 6: mod_base = OTHER; note = 2'-fluoroguanosine-3'-phosphate
  modified_base 7: mod_base = OTHER; note = 2'-O-methylguanosine-3'-phosphate
  modified_base 8: mod_base = OTHER; note = 2'-fluoroadenosine-3'-phosphate
  modified_base 9: mod_base = OTHER; note = 2'-fluoroguanosine-3'-phosphate
  modified_base 10: mod_base = OTHER; note = 2'-O-methylguanosine-3'-phosphate
  modified_base 11: mod_base = OTHER; note = 2'-O-methyluridine-3'-phosphate
  modified_base 12: mod_base = OTHER; note = 2'-O-methylcytidine-3'-phosphate
  modified_base 13: mod_base = OTHER; note = 2'-O-methyluridine-3'-phosphate
  modified_base 14: mod_base = OTHER; note = 2'-fluorocytidine-3'-phosphate
  modified_base 15: mod_base = OTHER; note = 2'-O-methylcytidine-3'-phosphate
  modified_base 16: mod_base = OTHER; note = 2'-fluoroadenosine-3'-phosphate
  modified_base 17: mod_base = OTHER; note = 2'-O-methyluridine-3'-phosphate
  modified_base 18: mod_base = OTHER; note = 2'-O-methylcytidine-3'-phosphate
  modified_base 19: mod_base = OTHER; note = 2'-O-methylcytidine-3'-phosphate
  modified_base 20: mod_base = OTHER; note = 2'-O-methyladenosine-3'-phosphate
  modified_base 21: mod_base = OTHER; note = 2'-O-methylguanosine-3'-phosphorothioate
  modified_base 22: mod_base = OTHER; note = 2'-O-methylcytidine-3'-phosphorothioate
  modified_base 23: mod_base = OTHER; note = 2'-O-methyladenosine-3'-phosphate
ttcagggaggtctccatccagca

SEQ ID NO: 2945 - RNA, 23 nt, synthetic construct
  source 1..23: mol_type = other RNA
  modified_base 1: mod_base = OTHER; note = Vinyl-phosphonate 2'-O-methyluridine-3'-phosphorothioate
  modified_base 2: mod_base = OTHER; note = 2'-fluorocytidine-3'-phosphorothioate
  modified_base 3: mod_base = OTHER; note = 2'-O-methylcytidine-3'-phosphate
  modified_base 4: mod_base = OTHER; note = 2'-O-methyladenosine-3'-phosphate
  modified_base 5: mod_base = OTHER; note = 2'-O-methyladenosine-3'-phosphate
  modified_base 6: mod_base = OTHER; note = 2'-fluorocytidine-3'-phosphate
  modified_base 7: mod_base = OTHER; note = 2'-O-methyladenosine-3'-phosphate
  modified_base 8: mod_base = OTHER; note = 2'-fluorocytidine-3'-phosphate
  modified_base 9: mod_base = OTHER; note = 2'-fluorouridine-3'-phosphate
  modified_base 10: mod_base = OTHER; note = 2'-O-methylcytidine-3'-phosphate
  modified_base 11: mod_base = OTHER; note = 2'-O-methyladenosine-3'-phosphate
  modified_base 12: mod_base = OTHER; note = 2'-O-methylcytidine-3'-phosphate
  modified_base 13: mod_base = OTHER; note = 2'-O-methyluridine-3'-phosphate
  modified_base 14: mod_base = OTHER; note = 2'-fluorocytidine-3'-phosphate
  modified_base 15: mod_base = OTHER; note = 2'-O-methylcytidine-3'-phosphate
  modified_base 16: mod_base = OTHER; note = 2'-fluoroguanosine-3'-phosphate
  modified_base 17: mod_base = OTHER; note = 2'-O-methylguanosine-3'-phosphate
  modified_base 18: mod_base = OTHER; note = 2'-O-methylcytidine-3'-phosphate
  modified_base 19: mod_base = OTHER; note = 2'-O-methyluridine-3'-phosphate
  modified_base 20: mod_base = OTHER; note = 2'-O-methylguanosine-3'-phosphate
  modified_base 21: mod_base = OTHER; note = 2'-O-methyladenosine-3'-phosphorothioate
  modified_base 22: mod_base = OTHER; note = 2'-O-methylcytidine-3'-phosphorothioate
  modified_base 23: mod_base = OTHER; note = 2'-O-methylcytidine-3'-phosphate
tccaacactcactccggctgacc

SEQ ID NO: 2946 - RNA, 23 nt, synthetic construct
  source 1..23: mol_type = other RNA
  modified_base 1: mod_base = OTHER; note = Vinyl-phosphonate 2'-O-methyluridine-3'-phosphorothioate
  modified_base 2: mod_base = OTHER; note = 2'-fluorouridine -3'-phosphorothioate
  modified_base 3: mod_base = OTHER; note = 2'-O-methylcytidine-3'-phosphate
  modified_base 4: mod_base = OTHER; note = 2'-O-methylcytidine-3'-phosphate
  modified_base 5: mod_base = OTHER; note = 2'-O-methyladenosine-3'-phosphate
  modified_base 6: mod_base = OTHER; note = 2'-fluoroguanosine-3'-phosphate
  modified_base 7: mod_base = OTHER; note = 2'-O-methyladenosine-3'-phosphate
  modified_base 8: mod_base = OTHER; note = 2'-fluoroadenosine-3'-phosphate
  modified_base 9: mod_base = OTHER; note = 2'-fluoroguanosine-3'-phosphate
  modified_base 10: mod_base = OTHER; note = 2'-O-methylcytidine-3'-phosphate
  modified_base 11: mod_base = OTHER; note = 2'-O-methylcytidine-3'-phosphate
  modified_base 12: mod_base = OTHER; note = 2'-O-methyladenosine-3'-phosphate
  modified_base 13: mod_base = OTHER; note = 2'-O-methylguanosine-3'-phosphate
  modified_base 14: mod_base = OTHER; note = 2'-fluorouridine-3'-phosphate
  modified_base 15: mod_base = OTHER; note = 2'-O-methylcytidine-3'-phosphate
  modified_base 16: mod_base = OTHER; note = 2'-fluoroguanosine-3'-phosphate
  modified_base 17: mod_base = OTHER; note = 2'-O-methylguanosine-3'-phosphate
  modified_base 18: mod_base = OTHER; note = 2'-O-methylcytidine-3'-phosphate
  modified_base 19: mod_base = OTHER; note = 2'-O-methylcytidine-3'-phosphate
  modified_base 20: mod_base = OTHER; note = 2'-O-methyladenosine-3'-phosphate
  modified_base 21: mod_base = OTHER; note = 2'-O-methylguanosine-3'-phosphorothioate
  modified_base 22: mod_base = OTHER; note = 2'-O-methylcytidine-3'-phosphorothioate
  modified_base 23: mod_base = OTHER; note = 2'-O-methyluridine-3'-phosphate
ttccagaagccagtcggccagct

SEQ ID NO: 2947 - RNA, 23 nt, synthetic construct
  source 1..23: mol_type = other RNA
  modified_base 1: mod_base = OTHER; note = Vinyl-phosphonate 2'-O-methyluridine-3'-phosphorothioate
  modified_base 2: mod_base = OTHER; note = 2'-fluorocytidine-3'-phosphorothioate
  modified_base 3: mod_base = OTHER; note = 2'-O-methyluridine-3'-phosphate
  modified_base 4: mod_base = OTHER; note = 2'-O-methylguanosine-3'-phosphate
  modified_base 5: mod_base = OTHER; note = 2'-O-methylguanosine-3'-phosphate
  modified_base 6: mod_base = OTHER; note = 2'-fluorouridine-3'-phosphate
  modified_base 7: mod_base = OTHER; note = 2'-O-methylguanosine-3'-phosphate
  modified_base 8: mod_base = OTHER; note = 2'-fluorouridine-3'-phosphate
  modified_base 9: mod_base = OTHER; note = 2'-fluoroguanosine-3'-phosphate
  modified_base 10: mod_base = OTHER; note = 2'-O-methyladenosine-3'-phosphate
  modified_base 11: mod_base = OTHER; note = 2'-O-methylguanosine-3'-phosphate
  modified_base 12: mod_base = OTHER; note = 2'-O-methylguanosine-3'-phosphate
  modified_base 13: mod_base = OTHER; note = 2'-O-methyluridine-3'-phosphate
  modified_base 14: mod_base = OTHER; note = 2'-fluoroguanosine-3'-phosphate
  modified_base 15: mod_base = OTHER; note = 2'-O-methylcytidine-3'-phosphate
  modified_base 16: mod_base = OTHER; note = 2'-fluoroadenosine-3'-phosphate
  modified_base 17: mod_base = OTHER; note = 2'-O-methylguanosine-3'-phosphate
  modified_base 18: mod_base = OTHER; note = 2'-O-methylcytidine-3'-phosphate
  modified_base 19: mod_base = OTHER; note = 2'-O-methyladenosine-3'-phosphate
  modified_base 20: mod_base = OTHER; note = 2'-O-methylcytidine-3'-phosphate
  modified_base 21: mod_base = OTHER; note = 2'-O-methylcytidine-3'-phosphorothioate
  modified_base 22: mod_base = OTHER; note = 2'-O-methylcytidine-3'-phosphorothioate
  modified_base 23: mod_base = OTHER; note = 2'-O-methyluridine-3'-phosphate
tctggtgtgaggtgcagcaccct

SEQ ID NO: 2948 - RNA, 23 nt, synthetic construct
  source 1..23: mol_type = other RNA
  modified_base 1: mod_base = OTHER; note = Vinyl-phosphonate 2'-O-methyluridine-3'-phosphorothioate
  modified_base 2: mod_base = OTHER; note = 2'-fluoroguanosine-3'-phosphorothioate
  modified_base 3: mod_base = OTHER; note = 2'-O-methylcytidine-3'-phosphate
  modified_base 4: mod_base = OTHER; note = 2'-O-methyluridine-3'-phosphate
  modified_base 5: mod_base = OTHER; note = 2'-O-methylcytidine-3'-phosphate
  modified_base 6: mod_base = OTHER; note = 2'-fluorocytidine-3'-phosphate
  modified_base 7: mod_base = OTHER; note = 2'-O-methyladenosine-3'-phosphate
  modified_base 8: mod_base = OTHER; note = 2'-fluorouridine-3'-phosphate
  modified_base 9: mod_base = OTHER; note = 2'-fluoroguanosine-3'-phosphate
  modified_base 10: mod_base = OTHER; note = 2'-O-methylcytidine-3'-phosphate
  modified_base 11: mod_base = OTHER; note = 2'-O-methyluridine-3'-phosphate
  modified_base 12: mod_base = OTHER; note = 2'-O-methylcytidine-3'-phosphate
  modified_base 13: mod_base = OTHER; note = 2'-O-methylcytidine-3'-phosphate
  modified_base 14: mod_base = OTHER; note = 2'-fluoroadenosine-3'-phosphate
  modified_base 15: mod_base = OTHER; note = 2'-O-methylguanosine-3'-phosphate
  modified_base 16: mod_base = OTHER; note = 2'-fluoroguanosine-3'-phosphate
  modified_base 17: mod_base = OTHER; note = 2'-O-methylcytidine-3'-phosphate
  modified_base 18: mod_base = OTHER; note = 2'-O-methyladenosine-3'-phosphate
  modified_base 19: mod_base = OTHER; note = 2'-O-methylguanosine-3'-phosphate
  modified_base 20: mod_base = OTHER; note = 2'-O-methylcytidine-3'-phosphate
  modified_base 21: mod_base = OTHER; note = 2'-O-methylcytidine-3'-phosphorothioate
  modified_base 22: mod_base = OTHER; note = 2'-O-methyladenosine-3'-phosphorothioate
  modified_base 23: mod_base = OTHER; note = 2'-O-methyladenosine-3'-phosphate
tgctccatgctccaggcagccaa

SEQ ID NO: 2949 - RNA, 23 nt, synthetic construct
  source 1..23: mol_type = other RNA
  modified_base 1: mod_base = OTHER; note = Vinyl-phosphonate 2'-O-methyluridine-3'-phosphorothioate
  modified_base 2: mod_base = OTHER; note = 2'-fluoroadenosine-3'-phosphorothioate
  modified_base 3: mod_base = OTHER; note = 2'-O-methyluridine-3'-phosphate
  modified_base 4: mod_base = OTHER; note = 2'-O-methylguanosine-3'-phosphate
  modified_base 5: mod_base = OTHER; note = 2'-O-methylcytidine-3'-phosphate
  modified_base 6: mod_base = OTHER; note = 2'-fluorocytidine-3'-phosphate
  modified_base 7: mod_base = OTHER; note = 2'-O-methylcytidine-3'-phosphate
  modified_base 8: mod_base = OTHER; note = 2'-fluoroadenosine-3'-phosphate
  modified_base 9: mod_base = OTHER; note = 2'-fluoroguanosine-3'-phosphate
  modified_base 10: mod_base = OTHER; note = 2'-O-methylcytidine-3'-phosphate
  modified_base 11: mod_base = OTHER; note = 2'-O-methyladenosine-3'-phosphate
  modified_base 12: mod_base = OTHER; note = 2'-O-methylcytidine-3'-phosphate
  modified_base 13: mod_base = OTHER; note = 2'-O-methyladenosine-3'-phosphate
  modified_base 14: mod_base = OTHER; note = 2'-fluoroguanosine-3'-phosphate
  modified_base 15: mod_base = OTHER; note = 2'-O-methylcytidine-3'-phosphate
  modified_base 16: mod_base = OTHER; note = 2'-fluorouridine-3'-phosphate
  modified_base 17: mod_base = OTHER; note = 2'-O-methylguanosine-3'-phosphate
  modified_base 18: mod_base = OTHER; note = 2'-O-methylcytidine-3'-phosphate
  modified_base 19: mod_base = OTHER; note = 2'-O-methyladenosine-3'-phosphate
  modified_base 20: mod_base = OTHER; note = 2'-O-methylguanosine-3'-phosphate
  modified_base 21: mod_base = OTHER; note = 2'-O-methylguanosine-3'-phosphorothioate
  modified_base 22: mod_base = OTHER; note = 2'-O-methyluridine-3'-phosphorothioate
  modified_base 23: mod_base = OTHER; note = 2'-O-methylguanosine-3'-phosphate
tatgcccagcacagctgcaggtg

SEQ ID NO: 2950 - RNA, 23 nt, synthetic construct
  source 1..23: mol_type = other RNA
  modified_base 1: mod_base = OTHER; note = Vinyl-phosphonate 2'-O-methyluridine-3'-phosphorothioate
  modified_base 2: mod_base = OTHER; note = 2'-fluoroadenosine-3'-phosphorothioate
  modified_base 3: mod_base = OTHER; note = 2'-O-methylcytidine-3'-phosphate
  modified_base 4: mod_base = OTHER; note = 2'-O-methyladenosine-3'-phosphate
  modified_base 5: mod_base = OTHER; note = 2'-O-methylcytidine-3'-phosphate
  modified_base 6: mod_base = OTHER; note = 2'-fluorocytidine-3'-phosphate
  modified_base 7: mod_base = OTHER; note = 2'-O-methylguanosine-3'-phosphate
  modified_base 8: mod_base = OTHER; note = 2'-fluorocytidine-3'-phosphate
  modified_base 9: mod_base = OTHER; note = 2'-fluorocytidine-3'-phosphate
  modified_base 10: mod_base = OTHER; note = 2'-O-methyluridine-3'-phosphate
  modified_base 11: mod_base = OTHER; note = 2'-O-methylguanosine-3'-phosphate
  modified_base 12: mod_base = OTHER; note = 2'-O-methylcytidine-3'-phosphate
  modified_base 13: mod_base = OTHER; note = 2'-O-methyladenosine-3'-phosphate
  modified_base 14: mod_base = OTHER; note = 2'-fluorouridine-3'-phosphate
  modified_base 15: mod_base = OTHER; note = 2'-O-methylguanosine-3'-phosphate
  modified_base 16: mod_base = OTHER; note = 2'-fluoroguanosine-3'-phosphate
  modified_base 17: mod_base = OTHER; note = 2'-O-methylcytidine-3'-phosphate
  modified_base 18: mod_base = OTHER; note = 2'-O-methylcytidine-3'-phosphate
  modified_base 19: mod_base = OTHER; note = 2'-O-methyladenosine-3'-phosphate
  modified_base 20: mod_base = OTHER; note = 2'-O-methylcytidine-3'-phosphate
  modified_base 21: mod_base = OTHER; note = 2'-O-methyluridine-3'-phosphorothioate
  modified_base 22: mod_base = OTHER; note = 2'-O-methylguanosine-3'-phosphorothioate
  modified_base 23: mod_base = OTHER; note = 2'-O-methyladenosine-3'-phosphate
tacaccgcctgcatggccactga

SEQ ID NO: 2951 - RNA, 23 nt, synthetic construct
  source 1..23: mol_type = other RNA
  modified_base 1: mod_base = OTHER; note = Vinyl-phosphonate 2'-O-methyluridine-3'-phosphorothioate
  modified_base 2: mod_base = OTHER; note = 2'-fluoroadenosine-3'-phosphorothioate
  modified_base 3: mod_base = OTHER; note = 2'-O-methyluridine-3'-phosphate
  modified_base 4: mod_base = OTHER; note = 2'-O-methylguanosine-3'-phosphate
  modified_base 5: mod_base = OTHER; note = 2'-O-methylcytidine-3'-phosphate
  modified_base 6: mod_base = OTHER; note = 2'-fluorouridine-3'-phosphate
  modified_base 7: mod_base = OTHER; note = 2'-O-methylguanosine-3'-phosphate
  modified_base 8: mod_base = OTHER; note = 2'-fluorocytidine-3'-phosphate
  modified_base 9: mod_base = OTHER; note = 2'-fluorocytidine-3'-phosphate
  modified_base 10: mod_base = OTHER; note = 2'-O-methylcytidine-3'-phosphate
  modified_base 11: mod_base = OTHER; note = 2'-O-methyladenosine-3'-phosphate
  modified_base 12: mod_base = OTHER; note = 2'-O-methyladenosine-3'-phosphate
  modified_base 13: mod_base = OTHER; note = 2'-O-methylguanosine-3'-phosphate
  modified_base 14: mod_base = OTHER; note = 2'-fluoroguanosine-3'-phosphate
  modified_base 15: mod_base = OTHER; note = 2'-O-methylcytidine-3'-phosphate
  modified_base 16: mod_base = OTHER; note = 2'-fluorocytidine-3'-phosphate
  modified_base 17: mod_base = OTHER; note = 2'-O-methyladenosine-3'-phosphate
  modified_base 18: mod_base = OTHER; note = 2'-O-methyladenosine-3'-phosphate
  modified_base 19: mod_base = OTHER; note = 2'-O-methylguanosine-3'-phosphate
  modified_base 20: mod_base = OTHER; note = 2'-O-methyluridine-3'-phosphate
  modified_base 21: mod_base = OTHER; note = 2'-O-methylcytidine-3'-phosphorothioate
  modified_base 22: mod_base = OTHER; note = 2'-O-methylguanosine-3'-phosphorothioate
  modified_base 23: mod_base = OTHER; note = 2'-O-methylguanosine-3'-phosphate
tatgctgcccaaggccaagtcgg

SEQ ID NO: 2952 - RNA, 23 nt, synthetic construct
  source 1..23: mol_type = other RNA
  modified_base 1: mod_base = OTHER; note = Vinyl-phosphonate 2'-O-methyluridine-3'-phosphorothioate
  modified_base 2: mod_base = OTHER; note = 2'-fluoroadenosine-3'-phosphorothioate
  modified_base 3: mod_base = OTHER; note = 2'-O-methylguanosine-3'-phosphate
  modified_base 4: mod_base = OTHER; note = 2'-O-methylguanosine-3'-phosphate
  modified_base 5: mod_base = OTHER; note = 2'-O-methylguanosine-3'-phosphate
  modified_base 6: mod_base = OTHER; note = 2'-fluorouridine-3'-phosphate
  modified_base 7: mod_base = OTHER; note = 2'-O-methyladenosine-3'-phosphate
  modified_base 8: mod_base = OTHER; note = 2'-fluorocytidine-3'-phosphate
  modified_base 9: mod_base = OTHER; note = 2'-fluorocytidine-3'-phosphate
  modified_base 10: mod_base = OTHER; note = 2'-O-methylcytidine-3'-phosphate
  modified_base 11: mod_base = OTHER; note = 2'-O-methylguanosine-3'-phosphate
  modified_base 12: mod_base = OTHER; note = 2'-O-methylcytidine-3'-phosphate
  modified_base 13: mod_base = OTHER; note = 2'-O-methyladenosine-3'-phosphate
  modified_base 14: mod_base = OTHER; note = 2'-fluorocytidine-3'-phosphate
  modified_base 15: mod_base = OTHER; note = 2'-O-methyluridine-3'-phosphate
  modified_base 16: mod_base = OTHER; note = 2'-fluorouridine-3'-phosphate
  modified_base 17: mod_base = OTHER; note = 2'-O-methylcytidine-3'-phosphate
  modified_base 18: mod_base = OTHER; note = 2'-O-methylguanosine-3'-phosphate
  modified_base 19: mod_base = OTHER; note = 2'-O-methylcytidine-3'-phosphate
  modified_base 20: mod_base = OTHER; note = 2'-O-methyluridine-3'-phosphate
  modified_base 21: mod_base = OTHER; note = 2'-O-methylcytidine-3'-phosphorothioate
  modified_base 22: mod_base = OTHER; note = 2'-O-methylcytidine-3'-phosphorothioate
  modified_base 23: mod_base = OTHER; note = 2'-O-methyluridine-3'-phosphate
tagggtacccgcacttcgctcct

SEQ ID NO: 2953 - RNA, 23 nt, synthetic construct
  source 1..23: mol_type = other RNA
  modified_base 1: mod_base = OTHER; note = Vinyl-phosphonate 2'-O-methyluridine-3'-phosphorothioate
  modified_base 2: mod_base = OTHER; note = 2'-fluorouridine -3'-phosphorothioate
  modified_base 3: mod_base = OTHER; note = 2'-O-methyluridine-3'-phosphate
  modified_base 4: mod_base = OTHER; note = 2'-O-methylguanosine-3'-phosphate
  modified_base 5: mod_base = OTHER; note = 2'-O-methylcytidine-3'-phosphate
  modified_base 6: mod_base = OTHER; note = 2'-fluoroadenosine-3'-phosphate
  modified_base 7: mod_base = OTHER; note = 2'-O-methylcytidine-3'-phosphate
  modified_base 8: mod_base = OTHER; note = 2'-fluoroadenosine-3'-phosphate
  modified_base 9: mod_base = OTHER; note = 2'-fluorocytidine-3'-phosphate
  modified_base 10: mod_base = OTHER; note = 2'-O-methyladenosine-3'-phosphate
  modified_base 11: mod_base = OTHER; note = 2'-O-methylguanosine-3'-phosphate
  modified_base 12: mod_base = OTHER; note = 2'-O-methyladenosine-3'-phosphate
  modified_base 13: mod_base = OTHER; note = 2'-O-methylguanosine-3'-phosphate
  modified_base 14: mod_base = OTHER; note = 2'-fluoroguanosine-3'-phosphate
  modified_base 15: mod_base = OTHER; note = 2'-O-methylcytidine-3'-phosphate
  modified_base 16: mod_base = OTHER; note = 2'-fluorocytidine-3'-phosphate
  modified_base 17: mod_base = OTHER; note = 2'-O-methyladenosine-3'-phosphate
  modified_base 18: mod_base = OTHER; note = 2'-O-methylcytidine-3'-phosphate
  modified_base 19: mod_base = OTHER; note = 2'-O-methylcytidine-3'-phosphate
  modified_base 20: mod_base = OTHER; note = 2'-O-methyladenosine-3'-phosphate
  modified_base 21: mod_base = OTHER; note = 2'-O-methylguanosine-3'-phosphorothioate
  modified_base 22: mod_base = OTHER; note = 2'-O-methylguanosine-3'-phosphorothioate
  modified_base 23: mod_base = OTHER; note = 2'-O-methylguanosine-3'-phosphate
tttgcacacagaggccaccaggg

SEQ ID NO: 2954 - RNA, 23 nt, synthetic construct
  source 1..23: mol_type = other RNA
  modified_base 1: mod_base = OTHER; note = Vinyl-phosphonate 2'-O-methyluridine-3'-phosphorothioate
  modified_base 2: mod_base = OTHER; note = 2'-fluorouridine -3'-phosphorothioate
  modified_base 3: mod_base = OTHER; note = 2'-O-methylcytidine-3'-phosphate
  modified_base 4: mod_base = OTHER; note = 2'-O-methylguanosine-3'-phosphate
  modified_base 5: mod_base = OTHER; note = 2'-O-methyladenosine-3'-phosphate
  modified_base 6: mod_base = OTHER; note = 2'-fluorocytidine-3'-phosphate
  modified_base 7: mod_base = OTHER; note = 2'-O-methylcytidine-3'-phosphate
  modified_base 8: mod_base = OTHER; note = 2'-fluorouridine-3'-phosphate
  modified_base 9: mod_base = OTHER; note = 2'-fluorocytidine-3'-phosphate
  modified_base 10: mod_base = OTHER; note = 2'-O-methylguanosine-3'-phosphate
  modified_base 11: mod_base = OTHER; note = 2'-O-methylguanosine-3'-phosphate
  modified_base 12: mod_base = OTHER; note = 2'-O-methylcytidine-3'-phosphate
  modified_base 13: mod_base = OTHER; note = 2'-O-methyluridine-3'-phosphate
  modified_base 14: mod_base = OTHER; note = 2'-fluoroguanosine-3'-phosphate
  modified_base 15: mod_base = OTHER; note = 2'-O-methylguanosine-3'-phosphate
  modified_base 16: mod_base = OTHER; note = 2'-fluorouridine-3'-phosphate
  modified_base 17: mod_base = OTHER; note = 2'-O-methylguanosine-3'-phosphate
  modified_base 18: mod_base = OTHER; note = 2'-O-methylguanosine-3'-phosphate
  modified_base 19: mod_base = OTHER; note = 2'-O-methylguanosine-3'-phosphate
  modified_base 20: mod_base = OTHER; note = 2'-O-methyluridine-3'-phosphate
  modified_base 21: mod_base = OTHER; note = 2'-O-methyluridine-3'-phosphorothioate
  modified_base 22: mod_base = OTHER; note = 2'-O-methylguanosine-3'-phosphorothioate
  modified_base 23: mod_base = OTHER; note = 2'-O-methyluridine-3'-phosphate
ttcgacctcggctggtgggttgt

SEQ ID NO: 2955 - RNA, 23 nt, synthetic construct
  source 1..23: mol_type = other RNA
  modified_base 1: mod_base = OTHER; note = Vinyl-phosphonate 2'-O-methyluridine-3'-phosphorothioate
  modified_base 2: mod_base = OTHER; note = 2'-fluoroadenosine-3'-phosphorothioate
  modified_base 3: mod_base = OTHER; note = 2'-O-methylguanosine-3'-phosphate
  modified_base 4: mod_base = OTHER; note = 2'-O-methyluridine-3'-phosphate
  modified_base 5: mod_base = OTHER; note = 2'-O-methylguanosine-3'-phosphate
  modified_base 6: mod_base = OTHER; note = 2'-fluorocytidine-3'-phosphate
  modified_base 7: mod_base = OTHER; note = 2'-O-methylguanosine-3'-phosphate
  modified_base 8: mod_base = OTHER; note = 2'-fluorocytidine-3'-phosphate
  modified_base 9: mod_base = OTHER; note = 2'-fluorocytidine-3'-phosphate
  modified_base 10: mod_base = OTHER; note = 2'-O-methyluridine-3'-phosphate
  modified_base 11: mod_base = OTHER; note = 2'-O-methyluridine-3'-phosphate
  modified_base 12: mod_base = OTHER; note = 2'-O-methylguanosine-3'-phosphate
  modified_base 13: mod_base = OTHER; note = 2'-O-methylguanosine-3'-phosphate
  modified_base 14: mod_base = OTHER; note = 2'-fluorocytidine-3'-phosphate
  modified_base 15: mod_base = OTHER; note = 2'-O-methyladenosine-3'-phosphate
  modified_base 16: mod_base = OTHER; note = 2'-fluoroguanosine-3'-phosphate
  modified_base 17: mod_base = OTHER; note = 2'-O-methylcytidine-3'-phosphate
  modified_base 18: mod_base = OTHER; note = 2'-O-methyladenosine-3'-phosphate
  modified_base 19: mod_base = OTHER; note = 2'-O-methyluridine-3'-phosphate
  modified_base 20: mod_base = OTHER; note = 2'-O-methylcytidine-3'-phosphate
  modified_base 21: mod_base = OTHER; note = 2'-O-methyladenosine-3'-phosphorothioate
  modified_base 22: mod_base = OTHER; note = 2'-O-methyluridine-3'-phosphorothioate
  modified_base 23: mod_base = OTHER; note = 2'-O-methylcytidine-3'-phosphate
tagtgcgccttggcagcatcatc

SEQ ID NO: 2956 - RNA, 23 nt, synthetic construct
  source 1..23: mol_type = other RNA
  modified_base 1: mod_base = OTHER; note = Vinyl-phosphonate 2'-O-methyluridine-3'-phosphorothioate
  modified_base 2: mod_base = OTHER; note = 2'-fluorouridine -3'-phosphorothioate
  modified_base 3: mod_base = OTHER; note = 2'-O-methylcytidine-3'-phosphate
  modified_base 4: mod_base = OTHER; note = 2'-O-methylguanosine-3'-phosphate
  modified_base 5: mod_base = OTHER; note = 2'-O-methylguanosine-3'-phosphate
  modified_base 6: mod_base = OTHER; note = 2'-fluorocytidine-3'-phosphate
  modified_base 7: mod_base = OTHER; note = 2'-O-methyladenosine-3'-phosphate
  modified_base 8: mod_base = OTHER; note = 2'-fluoroguanosine-3'-phosphate
  modified_base 9: mod_base = OTHER; note = 2'-fluoroguanosine-3'-phosphate
  modified_base 10: mod_base = OTHER; note = 2'-O-methylcytidine-3'-phosphate
  modified_base 11: mod_base = OTHER; note = 2'-O-methylcytidine-3'-phosphate
  modified_base 12: mod_base = OTHER; note = 2'-O-methyladenosine-3'-phosphate
  modified_base 13: mod_base = OTHER; note = 2'-O-methylguanosine-3'-phosphate
  modified_base 14: mod_base = OTHER; note = 2'-fluorocytidine-3'-phosphate
  modified_base 15: mod_base = OTHER; note = 2'-O-methyluridine-3'-phosphate
  modified_base 16: mod_base = OTHER; note = 2'-fluorocytidine-3'-phosphate
  modified_base 17: mod_base = OTHER; note = 2'-O-methyladenosine-3'-phosphate
  modified_base 18: mod_base = OTHER; note = 2'-O-methyluridine-3'-phosphate
  modified_base 19: mod_base = OTHER; note = 2'-O-methyluridine-3'-phosphate
  modified_base 20: mod_base = OTHER; note = 2'-O-methylguanosine-3'-phosphate
  modified_base 21: mod_base = OTHER; note = 2'-O-methylguanosine-3'-phosphorothioate
  modified_base 22: mod_base = OTHER; note = 2'-O-methylcytidine-3'-phosphorothioate
  modified_base 23: mod_base = OTHER; note = 2'-O-methyladenosine-3'-phosphate
ttcggcaggccagctcattggca

SEQ ID NO: 2957 - RNA, 23 nt, synthetic construct
  source 1..23: mol_type = other RNA
  modified_base 1: mod_base = OTHER; note = Vinyl-phosphonate 2'-O-methyluridine-3'-phosphorothioate
  modified_base 2: mod_base = OTHER; note = 2'-fluorouridine -3'-phosphorothioate
  modified_base 3: mod_base = OTHER; note = 2'-O-methylguanosine-3'-phosphate
  modified_base 4: mod_base = OTHER; note = 2'-O-methylcytidine-3'-phosphate
  modified_base 5: mod_base = OTHER; note = 2'-O-methyladenosine-3'-phosphate
  modified_base 6: mod_base = OTHER; note = 2'-fluoroguanosine-3'-phosphate
  modified_base 7: mod_base = OTHER; note = 2'-O-methylguanosine-3'-phosphate
  modified_base 8: mod_base = OTHER; note = 2'-fluoroadenosine-3'-phosphate
  modified_base 9: mod_base = OTHER; note = 2'-fluorocytidine-3'-phosphate
  modified_base 10: mod_base = OTHER; note = 2'-O-methylcytidine-3'-phosphate
  modified_base 11: mod_base = OTHER; note = 2'-O-methylcytidine-3'-phosphate
  modified_base 12: mod_base = OTHER; note = 2'-O-methylguanosine-3'-phosphate
  modified_base 13: mod_base = OTHER; note = 2'-O-methylcytidine-3'-phosphate
  modified_base 14: mod_base = OTHER; note = 2'-fluorouridine-3'-phosphate
  modified_base 15: mod_base = OTHER; note = 2'-O-methylguanosine-3'-phosphate
  modified_base 16: mod_base = OTHER; note = 2'-fluorocytidine-3'-phosphate
  modified_base 17: mod_base = OTHER; note = 2'-O-methyladenosine-3'-phosphate
  modified_base 18: mod_base = OTHER; note = 2'-O-methylguanosine-3'-phosphate
  modified_base 19: mod_base = OTHER; note = 2'-O-methylcytidine-3'-phosphate
  modified_base 20: mod_base = OTHER; note = 2'-O-methyladenosine-3'-phosphate
  modified_base 21: mod_base = OTHER; note = 2'-O-methylcytidine-3'-phosphorothioate
  modified_base 22: mod_base = OTHER; note = 2'-O-methyladenosine-3'-phosphorothioate
  modified_base 23: mod_base = OTHER; note = 2'-O-methyluridine-3'-phosphate
ttgcaggacccgctgcagcacat

SEQ ID NO: 2958 - RNA, 23 nt, synthetic construct
  source 1..23: mol_type = other RNA
  modified_base 1: mod_base = OTHER; note = Vinyl-phosphonate 2'-O-methyluridine-3'-phosphorothioate
  modified_base 2: mod_base = OTHER; note = 2'-fluorouridine -3'-phosphorothioate
  modified_base 3: mod_base = OTHER; note = 2'-O-methyladenosine-3'-phosphate
  modified_base 4: mod_base = OTHER; note = 2'-O-methylcytidine-3'-phosphate
  modified_base 5: mod_base = OTHER; note = 2'-O-methyluridine-3'-phosphate
  modified_base 6: mod_base = OTHER; note = 2'-fluoroguanosine-3'-phosphate
  modified_base 7: mod_base = OTHER; note = 2'-O-methylguanosine-3'-phosphate
  modified_base 8: mod_base = OTHER; note = 2'-fluorocytidine-3'-phosphate
  modified_base 9: mod_base = OTHER; note = 2'-fluoroguanosine-3'-phosphate
  modified_base 10: mod_base = OTHER; note = 2'-O-methylcytidine-3'-phosphate
  modified_base 11: mod_base = OTHER; note = 2'-O-methyluridine-3'-phosphate
  modified_base 12: mod_base = OTHER; note = 2'-O-methylcytidine-3'-phosphate
  modified_base 13: mod_base = OTHER; note = 2'-O-methyluridine-3'-phosphate
  modified_base 14: mod_base = OTHER; note = 2'-fluoroguanosine-3'-phosphate
  modified_base 15: mod_base = OTHER; note = 2'-O-methylcytidine-3'-phosphate
  modified_base 16: mod_base = OTHER; note = 2'-fluoroadenosine-3'-phosphate
  modified_base 17: mod_base = OTHER; note = 2'-O-methylcytidine-3'-phosphate
  modified_base 18: mod_base = OTHER; note = 2'-O-methylguanosine-3'-phosphate
  modified_base 19: mod_base = OTHER; note = 2'-O-methylcytidine-3'-phosphate
  modified_base 20: mod_base = OTHER; note = 2'-O-methylcytidine-3'-phosphate
  modified_base 21: mod_base = OTHER; note = 2'-O-methylcytidine-3'-phosphorothioate
  modified_base 22: mod_base = OTHER; note = 2'-O-methyluridine-3'-phosphorothioate
  modified_base 23: mod_base = OTHER; note = 2'-O-methyluridine-3'-phosphate
ttactggcgctctgcacgccctt

SEQ ID NO: 2959 - RNA, 23 nt, synthetic construct
  source 1..23: mol_type = other RNA
  modified_base 1: mod_base = OTHER; note = Vinyl-phosphonate 2'-O-methyluridine-3'-phosphorothioate
  modified_base 2: mod_base = OTHER; note = 2'-fluoroadenosine-3'-phosphorothioate
  modified_base 3: mod_base = OTHER; note = 2'-O-methyluridine-3'-phosphate
  modified_base 4: mod_base = OTHER; note = 2'-O-methyluridine-3'-phosphate
  modified_base 5: mod_base = OTHER; note = 2'-O-methylcytidine-3'-phosphate
  modified_base 6: mod_base = OTHER; note = 2'-fluoroguanosine-3'-phosphate
  modified_base 7: mod_base = OTHER; note = 2'-O-methylcytidine-3'-phosphate
  modified_base 8: mod_base = OTHER; note = 2'-fluoroadenosine-3'-phosphate
  modified_base 9: mod_base = OTHER; note = 2'-fluoroguanosine-3'-phosphate
  modified_base 10: mod_base = OTHER; note = 2'-O-methylguanosine-3'-phosphate
  modified_base 11: mod_base = OTHER; note = 2'-O-methyluridine-3'-phosphate
  modified_base 12: mod_base = OTHER; note = 2'-O-methylguanosine-3'-phosphate
  modified_base 13: mod_base = OTHER; note = 2'-O-methylcytidine-3'-phosphate
  modified_base 14: mod_base = OTHER; note = 2'-fluorocytidine-3'-phosphate
  modified_base 15: mod_base = OTHER; note = 2'-O-methyladenosine-3'-phosphate
  modified_base 16: mod_base = OTHER; note = 2'-fluorocytidine-3'-phosphate
  modified_base 17: mod_base = OTHER; note = 2'-O-methyluridine-3'-phosphate
  modified_base 18: mod_base = OTHER; note = 2'-O-methylcytidine-3'-phosphate
  modified_base 19: mod_base = OTHER; note = 2'-O-methyladenosine-3'-phosphate
  modified_base 20: mod_base = OTHER; note = 2'-O-methylcytidine-3'-phosphate
  modified_base 21: mod_base = OTHER; note = 2'-O-methylcytidine-3'-phosphorothioate
  modified_base 22: mod_base = OTHER; note = 2'-O-methyladenosine-3'-phosphorothioate
  modified_base 23: mod_base = OTHER; note = 2'-O-methylcytidine-3'-phosphate
tattcgcaggtgccactcaccac

SEQ ID NO: 2960 - RNA, 23 nt, synthetic construct
  source 1..23: mol_type = other RNA
  modified_base 1: mod_base = OTHER; note = Vinyl-phosphonate 2'-O-methyluridine-3'-phosphorothioate
  modified_base 2: mod_base = OTHER; note = 2'-fluorouridine -3'-phosphorothioate
  modified_base 3: mod_base = OTHER; note = 2'-O-methylcytidine-3'-phosphate
  modified_base 4: mod_base = OTHER; note = 2'-O-methylcytidine-3'-phosphate
  modified_base 5: mod_base = OTHER; note = 2'-O-methylguanosine-3'-phosphate
  modified_base 6: mod_base = OTHER; note = 2'-fluorouridine-3'-phosphate
  modified_base 7: mod_base = OTHER; note = 2'-O-methylguanosine-3'-phosphate
  modified_base 8: mod_base = OTHER; note = 2'-fluorouridine-3'-phosphate
  modified_base 9: mod_base = OTHER; note = 2'-fluorocytidine-3'-phosphate
  modified_base 10: mod_base = OTHER; note = 2'-O-methylcytidine-3'-phosphate
  modified_base 11: mod_base = OTHER; note = 2'-O-methyluridine-3'-phosphate
  modified_base 12: mod_base = OTHER; note = 2'-O-methylcytidine-3'-phosphate
  modified_base 13: mod_base = OTHER; note = 2'-O-methyluridine-3'-phosphate
  modified_base 14: mod_base = OTHER; note = 2'-fluorocytidine-3'-phosphate
  modified_base 15: mod_base = OTHER; note = 2'-O-methylcytidine-3'-phosphate
  modified_base 16: mod_base = OTHER; note = 2'-fluorocytidine-3'-phosphate
  modified_base 17: mod_base = OTHER; note = 2'-O-methyluridine-3'-phosphate
  modified_base 18: mod_base = OTHER; note = 2'-O-methylcytidine-3'-phosphate
  modified_base 19: mod_base = OTHER; note = 2'-O-methylcytidine-3'-phosphate
  modified_base 20: mod_base = OTHER; note = 2'-O-methylguanosine-3'-phosphate
  modified_base 21: mod_base = OTHER; note = 2'-O-methyluridine-3'-phosphorothioate
  modified_base 22: mod_base = OTHER; note = 2'-O-methylguanosine-3'-phosphorothioate
  modified_base 23: mod_base = OTHER; note = 2'-O-methyluridine-3'-phosphate
ttccgtgtcctctccctccgtgt

SEQ ID NO: 2961 - RNA, 23 nt, synthetic construct
  source 1..23: mol_type = other RNA
ttcatctctttaaccaaacttgt

SEQ ID NO: 2962 - RNA, 23 nt, synthetic construct
  source 1..23: mol_type = other RNA
ttctctaacaaataaacagaacc

SEQ ID NO: 2963 - RNA, 23 nt, synthetic construct
  source 1..23: mol_type = other RNA
cctgcatagtcactcttttgatg

SEQ ID NO: 2964 - RNA, 23 nt, synthetic construct
  source 1..23: mol_type = other RNA
ctaacttgatttttcatctcttt

SEQ ID NO: 2965 - RNA, 23 nt, synthetic construct
  source 1..23: mol_type = other RNA
ttgacacattcttagcactgaac

SEQ ID NO: 2966 - RNA, 23 nt, synthetic construct
  source 1..23: mol_type = other RNA
atacgccttatttgatttaacta

SEQ ID NO: 2967 - RNA, 23 nt, synthetic construct
  source 1..23: mol_type = other RNA
cctagtcttcgaaatgttaatat

SEQ ID NO: 2968 - RNA, 23 nt, synthetic construct
  source 1..23: mol_type = other RNA
atgatggacttttaagttgtttc

SEQ ID NO: 2969 - RNA, 23 nt, synthetic construct
  source 1..23: mol_type = other RNA
cctgcttttttcacttaataata

SEQ ID NO: 2970 - RNA, 23 nt, synthetic construct
  source 1..23: mol_type = other RNA
ccacataataactactgcataat

SEQ ID NO: 2971 - RNA, 23 nt, synthetic construct
  source 1..23: mol_type = other RNA
aatactagtgtcactttctgagt

SEQ ID NO: 2972 - RNA, 23 nt, synthetic construct
  source 1..23: mol_type = other RNA
aacaatcagatgcaaaagctctt

SEQ ID NO: 2973 - RNA, 23 nt, synthetic construct
  source 1..23: mol_type = other RNA
tataagagtaattgcctaacttg

SEQ ID NO: 2974 - RNA, 23 nt, synthetic construct
  source 1..23: mol_type = other RNA
atggcttgtttatgaacattaaa

SEQ ID NO: 2975 - RNA, 23 nt, synthetic construct
  source 1..23: mol_type = other RNA
cttttttgctactgcaaacgatg

SEQ ID NO: 2976 - RNA, 23 nt, synthetic construct
  source 1..23: mol_type = other RNA
caaacgatgctataataaatgtc

SEQ ID NO: 2977 - RNA, 23 nt, synthetic construct
  source 1..23: mol_type = other RNA
cttggttgttactataagagtaa

SEQ ID NO: 2978 - RNA, 23 nt, synthetic construct
  source 1..23: mol_type = other RNA
ctctgatgaacatcctctgatga

SEQ ID NO: 2979 - RNA, 23 nt, synthetic construct
  source 1..23: mol_type = other RNA
ctctgcggataaatatttgccac

SEQ ID NO: 2980 - RNA, 23 nt, synthetic construct
  source 1..23: mol_type = other RNA
ttccaaaattcagattctgcctc

SEQ ID NO: 2981 - RNA, 23 nt, synthetic construct
  source 1..23: mol_type = other RNA
aaaaggatgtgtgtctttctccc

SEQ ID NO: 2982 - RNA, 23 nt, synthetic construct
  source 1..23: mol_type = other RNA
cctgcgaatgcttccagaagacc

SEQ ID NO: 2983 - RNA, 23 nt, synthetic construct
  source 1..23: mol_type = other RNA
cacgaatgagtaactcctgtcac

SEQ ID NO: 2984 - RNA, 23 nt, synthetic construct
  source 1..23: mol_type = other RNA
cttgggtgtttatttaaaatact

SEQ ID NO: 2985 - RNA, 23 nt, synthetic construct
  source 1..23: mol_type = other RNA
gccaaaagatatttgaccgtttc

SEQ ID NO: 2986 - RNA, 23 nt, synthetic construct
  source 1..23: mol_type = other RNA
taatacagcttggagagattttt

SEQ ID NO: 2987 - RNA, 23 nt, synthetic construct
  source 1..23: mol_type = other RNA
gaaaatgcattcatacaattaca

SEQ ID NO: 2988 - RNA, 23 nt, synthetic construct
  source 1..23: mol_type = other RNA
aatcccactcgctctttttgatg

SEQ ID NO: 2989 - RNA, 23 nt, synthetic construct
  source 1..23: mol_type = other RNA
ccgcttgtgtttacacaagctgt

SEQ ID NO: 2990 - RNA, 23 nt, synthetic construct
  source 1..23: mol_type = other RNA
cacctgccttacatggcttgttt

SEQ ID NO: 2991 - RNA, 23 nt, synthetic construct
  source 1..23: mol_type = other RNA
gagagatttttgtatcacattat

SEQ ID NO: 2992 - RNA, 23 nt, synthetic construct
  source 1..23: mol_type = other RNA
cgagcacttcagacaaggtcctg

SEQ ID NO: 2993 - RNA, 23 nt, synthetic construct
  source 1..23: mol_type = other RNA
cttcactctcagagccagttttt

SEQ ID NO: 2994 - RNA, 23 nt, synthetic construct
  source 1..23: mol_type = other RNA
gcactgaactcctctgtgatcta

SEQ ID NO: 2995 - RNA, 23 nt, synthetic construct
  source 1..23: mol_type = other RNA
actagttccctaatgatggactt

SEQ ID NO: 2996 - RNA, 23 nt, synthetic construct
  source 1..23: mol_type = other RNA
agggcgttactgacaacgtggtg

SEQ ID NO: 2997 - RNA, 23 nt, synthetic construct
  source 1..23: mol_type = other RNA
tgtgatctaggatgatctgttcc

SEQ ID NO: 2998 - RNA, 23 nt, synthetic construct
  source 1..23: mol_type = other RNA
tggtgatgatatatagactttat

SEQ ID NO: 2999 - RNA, 23 nt, synthetic construct
  source 1..23: mol_type = other RNA
caggctactttgaagggaacaat

SEQ ID NO: 3000 - RNA, 23 nt, synthetic construct
  source 1..23: mol_type = other RNA
gcctgctctgattctatggcttg

SEQ ID NO: 3001 - RNA, 23 nt, synthetic construct
  source 1..23: mol_type = other RNA
aaagattgcttctgagctgaagg

SEQ ID NO: 3002 - RNA, 23 nt, synthetic construct
  source 1..23: mol_type = other RNA
gtgccatctcttgtgtatgcagg

SEQ ID NO: 3003 - RNA, 23 nt, synthetic construct
  source 1..23: mol_type = other RNA
acagccacatttccatttgcatc

SEQ ID NO: 3004 - RNA, 23 nt, synthetic construct
  source 1..23: mol_type = other RNA
ggtccagacagaaggttttgaca

SEQ ID NO: 3005 - RNA, 23 nt, synthetic construct
  source 1..23: mol_type = other RNA
ctctctcgatacaccgtgcagac

SEQ ID NO: 3006 - RNA, 23 nt, synthetic construct
  source 1..23: mol_type = other RNA
aaggcgcactttttatttttatt

SEQ ID NO: 3007 - RNA, 23 nt, synthetic construct
  source 1..23: mol_type = other RNA
gcgagcgttgccactttcaaagt

SEQ ID NO: 3008 - RNA, 23 nt, synthetic construct
  source 1..23: mol_type = other RNA
atttgcatcattactgccttcac

SEQ ID NO: 3009 - RNA, 23 nt, synthetic construct
  source 1..23: mol_type = other RNA
ctgcgcaagaagagctgagtcgc

SEQ ID NO: 3010 - RNA, 23 nt, synthetic construct
  source 1..23: mol_type = other RNA
actgcggaatttgctgccaacac

SEQ ID NO: 3011 - RNA, 23 nt, synthetic construct
  source 1..23: mol_type = other RNA
ctgtgtgcaatgcctatgagaag

SEQ ID NO: 3012 - RNA, 23 nt, synthetic construct
  source 1..23: mol_type = other RNA
cagaattcaaatattgcaaaagg

SEQ ID NO: 3013 - RNA, 23 nt, synthetic construct
  source 1..23: mol_type = other RNA
ggcctgtgtgctttgtagagcca

SEQ ID NO: 3014 - RNA, 23 nt, synthetic construct
  source 1..23: mol_type = other RNA
cctccagacaaggaagagtcagc

SEQ ID NO: 3015 - RNA, 23 nt, synthetic construct
  source 1..23: mol_type = other RNA
agtgccagaaacagcatcagcgt

SEQ ID NO: 3016 - RNA, 23 nt, synthetic construct
  source 1..23: mol_type = other RNA
ctgcataatatggatacgcctta

SEQ ID NO: 3017 - RNA, 23 nt, synthetic construct
  source 1..23: mol_type = other RNA
tcagcctcatcctgatgatgctg

SEQ ID NO: 3018 - RNA, 23 nt, synthetic construct
  source 1..23: mol_type = other RNA
ccaagcctcttgagcagggttgg

SEQ ID NO: 3019 - RNA, 23 nt, synthetic construct
  source 1..23: mol_type = other RNA
attaaagggaagaagttgaagct

SEQ ID NO: 3020 - RNA, 23 nt, synthetic construct
  source 1..23: mol_type = other RNA
tgggcagcattgagaaggtggtg

SEQ ID NO: 3021 - RNA, 23 nt, synthetic construct
  source 1..23: mol_type = other RNA
gggtcagcgacagcttcttccgg

SEQ ID NO: 3022 - RNA, 23 nt, synthetic construct
  source 1..23: mol_type = other RNA
ccctgctgtctcctcaaccaagg

SEQ ID NO: 3023 - RNA, 23 nt, synthetic construct
  source 1..23: mol_type = other RNA
ggaggaggaagaattggagactg

SEQ ID NO: 3024 - RNA, 23 nt, synthetic construct
  source 1..23: mol_type = other RNA
ctcctgtcaccactctgaaggtc

SEQ ID NO: 3025 - RNA, 23 nt, synthetic construct
  source 1..23: mol_type = other RNA
atagactttatgtatagccacag

SEQ ID NO: 3026 - RNA, 23 nt, synthetic construct
  source 1..23: mol_type = other RNA
gtgttacgcatgcctgctttttt

SEQ ID NO: 3027 - RNA, 23 nt, synthetic construct
  source 1..23: mol_type = other RNA
acccagttcacagctgccaatga

SEQ ID NO: 3028 - RNA, 23 nt, synthetic construct
  source 1..23: mol_type = other RNA
tgcaggcacgtgtgtatgcactc

SEQ ID NO: 3029 - RNA, 23 nt, synthetic construct
  source 1..23: mol_type = other RNA
ggatggcagtcaacaaaggcctc

SEQ ID NO: 3030 - RNA, 23 nt, synthetic construct
  source 1..23: mol_type = other RNA
accaaacttgtggccaaaagata

SEQ ID NO: 3031 - RNA, 23 nt, synthetic construct
  source 1..23: mol_type = other RNA
gctctgaccaacaccctctctcg

SEQ ID NO: 3032 - RNA, 23 nt, synthetic construct
  source 1..23: mol_type = other RNA
tatcacattataaatcccactcg

SEQ ID NO: 3033 - RNA, 23 nt, synthetic construct
  source 1..23: mol_type = other RNA
ctgaggagaacaagttcagtgag

SEQ ID NO: 3034 - RNA, 23 nt, synthetic construct
  source 1..23: mol_type = other RNA
ctgagcaggagaatgtgctgcag

SEQ ID NO: 3035 - RNA, 23 nt, synthetic construct
  source 1..23: mol_type = other RNA
cagaagacctacaccagcactaa

SEQ ID NO: 3036 - RNA, 23 nt, synthetic construct
  source 1..23: mol_type = other RNA
aaaggcctcaccttgctggatgg

SEQ ID NO: 3037 - RNA, 23 nt, synthetic construct
  source 1..23: mol_type = other RNA
agagccagctgcttgctcacagc

SEQ ID NO: 3038 - RNA, 23 nt, synthetic construct
  source 1..23: mol_type = other RNA
ctgggctctgtgagactgaggtg

SEQ ID NO: 3039 - RNA, 23 nt, synthetic construct
  source 1..23: mol_type = other RNA
cccgagagcgaattccgggacat

SEQ ID NO: 3040 - RNA, 23 nt, synthetic construct
  source 1..23: mol_type = other RNA
gtgtggcacataccctgcagaag

SEQ ID NO: 3041 - RNA, 23 nt, synthetic construct
  source 1..23: mol_type = other RNA
tggtggacacagtggtgcattac

SEQ ID NO: 3042 - RNA, 23 nt, synthetic construct
  source 1..23: mol_type = other RNA
gcaagcccagaagtctcccaagg

SEQ ID NO: 3043 - RNA, 23 nt, synthetic construct
  source 1..23: mol_type = other RNA
agggccatgtccctatcagatgc

SEQ ID NO: 3044 - RNA, 23 nt, synthetic construct
  source 1..23: mol_type = other RNA
gggccggcgggtttctctaacaa

SEQ ID NO: 3045 - RNA, 23 nt, synthetic construct
  source 1..23: mol_type = other RNA
agctgaaggacaccatctccacc

SEQ ID NO: 3046 - RNA, 23 nt, synthetic construct
  source 1..23: mol_type = other RNA
cagaccaccatctcggctgtgac

SEQ ID NO: 3047 - RNA, 23 nt, synthetic construct
  source 1..23: mol_type = other RNA
agccagtttttaagggacaccag

SEQ ID NO: 3048 - RNA, 23 nt, synthetic construct
  source 1..23: mol_type = other RNA
gtggccagagacactgcggaatt

SEQ ID NO: 3049 - RNA, 23 nt, synthetic construct
  source 1..23: mol_type = other RNA
agcgttcccatcgcgagcacttc

SEQ ID NO: 3050 - RNA, 23 nt, synthetic construct
  source 1..23: mol_type = other RNA
ttccgggacatcgacaacccacc

SEQ ID NO: 3051 - RNA, 23 nt, synthetic construct
  source 1..23: mol_type = other RNA
cctctgatgatctaggctcccag

SEQ ID NO: 3052 - RNA, 23 nt, synthetic construct
  source 1..23: mol_type = other RNA
ccctgcagaagaccctccagacc

SEQ ID NO: 3053 - RNA, 23 nt, synthetic construct
  source 1..23: mol_type = other RNA
agcgccagtagcttggctgcctg

SEQ ID NO: 3054 - RNA, 23 nt, synthetic construct
  source 1..23: mol_type = other RNA
gccgcttcacaggctgagtccag

SEQ ID NO: 3055 - RNA, 23 nt, synthetic construct
  source 1..23: mol_type = other RNA
tttttttttagcatccttttggg

SEQ ID NO: 3056 - RNA, 23 nt, synthetic construct
  source 1..23: mol_type = other RNA
gagaagccaaagcgcagggtcag

SEQ ID NO: 3057 - RNA, 23 nt, synthetic construct
  source 1..23: mol_type = other RNA
aggaggaggatcatgaggaccag

SEQ ID NO: 3058 - RNA, 23 nt, synthetic construct
  source 1..23: mol_type = other RNA
ccgcacgcattacagccagctgc

SEQ ID NO: 3059 - RNA, 23 nt, synthetic construct
  source 1..23: mol_type = other RNA
cccttcattgaaaaccaccacgg

SEQ ID NO: 3060 - RNA, 23 nt, synthetic construct
  source 1..23: mol_type = other RNA
tctttttgatggccacataataa

SEQ ID NO: 3061 - RNA, 23 nt, synthetic construct
  source 1..23: mol_type = other RNA
gaccacctggaggaaaagatccc

SEQ ID NO: 3062 - RNA, 23 nt, synthetic construct
  source 1..23: mol_type = other RNA
cccaaggccaagccaagcctctt

SEQ ID NO: 3063 - RNA, 23 nt, synthetic construct
  source 1..23: mol_type = other RNA
atgaggaccagacagacacggag

SEQ ID NO: 3064 - RNA, 23 nt, synthetic construct
  source 1..23: mol_type = other RNA
cagatgccctgaagggcgttact

SEQ ID NO: 3065 - RNA, 23 nt, synthetic construct
  source 1..23: mol_type = other RNA
tgccaacactcgagctggccgac

SEQ ID NO: 3066 - RNA, 23 nt, synthetic construct
  source 1..23: mol_type = other RNA
tgcagggctatgcacctgcaggc

SEQ ID NO: 3067 - RNA, 23 nt, synthetic construct
  source 1..23: mol_type = other RNA
agaaggtggtggagtacctcctc

SEQ ID NO: 3068 - RNA, 23 nt, synthetic construct
  source 1..23: mol_type = other RNA
agttgaagcttgaggagcgagga

SEQ ID NO: 3069 - RNA, 23 nt, synthetic construct
  source 1..23: mol_type = other RNA
accgtggccatgtggatcccagg

SEQ ID NO: 3070 - RNA, 23 nt, synthetic construct
  source 1..23: mol_type = other RNA
accagcactaaggaagcccaccc

SEQ ID NO: 3071 - RNA, 23 nt, synthetic construct
  source 1..23: mol_type = other RNA
ctgtcgctgatggagcccgagag

SEQ ID NO: 3072 - RNA, 23 nt, synthetic construct
  source 1..23: mol_type = other RNA
gcttcttccggcccagcgtcatg

SEQ ID NO: 3073 - RNA, 23 nt, synthetic construct
  source 1..23: mol_type = other RNA
ccctgctcctggacaccagcaag

SEQ ID NO: 3074 - RNA, 23 nt, synthetic construct
  source 1..23: mol_type = other RNA
actttctgagtacccgccgcttc

SEQ ID NO: 3075 - RNA, 23 nt, synthetic construct
  source 1..23: mol_type = other RNA
tccgcaggctgtccacccagttc

SEQ ID NO: 3076 - RNA, 23 nt, synthetic construct
  source 1..23: mol_type = other RNA
tcggctgtgacatgggcacctgc

SEQ ID NO: 3077 - RNA, 23 nt, synthetic construct
  source 1..23: mol_type = other RNA
gttcagtgaggtagcagccctgc

SEQ ID NO: 3078 - RNA, 23 nt, synthetic construct
  source 1..23: mol_type = other RNA
ccagcgtcatggagcccatcctg

SEQ ID NO: 3079 - RNA, 23 nt, synthetic construct
  source 1..23: mol_type = other RNA
tgctggatggagacctccctgag

SEQ ID NO: 3080 - RNA, 23 nt, synthetic construct
  source 1..23: mol_type = other RNA
ggtcagccggagtgagtgttggg

SEQ ID NO: 3081 - RNA, 23 nt, synthetic construct
  source 1..23: mol_type = other RNA
agctggccgactggcttctggag

SEQ ID NO: 3082 - RNA, 23 nt, synthetic construct
  source 1..23: mol_type = other RNA
agggtgctgcacctcacaccagc

SEQ ID NO: 3083 - RNA, 23 nt, synthetic construct
  source 1..23: mol_type = other RNA
ttggctgcctggagcatggagcc

SEQ ID NO: 3084 - RNA, 23 nt, synthetic construct
  source 1..23: mol_type = other RNA
cacctgcagctgtgctgggcatg

SEQ ID NO: 3085 - RNA, 23 nt, synthetic construct
  source 1..23: mol_type = other RNA
tcagtggccatgcaggcggtgtc

SEQ ID NO: 3086 - RNA, 23 nt, synthetic construct
  source 1..23: mol_type = other RNA
ccgacttggccttgggcagcatt

SEQ ID NO: 3087 - RNA, 23 nt, synthetic construct
  source 1..23: mol_type = other RNA
aggagcgaagtgcgggtaccctg

SEQ ID NO: 3088 - RNA, 23 nt, synthetic construct
  source 1..23: mol_type = other RNA
ccctggtggcctctgtgtgcaat

SEQ ID NO: 3089 - RNA, 23 nt, synthetic construct
  source 1..23: mol_type = other RNA
acaacccaccagccgaggtcgag

SEQ ID NO: 3090 - RNA, 23 nt, synthetic construct
  source 1..23: mol_type = other RNA
gatgatgctgccaaggcgcactt

SEQ ID NO: 3091 - RNA, 23 nt, synthetic construct
  source 1..23: mol_type = other RNA
tgccaatgagctggcctgccgag

SEQ ID NO: 3092 - RNA, 23 nt, synthetic construct
  source 1..23: mol_type = other RNA
atgtgctgcagcgggtcctgcag

SEQ ID NO: 3093 - RNA, 23 nt, synthetic construct
  source 1..23: mol_type = other RNA
aagggcgtgcagagcgccagtag

SEQ ID NO: 3094 - RNA, 23 nt, synthetic construct
  source 1..23: mol_type = other RNA
gtggtgagtggcacctgcgaatg

SEQ ID NO: 3095 - RNA, 23 nt, synthetic construct
  source 1..23: mol_type = other RNA
acacggagggagaggacacggag

SEQ ID NO: 3096 - RNA, 21 nt, synthetic construct
  source 1..21: mol_type = other RNA
  modified_base 1: mod_base = OTHER; note = 2'-O-methylcytidine-3'-phosphorothioate
  modified_base 2: mod_base = OTHER; note = 2'-O-methyladenosine-3'-phosphorothioate
  modified_base 3: mod_base = OTHER; note = 2'-O-methyluridine-3'-phosphate
  modified_base 4: mod_base = OTHER; note = 2'-O-methylcytidine-3'-phosphate
  modified_base 5: mod_base = OTHER; note = 2'-O-methyluridine-3'-phosphate
  modified_base 6: mod_base = OTHER; note = 2'-O-methylcytidine-3'-phosphate
  modified_base 7: mod_base = OTHER; note = 2'-fluorouridine-3'-phosphate
  modified_base 8: mod_base = OTHER; note = 2'-O-methyluridine-3'-phosphate
  modified_base 9: mod_base = OTHER; note = 2'-fluorouridine-3'-phosphate
  modified_base 10: mod_base = OTHER; note = 2'-fluoroadenosine-3'-phosphate
  modified_base 11: mod_base = OTHER; note = 2'-fluoroadenosine-3'-phosphate
  modified_base 12: mod_base = OTHER; note = 2'-O-methylcytidine-3'-phosphate
  modified_base 13: mod_base = OTHER; note = 2'-O-methylcytidine-3'-phosphate
  modified_base 14: mod_base = OTHER; note = 2'-O-methyladenosine-3'-phosphate
  modified_base 15: mod_base = OTHER; note = 2'-O-methyladenosine-3'-phosphate
  modified_base 16: mod_base = OTHER; note = 2'-O-methyladenosine-3'-phosphate
  modified_base 17: mod_base = OTHER; note = 2'-O-methylcytidine-3'-phosphate
  modified_base 18: mod_base = OTHER; note = 2'-O-methyluridine-3'-phosphate
  modified_base 19: mod_base = OTHER; note = 2'-O-methyluridine-3'-phosphorothioate
  modified_base 20: mod_base = OTHER; note = 2'-O-methylguanosine-3'-phosphorothioate
  modified_base 21: mod_base = OTHER; note = 2'-O-methyladenosine-3'-phosphate
catctctttaaccaaacttga

SEQ ID NO: 3097 - RNA, 21 nt, synthetic construct
  source 1..21: mol_type = other RNA
  modified_base 1: mod_base = OTHER; note = 2'-O-methylcytidine-3'-phosphorothioate
  modified_base 2: mod_base = OTHER; note = 2'-O-methyluridine-3'-phosphorothioate
  modified_base 3: mod_base = OTHER; note = 2'-O-methylcytidine-3'-phosphate
  modified_base 4: mod_base = OTHER; note = 2'-O-methyluridine-3'-phosphate
  modified_base 5: mod_base = OTHER; note = 2'-O-methyladenosine-3'-phosphate
  modified_base 6: mod_base = OTHER; note = 2'-O-methyladenosine-3'-phosphate
  modified_base 7: mod_base = OTHER; note = 2'-fluorocytidine-3'-phosphate
  modified_base 8: mod_base = OTHER; note = 2'-O-methyladenosine-3'-phosphate
  modified_base 9: mod_base = OTHER; note = 2'-fluoroadenosine-3'-phosphate
  modified_base 10: mod_base = OTHER; note = 2'-fluoroadenosine-3'-phosphate
  modified_base 11: mod_base = OTHER; note = 2'-fluorouridine-3'-phosphate
  modified_base 12: mod_base = OTHER; note = 2'-O-methyladenosine-3'-phosphate
  modified_base 13: mod_base = OTHER; note = 2'-O-methyladenosine-3'-phosphate
  modified_base 14: mod_base = OTHER; note = 2'-O-methyladenosine-3'-phosphate
  modified_base 15: mod_base = OTHER; note = 2'-O-methylcytidine-3'-phosphate
  modified_base 16: mod_base = OTHER; note = 2'-O-methyladenosine-3'-phosphate
  modified_base 17: mod_base = OTHER; note = 2'-O-methylguanosine-3'-phosphate
  modified_base 18: mod_base = OTHER; note = 2'-O-methyladenosine-3'-phosphate
  modified_base 19: mod_base = OTHER; note = 2'-O-methyladenosine-3'-phosphorothioate
  modified_base 20: mod_base = OTHER; note = 2'-O-methylcytidine-3'-phosphorothioate
  modified_base 21: mod_base = OTHER; note = 2'-O-methyladenosine-3'-phosphate
ctctaacaaataaacagaaca

SEQ ID NO: 3098 - RNA, 21 nt, synthetic construct
  source 1..21: mol_type = other RNA
  modified_base 1: mod_base = OTHER; note = 2'-O-methyluridine-3'-phosphorothioate
  modified_base 2: mod_base = OTHER; note = 2'-O-methylguanosine-3'-phosphorothioate
  modified_base 3: mod_base = OTHER; note = 2'-O-methylcytidine-3'-phosphate
  modified_base 4: mod_base = OTHER; note = 2'-O-methyladenosine-3'-phosphate
  modified_base 5: mod_base = OTHER; note = 2'-O-methyluridine-3'-phosphate
  modified_base 6: mod_base = OTHER; note = 2'-O-methyladenosine-3'-phosphate
  modified_base 7: mod_base = OTHER; note = 2'-fluoroguanosine-3'-phosphate
  modified_base 8: mod_base = OTHER; note = 2'-O-methyluridine-3'-phosphate
  modified_base 9: mod_base = OTHER; note = 2'-fluorocytidine-3'-phosphate
  modified_base 10: mod_base = OTHER; note = 2'-fluoroadenosine-3'-phosphate
  modified_base 11: mod_base = OTHER; note = 2'-fluorocytidine-3'-phosphate
  modified_base 12: mod_base = OTHER; note = 2'-O-methyluridine-3'-phosphate
  modified_base 13: mod_base = OTHER; note = 2'-O-methylcytidine-3'-phosphate
  modified_base 14: mod_base = OTHER; note = 2'-O-methyluridine-3'-phosphate
  modified_base 15: mod_base = OTHER; note = 2'-O-methyluridine-3'-phosphate
  modified_base 16: mod_base = OTHER; note = 2'-O-methyluridine-3'-phosphate
  modified_base 17: mod_base = OTHER; note = 2'-O-methyluridine-3'-phosphate
  modified_base 18: mod_base = OTHER; note = 2'-O-methylguanosine-3'-phosphate
  modified_base 19: mod_base = OTHER; note = 2'-O-methyladenosine-3'-phosphorothioate
  modified_base 20: mod_base = OTHER; note = 2'-O-methyluridine-3'-phosphorothioate
  modified_base 21: mod_base = OTHER; note = 2'-O-methyladenosine-3'-phosphate
tgcatagtcactcttttgata

SEQ ID NO: 3099 - RNA, 21 nt, synthetic construct
  source 1..21: mol_type = other RNA
  modified_base 1: mod_base = OTHER; note = 2'-O-methyladenosine-3'-phosphorothioate
  modified_base 2: mod_base = OTHER; note = 2'-O-methyladenosine-3'-phosphorothioate
  modified_base 3: mod_base = OTHER; note = 2'-O-methylcytidine-3'-phosphate
  modified_base 4: mod_base = OTHER; note = 2'-O-methyluridine-3'-phosphate
  modified_base 5: mod_base = OTHER; note = 2'-O-methyluridine-3'-phosphate
  modified_base 6: mod_base = OTHER; note = 2'-O-methylguanosine-3'-phosphate
  modified_base 7: mod_base = OTHER; note = 2'-fluoroadenosine-3'-phosphate
  modified_base 8: mod_base = OTHER; note = 2'-O-methyluridine-3'-phosphate
  modified_base 9: mod_base = OTHER; note = 2'-fluorouridine-3'-phosphate
  modified_base 10: mod_base = OTHER; note = 2'-fluorouridine-3'-phosphate
  modified_base 11: mod_base = OTHER; note = 2'-fluorouridine-3'-phosphate
  modified_base 12: mod_base = OTHER; note = 2'-O-methyluridine-3'-phosphate
  modified_base 13: mod_base = OTHER; note = 2'-O-methylcytidine-3'-phosphate
  modified_base 14: mod_base = OTHER; note = 2'-O-methyladenosine-3'-phosphate
  modified_base 15: mod_base = OTHER; note = 2'-O-methyluridine-3'-phosphate
  modified_base 16: mod_base = OTHER; note = 2'-O-methylcytidine-3'-phosphate
  modified_base 17: mod_base = OTHER; note = 2'-O-methyluridine-3'-phosphate
  modified_base 18: mod_base = OTHER; note = 2'-O-methylcytidine-3'-phosphate
  modified_base 19: mod_base = OTHER; note = 2'-O-methyluridine-3'-phosphorothioate
  modified_base 20: mod_base = OTHER; note = 2'-O-methyluridine-3'-phosphorothioate
  modified_base 21: mod_base = OTHER; note = 2'-O-methyladenosine-3'-phosphate
aacttgatttttcatctctta

SEQ ID NO: 3100 - RNA, 21 nt, synthetic construct
  source 1..21: mol_type = other RNA
  modified_base 1: mod_base = OTHER; note = 2'-O-methylguanosine-3'-phosphorothioate
  modified_base 2: mod_base = OTHER; note = 2'-O-methyladenosine-3'-phosphorothioate
  modified_base 3: mod_base = OTHER; note = 2'-O-methylcytidine-3'-phosphate
  modified_base 4: mod_base = OTHER; note = 2'-O-methyladenosine-3'-phosphate
  modified_base 5: mod_base = OTHER; note = 2'-O-methylcytidine-3'-phosphate
  modified_base 6: mod_base = OTHER; note = 2'-O-methyladenosine-3'-phosphate
  modified_base 7: mod_base = OTHER; note = 2'-fluorouridine-3'-phosphate
  modified_base 8: mod_base = OTHER; note = 2'-O-methyluridine-3'-phosphate
  modified_base 9: mod_base = OTHER; note = 2'-fluorocytidine-3'-phosphate
  modified_base 10: mod_base = OTHER; note = 2'-fluorouridine-3'-phosphate
  modified_base 11: mod_base = OTHER; note = 2'-fluorouridine-3'-phosphate
  modified_base 12: mod_base = OTHER; note = 2'-O-methyladenosine-3'-phosphate
  modified_base 13: mod_base = OTHER; note = 2'-O-methylguanosine-3'-phosphate
  modified_base 14: mod_base = OTHER; note = 2'-O-methylcytidine-3'-phosphate
  modified_base 15: mod_base = OTHER; note = 2'-O-methyladenosine-3'-phosphate
  modified_base 16: mod_base = OTHER; note = 2'-O-methylcytidine-3'-phosphate
  modified_base 17: mod_base = OTHER; note = 2'-O-methyluridine-3'-phosphate
  modified_base 18: mod_base = OTHER; note = 2'-O-methylguanosine-3'-phosphate
  modified_base 19: mod_base = OTHER; note = 2'-O-methyladenosine-3'-phosphorothioate
  modified_base 20: mod_base = OTHER; note = 2'-O-methyladenosine-3'-phosphorothioate
  modified_base 21: mod_base = OTHER; note = 2'-O-methyladenosine-3'-phosphate
gacacattcttagcactgaaa

SEQ ID NO: 3101 - RNA, 21 nt, synthetic construct
  source 1..21: mol_type = other RNA
  modified_base 1: mod_base = OTHER; note = 2'-O-methyladenosine-3'-phosphorothioate
  modified_base 2: mod_base = OTHER; note = 2'-O-methylcytidine-3'-phosphorothioate
  modified_base 3: mod_base = OTHER; note = 2'-O-methylguanosine-3'-phosphate
  modified_base 4: mod_base = OTHER; note = 2'-O-methylcytidine-3'-phosphate
  modified_base 5: mod_base = OTHER; note = 2'-O-methylcytidine-3'-phosphate
  modified_base 6: mod_base = OTHER; note = 2'-O-methyluridine-3'-phosphate
  modified_base 7: mod_base = OTHER; note = 2'-fluorouridine-3'-phosphate
  modified_base 8: mod_base = OTHER; note = 2'-O-methyladenosine-3'-phosphate
  modified_base 9: mod_base = OTHER; note = 2'-fluorouridine-3'-phosphate
  modified_base 10: mod_base = OTHER; note = 2'-fluorouridine-3'-phosphate
  modified_base 11: mod_base = OTHER; note = 2'-fluorouridine-3'-phosphate
  modified_base 12: mod_base = OTHER; note = 2'-O-methylguanosine-3'-phosphate
  modified_base 13: mod_base = OTHER; note = 2'-O-methyladenosine-3'-phosphate
  modified_base 14: mod_base = OTHER; note = 2'-O-methyluridine-3'-phosphate
  modified_base 15: mod_base = OTHER; note = 2'-O-methyluridine-3'-phosphate
  modified_base 16: mod_base = OTHER; note = 2'-O-methyluridine-3'-phosphate
  modified_base 17: mod_base = OTHER; note = 2'-O-methyladenosine-3'-phosphate
  modified_base 18: mod_base = OTHER; note = 2'-O-methyladenosine-3'-phosphate
  modified_base 19: mod_base = OTHER; note = 2'-O-methylcytidine-3'-phosphorothioate
  modified_base 20: mod_base = OTHER; note = 2'-O-methyluridine-3'-phosphorothioate
  modified_base 21: mod_base = OTHER; note = 2'-O-methyladenosine-3'-phosphate
acgccttatttgatttaacta

SEQ ID NO: 3102 - RNA, 21 nt, synthetic construct
  source 1..21: mol_type = other RNA
  modified_base 1: mod_base = OTHER; note = 2'-O-methyluridine-3'-phosphorothioate
  modified_base 2: mod_base = OTHER; note = 2'-O-methyladenosine-3'-phosphorothioate
  modified_base 3: mod_base = OTHER; note = 2'-O-methylguanosine-3'-phosphate
  modified_base 4: mod_base = OTHER; note = 2'-O-methyluridine-3'-phosphate
  modified_base 5: mod_base = OTHER; note = 2'-O-methylcytidine-3'-phosphate
  modified_base 6: mod_base = OTHER; note = 2'-O-methyluridine-3'-phosphate
  modified_base 7: mod_base = OTHER; note = 2'-fluorouridine-3'-phosphate
  modified_base 8: mod_base = OTHER; note = 2'-O-methylcytidine-3'-phosphate
  modified_base 9: mod_base = OTHER; note = 2'-fluoroguanosine-3'-phosphate
  modified_base 10: mod_base = OTHER; note = 2'-fluoroadenosine-3'-phosphate
  modified_base 11: mod_base = OTHER; note = 2'-fluoroadenosine-3'-phosphate
  modified_base 12: mod_base = OTHER; note = 2'-O-methyladenosine-3'-phosphate
  modified_base 13: mod_base = OTHER; note = 2'-O-methyluridine-3'-phosphate
  modified_base 14: mod_base = OTHER; note = 2'-O-methylguanosine-3'-phosphate
  modified_base 15: mod_base = OTHER; note = 2'-O-methyluridine-3'-phosphate
  modified_base 16: mod_base = OTHER; note = 2'-O-methyluridine-3'-phosphate
  modified_base 17: mod_base = OTHER; note = 2'-O-methyladenosine-3'-phosphate
  modified_base 18: mod_base = OTHER; note = 2'-O-methyladenosine-3'-phosphate
  modified_base 19: mod_base = OTHER; note = 2'-O-methyluridine-3'-phosphorothioate
  modified_base 20: mod_base = OTHER; note = 2'-O-methyladenosine-3'-phosphorothioate
  modified_base 21: mod_base = OTHER; note = 2'-O-methyladenosine-3'-phosphate
tagtcttcgaaatgttaataa

SEQ ID NO: 3103 - RNA, 21 nt, synthetic construct
  source 1..21: mol_type = other RNA
  modified_base 1: mod_base = OTHER; note = 2'-O-methylguanosine-3'-phosphorothioate
  modified_base 2: mod_base = OTHER; note = 2'-O-methyladenosine-3'-phosphorothioate
  modified_base 3: mod_base = OTHER; note = 2'-O-methyluridine-3'-phosphate
  modified_base 4: mod_base = OTHER; note = 2'-O-methylguanosine-3'-phosphate
  modified_base 5: mod_base = OTHER; note = 2'-O-methylguanosine-3'-phosphate
  modified_base 6: mod_base = OTHER; note = 2'-O-methyladenosine-3'-phosphate
  modified_base 7: mod_base = OTHER; note = 2'-fluorocytidine-3'-phosphate
  modified_base 8: mod_base = OTHER; note = 2'-O-methyluridine-3'-phosphate
  modified_base 9: mod_base = OTHER; note = 2'-fluorouridine-3'-phosphate
  modified_base 10: mod_base = OTHER; note = 2'-fluorouridine-3'-phosphate
  modified_base 11: mod_base = OTHER; note = 2'-fluorouridine-3'-phosphate
  modified_base 12: mod_base = OTHER; note = 2'-O-methyladenosine-3'-phosphate
  modified_base 13: mod_base = OTHER; note = 2'-O-methyladenosine-3'-phosphate
  modified_base 14: mod_base = OTHER; note = 2'-O-methylguanosine-3'-phosphate
  modified_base 15: mod_base = OTHER; note = 2'-O-methyluridine-3'-phosphate
  modified_base 16: mod_base = OTHER; note = 2'-O-methyluridine-3'-phosphate
  modified_base 17: mod_base = OTHER; note = 2'-O-methylguanosine-3'-phosphate
  modified_base 18: mod_base = OTHER; note = 2'-O-methyluridine-3'-phosphate
  modified_base 19: mod_base = OTHER; note = 2'-O-methyluridine-3'-phosphorothioate
  modified_base 20: mod_base = OTHER; note = 2'-O-methyluridine-3'-phosphorothioate
  modified_base 21: mod_base = OTHER; note = 2'-O-methyladenosine-3'-phosphate
gatggacttttaagttgttta

SEQ ID NO: 3104 - RNA, 21 nt, synthetic construct
  source 1..21: mol_type = other RNA
  modified_base 1: mod_base = OTHER; note = 2'-O-methyluridine-3'-phosphorothioate
  modified_base 2: mod_base = OTHER; note = 2'-O-methylguanosine-3'-phosphorothioate
  modified_base 3: mod_base = OTHER; note = 2'-O-methylcytidine-3'-phosphate
  modified_base 4: mod_base = OTHER; note = 2'-O-methyluridine-3'-phosphate
  modified_base 5: mod_base = OTHER; note = 2'-O-methyluridine-3'-phosphate
  modified_base 6: mod_base = OTHER; note = 2'-O-methyluridine-3'-phosphate
  modified_base 7: mod_base = OTHER; note = 2'-fluorouridine-3'-phosphate
  modified_base 8: mod_base = OTHER; note = 2'-O-methyluridine-3'-phosphate
  modified_base 9: mod_base = OTHER; note = 2'-fluorouridine-3'-phosphate
  modified_base 10: mod_base = OTHER; note = 2'-fluorocytidine-3'-phosphate
  modified_base 11: mod_base = OTHER; note = 2'-fluoroadenosine-3'-phosphate
  modified_base 12: mod_base = OTHER; note = 2'-O-methylcytidine-3'-phosphate
  modified_base 13: mod_base = OTHER; note = 2'-O-methyluridine-3'-phosphate
  modified_base 14: mod_base = OTHER; note = 2'-O-methyluridine-3'-phosphate
  modified_base 15: mod_base = OTHER; note = 2'-O-methyladenosine-3'-phosphate
  modified_base 16: mod_base = OTHER; note = 2'-O-methyladenosine-3'-phosphate
  modified_base 17: mod_base = OTHER; note = 2'-O-methyluridine-3'-phosphate
  modified_base 18: mod_base = OTHER; note = 2'-O-methyladenosine-3'-phosphate
  modified_base 19: mod_base = OTHER; note = 2'-O-methyladenosine-3'-phosphorothioate
  modified_base 20: mod_base = OTHER; note = 2'-O-methyluridine-3'-phosphorothioate
  modified_base 21: mod_base = OTHER; note = 2'-O-methyladenosine-3'-phosphate
tgcttttttcacttaataata

SEQ ID NO: 3105 - RNA, 21 nt, synthetic construct
  source 1..21: mol_type = other RNA
  modified_base 1: mod_base = OTHER; note = 2'-O-methyladenosine-3'-phosphorothioate
  modified_base 2: mod_base = OTHER; note = 2'-O-methylcytidine-3'-phosphorothioate
  modified_base 3: mod_base = OTHER; note = 2'-O-methyladenosine-3'-phosphate
  modified_base 4: mod_base = OTHER; note = 2'-O-methyluridine-3'-phosphate
  modified_base 5: mod_base = OTHER; note = 2'-O-methyladenosine-3'-phosphate
  modified_base 6: mod_base = OTHER; note = 2'-O-methyladenosine-3'-phosphate
  modified_base 7: mod_base = OTHER; note = 2'-fluorouridine-3'-phosphate
  modified_base 8: mod_base = OTHER; note = 2'-O-methyladenosine-3'-phosphate
  modified_base 9: mod_base = OTHER; note = 2'-fluoroadenosine-3'-phosphate
  modified_base 10: mod_base = OTHER; note = 2'-fluorocytidine-3'-phosphate
  modified_base 11: mod_base = OTHER; note = 2'-fluorouridine-3'-phosphate
  modified_base 12: mod_base = OTHER; note = 2'-O-methyladenosine-3'-phosphate
  modified_base 13: mod_base = OTHER; note = 2'-O-methylcytidine-3'-phosphate
  modified_base 14: mod_base = OTHER; note = 2'-O-methyluridine-3'-phosphate
  modified_base 15: mod_base = OTHER; note = 2'-O-methylguanosine-3'-phosphate
  modified_base 16: mod_base = OTHER; note = 2'-O-methylcytidine-3'-phosphate
  modified_base 17: mod_base = OTHER; note = 2'-O-methyladenosine-3'-phosphate
  modified_base 18: mod_base = OTHER; note = 2'-O-methyluridine-3'-phosphate
  modified_base 19: mod_base = OTHER; note = 2'-O-methyladenosine-3'-phosphorothioate
  modified_base 20: mod_base = OTHER; note = 2'-O-methyladenosine-3'-phosphorothioate
  modified_base 21: mod_base = OTHER; note = 2'-O-methyladenosine-3'-phosphate
acataataactactgcataaa

SEQ ID NO: 3106 - RNA, 21 nt, synthetic construct
  source 1..21: mol_type = other RNA
  modified_base 1: mod_base = OTHER; note = 2'-O-methyluridine-3'-phosphorothioate
  modified_base 2: mod_base = OTHER; note = 2'-O-methyladenosine-3'-phosphorothioate
  modified_base 3: mod_base = OTHER; note = 2'-O-methylcytidine-3'-phosphate
  modified_base 4: mod_base = OTHER; note = 2'-O-methyluridine-3'-phosphate
  modified_base 5: mod_base = OTHER; note = 2'-O-methyladenosine-3'-phosphate
  modified_base 6: mod_base = OTHER; note = 2'-O-methylguanosine-3'-phosphate
  modified_base 7: mod_base = OTHER; note = 2'-fluorouridine-3'-phosphate
  modified_base 8: mod_base = OTHER; note = 2'-O-methylguanosine-3'-phosphate
  modified_base 9: mod_base = OTHER; note = 2'-fluorouridine-3'-phosphate
  modified_base 10: mod_base = OTHER; note = 2'-fluorocytidine-3'-phosphate
  modified_base 11: mod_base = OTHER; note = 2'-fluoroadenosine-3'-phosphate
  modified_base 12: mod_base = OTHER; note = 2'-O-methylcytidine-3'-phosphate
  modified_base 13: mod_base = OTHER; note = 2'-O-methyluridine-3'-phosphate
  modified_base 14: mod_base = OTHER; note = 2'-O-methyluridine-3'-phosphate
  modified_base 15: mod_base = OTHER; note = 2'-O-methyluridine-3'-phosphate
  modified_base 16: mod_base = OTHER; note = 2'-O-methylcytidine-3'-phosphate
  modified_base 17: mod_base = OTHER; note = 2'-O-methyluridine-3'-phosphate
  modified_base 18: mod_base = OTHER; note = 2'-O-methylguanosine-3'-phosphate
  modified_base 19: mod_base = OTHER; note = 2'-O-methyladenosine-3'-phosphorothioate
  modified_base 20: mod_base = OTHER; note = 2'-O-methylguanosine-3'-phosphorothioate
  modified_base 21: mod_base = OTHER; note = 2'-O-methyladenosine-3'-phosphate
tactagtgtcactttctgaga

SEQ ID NO: 3107 - RNA, 21 nt, synthetic construct
  source 1..21: mol_type = other RNA
  modified_base 1: mod_base = OTHER; note = 2'-O-methylcytidine-3'-phosphorothioate
  modified_base 2: mod_base = OTHER; note = 2'-O-methyladenosine-3'-phosphorothioate
  modified_base 3: mod_base = OTHER; note = 2'-O-methyladenosine-3'-phosphate
  modified_base 4: mod_base = OTHER; note = 2'-O-methyluridine-3'-phosphate
  modified_base 5: mod_base = OTHER; note = 2'-O-methylcytidine-3'-phosphate
  modified_base 6: mod_base = OTHER; note = 2'-O-methyladenosine-3'-phosphate
  modified_base 7: mod_base = OTHER; note = 2'-fluoroguanosine-3'-phosphate
  modified_base 8: mod_base = OTHER; note = 2'-O-methyladenosine-3'-phosphate
  modified_base 9: mod_base = OTHER; note = 2'-fluorouridine-3'-phosphate
  modified_base 10: mod_base = OTHER; note = 2'-fluoroguanosine-3'-phosphate
  modified_base 11: mod_base = OTHER; note = 2'-fluorocytidine-3'-phosphate
  modified_base 12: mod_base = OTHER; note = 2'-O-methyladenosine-3'-phosphate
  modified_base 13: mod_base = OTHER; note = 2'-O-methyladenosine-3'-phosphate
  modified_base 14: mod_base = OTHER; note = 2'-O-methyladenosine-3'-phosphate
  modified_base 15: mod_base = OTHER; note = 2'-O-methyladenosine-3'-phosphate
  modified_base 16: mod_base = OTHER; note = 2'-O-methylguanosine-3'-phosphate
  modified_base 17: mod_base = OTHER; note = 2'-O-methylcytidine-3'-phosphate
  modified_base 18: mod_base = OTHER; note = 2'-O-methyluridine-3'-phosphate
  modified_base 19: mod_base = OTHER; note = 2'-O-methylcytidine-3'-phosphorothioate
  modified_base 20: mod_base = OTHER; note = 2'-O-methyluridine-3'-phosphorothioate
  modified_base 21: mod_base = OTHER; note = 2'-O-methyladenosine-3'-phosphate
caatcagatgcaaaagctcta

SEQ ID NO: 3108 - RNA, 21 nt, synthetic construct
  source 1..21: mol_type = other RNA
  modified_base 1: mod_base = OTHER; note = 2'-O-methyluridine-3'-phosphorothioate
  modified_base 2: mod_base = OTHER; note = 2'-O-methyladenosine-3'-phosphorothioate
  modified_base 3: mod_base = OTHER; note = 2'-O-methyladenosine-3'-phosphate
  modified_base 4: mod_base = OTHER; note = 2'-O-methylguanosine-3'-phosphate
  modified_base 5: mod_base = OTHER; note = 2'-O-methyladenosine-3'-phosphate
  modified_base 6: mod_base = OTHER; note = 2'-O-methylguanosine-3'-phosphate
  modified_base 7: mod_base = OTHER; note = 2'-fluorouridine-3'-phosphate
  modified_base 8: mod_base = OTHER; note = 2'-O-methyladenosine-3'-phosphate
  modified_base 9: mod_base = OTHER; note = 2'-fluoroadenosine-3'-phosphate
  modified_base 10: mod_base = OTHER; note = 2'-fluorouridine-3'-phosphate
  modified_base 11: mod_base = OTHER; note = 2'-fluorouridine-3'-phosphate
  modified_base 12: mod_base = OTHER; note = 2'-O-methylguanosine-3'-phosphate
  modified_base 13: mod_base = OTHER; note = 2'-O-methylcytidine-3'-phosphate
  modified_base 14: mod_base = OTHER; note = 2'-O-methylcytidine-3'-phosphate
  modified_base 15: mod_base = OTHER; note = 2'-O-methyluridine-3'-phosphate
  modified_base 16: mod_base = OTHER; note = 2'-O-methyladenosine-3'-phosphate
  modified_base 17: mod_base = OTHER; note = 2'-O-methyladenosine-3'-phosphate
  modified_base 18: mod_base = OTHER; note = 2'-O-methylcytidine-3'-phosphate
  modified_base 19: mod_base = OTHER; note = 2'-O-methyluridine-3'-phosphorothioate
  modified_base 20: mod_base = OTHER; note = 2'-O-methyluridine-3'-phosphorothioate
  modified_base 21: mod_base = OTHER; note = 2'-O-methyladenosine-3'-phosphate
taagagtaattgcctaactta

SEQ ID NO: 3109 - RNA, 21 nt, synthetic construct
  source 1..21: mol_type = other RNA
  modified_base 1: mod_base = OTHER; note = 2'-O-methylguanosine-3'-phosphorothioate
  modified_base 2: mod_base = OTHER; note = 2'-O-methylguanosine-3'-phosphorothioate
  modified_base 3: mod_base = OTHER; note = 2'-O-methylcytidine-3'-phosphate
  modified_base 4: mod_base = OTHER; note = 2'-O-methyluridine-3'-phosphate
  modified_base 5: mod_base = OTHER; note = 2'-O-methyluridine-3'-phosphate
  modified_base 6: mod_base = OTHER; note = 2'-O-methylguanosine-3'-phosphate
  modified_base 7: mod_base = OTHER; note = 2'-fluorouridine-3'-phosphate
  modified_base 8: mod_base = OTHER; note = 2'-O-methyluridine-3'-phosphate
  modified_base 9: mod_base = OTHER; note = 2'-fluorouridine-3'-phosphate
  modified_base 10: mod_base = OTHER; note = 2'-fluoroadenosine-3'-phosphate
  modified_base 11: mod_base = OTHER; note = 2'-fluorouridine-3'-phosphate
  modified_base 12: mod_base = OTHER; note = 2'-O-methylguanosine-3'-phosphate
  modified_base 13: mod_base = OTHER; note = 2'-O-methyladenosine-3'-phosphate
  modified_base 14: mod_base = OTHER; note = 2'-O-methyladenosine-3'-phosphate
  modified_base 15: mod_base = OTHER; note = 2'-O-methylcytidine-3'-phosphate
  modified_base 16: mod_base = OTHER; note = 2'-O-methyladenosine-3'-phosphate
  modified_base 17: mod_base = OTHER; note = 2'-O-methyluridine-3'-phosphate
  modified_base 18: mod_base = OTHER; note = 2'-O-methyluridine-3'-phosphate
  modified_base 19: mod_base = OTHER; note = 2'-O-methyladenosine-3'-phosphorothioate
  modified_base 20: mod_base = OTHER; note = 2'-O-methyladenosine-3'-phosphorothioate
  modified_base 21: mod_base = OTHER; note = 2'-O-methyladenosine-3'-phosphate
ggcttgtttatgaacattaaa

SEQ ID NO: 3110 - RNA, 21 nt, synthetic construct
  source 1..21: mol_type = other RNA
  modified_base 1: mod_base = OTHER; note = 2'-O-methyluridine-3'-phosphorothioate
  modified_base 2: mod_base = OTHER; note = 2'-O-methyluridine-3'-phosphorothioate
  modified_base 3: mod_base = OTHER; note = 2'-O-methyluridine-3'-phosphate
  modified_base 4: mod_base = OTHER; note = 2'-O-methyluridine-3'-phosphate
  modified_base 5: mod_base = OTHER; note = 2'-O-methyluridine-3'-phosphate
  modified_base 6: mod_base = OTHER; note = 2'-O-methylguanosine-3'-phosphate
  modified_base 7: mod_base = OTHER; note = 2'-fluorocytidine-3'-phosphate
  modified_base 8: mod_base = OTHER; note = 2'-O-methyluridine-3'-phosphate
  modified_base 9: mod_base = OTHER; note = 2'-fluoroadenosine-3'-phosphate
  modified_base 10: mod_base = OTHER; note = 2'-fluorocytidine-3'-phosphate
  modified_base 11: mod_base = OTHER; note = 2'-fluorouridine-3'-phosphate
  modified_base 12: mod_base = OTHER; note = 2'-O-methylguanosine-3'-phosphate
  modified_base 13: mod_base = OTHER; note = 2'-O-methylcytidine-3'-phosphate
  modified_base 14: mod_base = OTHER; note = 2'-O-methyladenosine-3'-phosphate
  modified_base 15: mod_base = OTHER; note = 2'-O-methyladenosine-3'-phosphate
  modified_base 16: mod_base = OTHER; note = 2'-O-methyladenosine-3'-phosphate
  modified_base 17: mod_base = OTHER; note = 2'-O-methylcytidine-3'-phosphate
  modified_base 18: mod_base = OTHER; note = 2'-O-methylguanosine-3'-phosphate
  modified_base 19: mod_base = OTHER; note = 2'-O-methyladenosine-3'-phosphorothioate
  modified_base 20: mod_base = OTHER; note = 2'-O-methyluridine-3'-phosphorothioate
  modified_base 21: mod_base = OTHER; note = 2'-O-methyladenosine-3'-phosphate
tttttgctactgcaaacgata

SEQ ID NO: 3111 - RNA, 21 nt, synthetic construct
  source 1..21: mol_type = other RNA
  modified_base 1: mod_base = OTHER; note = 2'-O-methyladenosine-3'-phosphorothioate
  modified_base 2: mod_base = OTHER; note = 2'-O-methyladenosine-3'-phosphorothioate
  modified_base 3: mod_base = OTHER; note = 2'-O-methylcytidine-3'-phosphate
  modified_base 4: mod_base = OTHER; note = 2'-O-methylguanosine-3'-phosphate
  modified_base 5: mod_base = OTHER; note = 2'-O-methyladenosine-3'-phosphate
  modified_base 6: mod_base = OTHER; note = 2'-O-methyluridine-3'-phosphate
  modified_base 7: mod_base = OTHER; note = 2'-fluoroguanosine-3'-phosphate
  modified_base 8: mod_base = OTHER; note = 2'-O-methylcytidine-3'-phosphate
  modified_base 9: mod_base = OTHER; note = 2'-fluorouridine-3'-phosphate
  modified_base 10: mod_base = OTHER; note = 2'-fluoroadenosine-3'-phosphate
  modified_base 11: mod_base = OTHER; note = 2'-fluorouridine-3'-phosphate
  modified_base 12: mod_base = OTHER; note = 2'-O-methyladenosine-3'-phosphate
  modified_base 13: mod_base = OTHER; note = 2'-O-methyladenosine-3'-phosphate
  modified_base 14: mod_base = OTHER; note = 2'-O-methyluridine-3'-phosphate
  modified_base 15: mod_base = OTHER; note = 2'-O-methyladenosine-3'-phosphate
  modified_base 16: mod_base = OTHER; note = 2'-O-methyladenosine-3'-phosphate
  modified_base 17: mod_base = OTHER; note = 2'-O-methyladenosine-3'-phosphate
  modified_base 18: mod_base = OTHER; note = 2'-O-methyluridine-3'-phosphate
  modified_base 19: mod_base = OTHER; note = 2'-O-methylguanosine-3'-phosphorothioate
  modified_base 20: mod_base = OTHER; note = 2'-O-methyluridine-3'-phosphorothioate
  modified_base 21: mod_base = OTHER; note = 2'-O-methyladenosine-3'-phosphate
aacgatgctataataaatgta

SEQ ID NO: 3112 - RNA, 21 nt, synthetic construct
  source 1..21: mol_type = other RNA
  modified_base 1: mod_base = OTHER; note = 2'-O-methyluridine-3'-phosphorothioate
  modified_base 2: mod_base = OTHER; note = 2'-O-methylguanosine-3'-phosphorothioate
  modified_base 3: mod_base = OTHER; note = 2'-O-methylguanosine-3'-phosphate
  modified_base 4: mod_base = OTHER; note = 2'-O-methyluridine-3'-phosphate
  modified_base 5: mod_base = OTHER; note = 2'-O-methyluridine-3'-phosphate
  modified_base 6: mod_base = OTHER; note = 2'-O-methylguanosine-3'-phosphate
  modified_base 7: mod_base = OTHER; note = 2'-fluorouridine-3'-phosphate
  modified_base 8: mod_base = OTHER; note = 2'-O-methyluridine-3'-phosphate
  modified_base 9: mod_base = OTHER; note = 2'-fluoroadenosine-3'-phosphate
  modified_base 10: mod_base = OTHER; note = 2'-fluorocytidine-3'-phosphate
  modified_base 11: mod_base = OTHER; note = 2'-fluorouridine-3'-phosphate
  modified_base 12: mod_base = OTHER; note = 2'-O-methyladenosine-3'-phosphate
  modified_base 13: mod_base = OTHER; note = 2'-O-methyluridine-3'-phosphate
  modified_base 14: mod_base = OTHER; note = 2'-O-methyladenosine-3'-phosphate
  modified_base 15: mod_base = OTHER; note = 2'-O-methyladenosine-3'-phosphate
  modified_base 16: mod_base = OTHER; note = 2'-O-methylguanosine-3'-phosphate
  modified_base 17: mod_base = OTHER; note = 2'-O-methyladenosine-3'-phosphate
  modified_base 18: mod_base = OTHER; note = 2'-O-methylguanosine-3'-phosphate
  modified_base 19: mod_base = OTHER; note = 2'-O-methyluridine-3'-phosphorothioate
  modified_base 20: mod_base = OTHER; note = 2'-O-methyladenosine-3'-phosphorothioate
  modified_base 21: mod_base = OTHER; note = 2'-O-methyladenosine-3'-phosphate
tggttgttactataagagtaa

SEQ ID NO: 3113 - RNA, 21 nt, synthetic construct
  source 1..21: mol_type = other RNA
  modified_base 1: mod_base = OTHER; note = 2'-O-methylcytidine-3'-phosphorothioate
  modified_base 2: mod_base = OTHER; note = 2'-O-methyluridine-3'-phosphorothioate
  modified_base 3: mod_base = OTHER; note = 2'-O-methylguanosine-3'-phosphate
  modified_base 4: mod_base = OTHER; note = 2'-O-methyladenosine-3'-phosphate
  modified_base 5: mod_base = OTHER; note = 2'-O-methyluridine-3'-phosphate
  modified_base 6: mod_base = OTHER; note = 2'-O-methylguanosine-3'-phosphate
  modified_base 7: mod_base = OTHER; note = 2'-fluoroadenosine-3'-phosphate
  modified_base 8: mod_base = OTHER; note = 2'-O-methyladenosine-3'-phosphate
  modified_base 9: mod_base = OTHER; note = 2'-fluorocytidine-3'-phosphate
  modified_base 10: mod_base = OTHER; note = 2'-fluoroadenosine-3'-phosphate
  modified_base 11: mod_base = OTHER; note = 2'-fluorouridine-3'-phosphate
  modified_base 12: mod_base = OTHER; note = 2'-O-methylcytidine-3'-phosphate
  modified_base 13: mod_base = OTHER; note = 2'-O-methylcytidine-3'-phosphate
  modified_base 14: mod_base = OTHER; note = 2'-O-methyluridine-3'-phosphate
  modified_base 15: mod_base = OTHER; note = 2'-O-methylcytidine-3'-phosphate
  modified_base 16: mod_base = OTHER; note = 2'-O-methyluridine-3'-phosphate
  modified_base 17: mod_base = OTHER; note = 2'-O-methylguanosine-3'-phosphate
  modified_base 18: mod_base = OTHER; note = 2'-O-methyladenosine-3'-phosphate
  modified_base 19: mod_base = OTHER; note = 2'-O-methyluridine-3'-phosphorothioate
  modified_base 20: mod_base = OTHER; note = 2'-O-methylguanosine-3'-phosphorothioate
  modified_base 21: mod_base = OTHER; note = 2'-O-methyladenosine-3'-phosphate
ctgatgaacatcctctgatga

SEQ ID NO: 3114 - RNA, 21 nt, synthetic construct
  source 1..21: mol_type = other RNA
  modified_base 1: mod_base = OTHER; note = 2'-O-methylcytidine-3'-phosphorothioate
  modified_base 2: mod_base = OTHER; note = 2'-O-methyluridine-3'-phosphorothioate
  modified_base 3: mod_base = OTHER; note = 2'-O-methylguanosine-3'-phosphate
  modified_base 4: mod_base = OTHER; note = 2'-O-methylcytidine-3'-phosphate
  modified_base 5: mod_base = OTHER; note = 2'-O-methylguanosine-3'-phosphate
  modified_base 6: mod_base = OTHER; note = 2'-O-methylguanosine-3'-phosphate
  modified_base 7: mod_base = OTHER; note = 2'-fluoroadenosine-3'-phosphate
  modified_base 8: mod_base = OTHER; note = 2'-O-methyluridine-3'-phosphate
  modified_base 9: mod_base = OTHER; note = 2'-fluoroadenosine-3'-phosphate
  modified_base 10: mod_base = OTHER; note = 2'-fluoroadenosine-3'-phosphate
  modified_base 11: mod_base = OTHER; note = 2'-fluoroadenosine-3'-phosphate
  modified_base 12: mod_base = OTHER; note = 2'-O-methyluridine-3'-phosphate
  modified_base 13: mod_base = OTHER; note = 2'-O-methyladenosine-3'-phosphate
  modified_base 14: mod_base = OTHER; note = 2'-O-methyluridine-3'-phosphate
  modified_base 15: mod_base = OTHER; note = 2'-O-methyluridine-3'-phosphate
  modified_base 16: mod_base = OTHER; note = 2'-O-methyluridine-3'-phosphate
  modified_base 17: mod_base = OTHER; note = 2'-O-methylguanosine-3'-phosphate
  modified_base 18: mod_base = OTHER; note = 2'-O-methylcytidine-3'-phosphate
  modified_base 19: mod_base = OTHER; note = 2'-O-methylcytidine-3'-phosphorothioate
  modified_base 20: mod_base = OTHER; note = 2'-O-methyladenosine-3'-phosphorothioate
  modified_base 21: mod_base = OTHER; note = 2'-O-methyladenosine-3'-phosphate
ctgcggataaatatttgccaa

SEQ ID NO: 3115 - RNA, 21 nt, synthetic construct
  source 1..21: mol_type = other RNA
  modified_base 1: mod_base = OTHER; note = 2'-O-methylcytidine-3'-phosphorothioate
  modified_base 2: mod_base = OTHER; note = 2'-O-methylcytidine-3'-phosphorothioate
  modified_base 3: mod_base = OTHER; note = 2'-O-methyladenosine-3'-phosphate
  modified_base 4: mod_base = OTHER; note = 2'-O-methyladenosine-3'-phosphate
  modified_base 5: mod_base = OTHER; note = 2'-O-methyladenosine-3'-phosphate
  modified_base 6: mod_base = OTHER; note = 2'-O-methyladenosine-3'-phosphate
  modified_base 7: mod_base = OTHER; note = 2'-fluorouridine-3'-phosphate
  modified_base 8: mod_base = OTHER; note = 2'-O-methyluridine-3'-phosphate
  modified_base 9: mod_base = OTHER; note = 2'-fluorocytidine-3'-phosphate
  modified_base 10: mod_base = OTHER; note = 2'-fluoroadenosine-3'-phosphate
  modified_base 11: mod_base = OTHER; note = 2'-fluoroguanosine-3'-phosphate
  modified_base 12: mod_base = OTHER; note = 2'-O-methyladenosine-3'-phosphate
  modified_base 13: mod_base = OTHER; note = 2'-O-methyluridine-3'-phosphate
  modified_base 14: mod_base = OTHER; note = 2'-O-methyluridine-3'-phosphate
  modified_base 15: mod_base = OTHER; note = 2'-O-methylcytidine-3'-phosphate
  modified_base 16: mod_base = OTHER; note = 2'-O-methyluridine-3'-phosphate
  modified_base 17: mod_base = OTHER; note = 2'-O-methylguanosine-3'-phosphate
  modified_base 18: mod_base = OTHER; note = 2'-O-methylcytidine-3'-phosphate
  modified_base 19: mod_base = OTHER; note = 2'-O-methylcytidine-3'-phosphorothioate
  modified_base 20: mod_base = OTHER; note = 2'-O-methyluridine-3'-phosphorothioate
  modified_base 21: mod_base = OTHER; note = 2'-O-methyladenosine-3'-phosphate
ccaaaattcagattctgccta

SEQ ID NO: 3116 - RNA, 21 nt, synthetic construct
  source 1..21: mol_type = other RNA
  modified_base 1: mod_base = OTHER; note = 2'-O-methyladenosine-3'-phosphorothioate
  modified_base 2: mod_base = OTHER; note = 2'-O-methyladenosine-3'-phosphorothioate
  modified_base 3: mod_base = OTHER; note = 2'-O-methylguanosine-3'-phosphate
  modified_base 4: mod_base = OTHER; note = 2'-O-methylguanosine-3'-phosphate
  modified_base 5: mod_base = OTHER; note = 2'-O-methyladenosine-3'-phosphate
  modified_base 6: mod_base = OTHER; note = 2'-O-methyluridine-3'-phosphate
  modified_base 7: mod_base = OTHER; note = 2'-fluoroguanosine-3'-phosphate
  modified_base 8: mod_base = OTHER; note = 2'-O-methyluridine-3'-phosphate
  modified_base 9: mod_base = OTHER; note = 2'-fluoroguanosine-3'-phosphate
  modified_base 10: mod_base = OTHER; note = 2'-fluorouridine-3'-phosphate
  modified_base 11: mod_base = OTHER; note = 2'-fluoroguanosine-3'-phosphate
  modified_base 12: mod_base = OTHER; note = 2'-O-methyluridine-3'-phosphate
  modified_base 13: mod_base = OTHER; note = 2'-O-methylcytidine-3'-phosphate
  modified_base 14: mod_base = OTHER; note = 2'-O-methyluridine-3'-phosphate
  modified_base 15: mod_base = OTHER; note = 2'-O-methyluridine-3'-phosphate
  modified_base 16: mod_base = OTHER; note = 2'-O-methyluridine-3'-phosphate
  modified_base 17: mod_base = OTHER; note = 2'-O-methylcytidine-3'-phosphate
  modified_base 18: mod_base = OTHER; note = 2'-O-methyluridine-3'-phosphate
  modified_base 19: mod_base = OTHER; note = 2'-O-methylcytidine-3'-phosphorothioate
  modified_base 20: mod_base = OTHER; note = 2'-O-methylcytidine-3'-phosphorothioate
  modified_base 21: mod_base = OTHER; note = 2'-O-methyladenosine-3'-phosphate
aaggatgtgtgtctttctcca

SEQ ID NO: 3117 - RNA, 21 nt, synthetic construct
  source 1..21: mol_type = other RNA
  modified_base 1: mod_base = OTHER; note = 2'-O-methyluridine-3'-phosphorothioate
  modified_base 2: mod_base = OTHER; note = 2'-O-methylguanosine-3'-phosphorothioate
  modified_base 3: mod_base = OTHER; note = 2'-O-methylcytidine-3'-phosphate
  modified_base 4: mod_base = OTHER; note = 2'-O-methylguanosine-3'-phosphate
  modified_base 5: mod_base = OTHER; note = 2'-O-methyladenosine-3'-phosphate
  modified_base 6: mod_base = OTHER; note = 2'-O-methyladenosine-3'-phosphate
  modified_base 7: mod_base = OTHER; note = 2'-fluorouridine-3'-phosphate
  modified_base 8: mod_base = OTHER; note = 2'-O-methylguanosine-3'-phosphate
  modified_base 9: mod_base = OTHER; note = 2'-fluorocytidine-3'-phosphate
  modified_base 10: mod_base = OTHER; note = 2'-fluorouridine-3'-phosphate
  modified_base 11: mod_base = OTHER; note = 2'-fluorouridine-3'-phosphate
  modified_base 12: mod_base = OTHER; note = 2'-O-methylcytidine-3'-phosphate
  modified_base 13: mod_base = OTHER; note = 2'-O-methylcytidine-3'-phosphate
  modified_base 14: mod_base = OTHER; note = 2'-O-methyladenosine-3'-phosphate
  modified_base 15: mod_base = OTHER; note = 2'-O-methylguanosine-3'-phosphate
  modified_base 16: mod_base = OTHER; note = 2'-O-methyladenosine-3'-phosphate
  modified_base 17: mod_base = OTHER; note = 2'-O-methyladenosine-3'-phosphate
  modified_base 18: mod_base = OTHER; note = 2'-O-methylguanosine-3'-phosphate
  modified_base 19: mod_base = OTHER; note = 2'-O-methyladenosine-3'-phosphorothioate
  modified_base 20: mod_base = OTHER; note = 2'-O-methylcytidine-3'-phosphorothioate
  modified_base 21: mod_base = OTHER; note = 2'-O-methyladenosine-3'-phosphate
tgcgaatgcttccagaagaca

SEQ ID NO: 3118 - RNA, 21 nt, synthetic construct
  source 1..21: mol_type = other RNA
  modified_base 1: mod_base = OTHER; note = 2'-O-methylcytidine-3'-phosphorothioate
  modified_base 2: mod_base = OTHER; note = 2'-O-methylguanosine-3'-phosphorothioate
  modified_base 3: mod_base = OTHER; note = 2'-O-methyladenosine-3'-phosphate
  modified_base 4: mod_base = OTHER; note = 2'-O-methyladenosine-3'-phosphate
  modified_base 5: mod_base = OTHER; note = 2'-O-methyluridine-3'-phosphate
  modified_base 6: mod_base = OTHER; note = 2'-O-methylguanosine-3'-phosphate
  modified_base 7: mod_base = OTHER; note = 2'-fluoroadenosine-3'-phosphate
  modified_base 8: mod_base = OTHER; note = 2'-O-methylguanosine-3'-phosphate
  modified_base 9: mod_base = OTHER; note = 2'-fluorouridine-3'-phosphate
  modified_base 10: mod_base = OTHER; note = 2'-fluoroadenosine-3'-phosphate
  modified_base 11: mod_base = OTHER; note = 2'-fluoroadenosine-3'-phosphate
  modified_base 12: mod_base = OTHER; note = 2'-O-methylcytidine-3'-phosphate
  modified_base 13: mod_base = OTHER; note = 2'-O-methyluridine-3'-phosphate
  modified_base 14: mod_base = OTHER; note = 2'-O-methylcytidine-3'-phosphate
  modified_base 15: mod_base = OTHER; note = 2'-O-methylcytidine-3'-phosphate
  modified_base 16: mod_base = OTHER; note = 2'-O-methyluridine-3'-phosphate
  modified_base 17: mod_base = OTHER; note = 2'-O-methylguanosine-3'-phosphate
  modified_base 18: mod_base = OTHER; note = 2'-O-methyluridine-3'-phosphate
  modified_base 19: mod_base = OTHER; note = 2'-O-methylcytidine-3'-phosphorothioate
  modified_base 20: mod_base = OTHER; note = 2'-O-methyladenosine-3'-phosphorothioate
  modified_base 21: mod_base = OTHER; note = 2'-O-methyladenosine-3'-phosphate
cgaatgagtaactcctgtcaa

SEQ ID NO: 3119 - RNA, 21 nt, synthetic construct
  source 1..21: mol_type = other RNA
  modified_base 1: mod_base = OTHER; note = 2'-O-methyluridine-3'-phosphorothioate
  modified_base 2: mod_base = OTHER; note = 2'-O-methylguanosine-3'-phosphorothioate
  modified_base 3: mod_base = OTHER; note = 2'-O-methylguanosine-3'-phosphate
  modified_base 4: mod_base = OTHER; note = 2'-O-methylguanosine-3'-phosphate
  modified_base 5: mod_base = OTHER; note = 2'-O-methyluridine-3'-phosphate
  modified_base 6: mod_base = OTHER; note = 2'-O-methylguanosine-3'-phosphate
  modified_base 7: mod_base = OTHER; note = 2'-fluorouridine-3'-phosphate
  modified_base 8: mod_base = OTHER; note = 2'-O-methyluridine-3'-phosphate
  modified_base 9: mod_base = OTHER; note = 2'-fluorouridine-3'-phosphate
  modified_base 10: mod_base = OTHER; note = 2'-fluoroadenosine-3'-phosphate
  modified_base 11: mod_base = OTHER; note = 2'-fluorouridine-3'-phosphate
  modified_base 12: mod_base = OTHER; note = 2'-O-methyluridine-3'-phosphate
  modified_base 13: mod_base = OTHER; note = 2'-O-methyluridine-3'-phosphate
  modified_base 14: mod_base = OTHER; note = 2'-O-methyladenosine-3'-phosphate
  modified_base 15: mod_base = OTHER; note = 2'-O-methyladenosine-3'-phosphate
  modified_base 16: mod_base = OTHER; note = 2'-O-methyladenosine-3'-phosphate
  modified_base 17: mod_base = OTHER; note = 2'-O-methyladenosine-3'-phosphate
  modified_base 18: mod_base = OTHER; note = 2'-O-methyluridine-3'-phosphate
  modified_base 19: mod_base = OTHER; note = 2'-O-methyladenosine-3'-phosphorothioate
  modified_base 20: mod_base = OTHER; note = 2'-O-methylcytidine-3'-phosphorothioate
  modified_base 21: mod_base = OTHER; note = 2'-O-methyladenosine-3'-phosphate
tgggtgtttatttaaaataca

SEQ ID NO: 3120 - RNA, 21 nt, synthetic construct
  source 1..21: mol_type = other RNA
  modified_base 1: mod_base = OTHER; note = 2'-O-methylcytidine-3'-phosphorothioate
  modified_base 2: mod_base = OTHER; note = 2'-O-methyladenosine-3'-phosphorothioate
  modified_base 3: mod_base = OTHER; note = 2'-O-methyladenosine-3'-phosphate
  modified_base 4: mod_base = OTHER; note = 2'-O-methyladenosine-3'-phosphate
  modified_base 5: mod_base = OTHER; note = 2'-O-methyladenosine-3'-phosphate
  modified_base 6: mod_base = OTHER; note = 2'-O-methylguanosine-3'-phosphate
  modified_base 7: mod_base = OTHER; note = 2'-fluoroadenosine-3'-phosphate
  modified_base 8: mod_base = OTHER; note = 2'-O-methyluridine-3'-phosphate
  modified_base 9: mod_base = OTHER; note = 2'-fluoroadenosine-3'-phosphate
  modified_base 10: mod_base = OTHER; note = 2'-fluorouridine-3'-phosphate
  modified_base 11: mod_base = OTHER; note = 2'-fluorouridine-3'-phosphate
  modified_base 12: mod_base = OTHER; note = 2'-O-methyluridine-3'-phosphate
  modified_base 13: mod_base = OTHER; note = 2'-O-methylguanosine-3'-phosphate
  modified_base 14: mod_base = OTHER; note = 2'-O-methyladenosine-3'-phosphate
  modified_base 15: mod_base = OTHER; note = 2'-O-methylcytidine-3'-phosphate
  modified_base 16: mod_base = OTHER; note = 2'-O-methylcytidine-3'-phosphate
  modified_base 17: mod_base = OTHER; note = 2'-O-methylguanosine-3'-phosphate
  modified_base 18: mod_base = OTHER; note = 2'-O-methyluridine-3'-phosphate
  modified_base 19: mod_base = OTHER; note = 2'-O-methyluridine-3'-phosphorothioate
  modified_base 20: mod_base = OTHER; note = 2'-O-methyluridine-3'-phosphorothioate
  modified_base 21: mod_base = OTHER; note = 2'-O-methyladenosine-3'-phosphate
caaaagatatttgaccgttta

SEQ ID NO: 3121 - RNA, 21 nt, synthetic construct
  source 1..21: mol_type = other RNA
  modified_base 1: mod_base = OTHER; note = 2'-O-methyladenosine-3'-phosphorothioate
  modified_base 2: mod_base = OTHER; note = 2'-O-methyluridine-3'-phosphorothioate
  modified_base 3: mod_base = OTHER; note = 2'-O-methyladenosine-3'-phosphate
  modified_base 4: mod_base = OTHER; note = 2'-O-methylcytidine-3'-phosphate
  modified_base 5: mod_base = OTHER; note = 2'-O-methyladenosine-3'-phosphate
  modified_base 6: mod_base = OTHER; note = 2'-O-methylguanosine-3'-phosphate
  modified_base 7: mod_base = OTHER; note = 2'-fluorocytidine-3'-phosphate
  modified_base 8: mod_base = OTHER; note = 2'-O-methyluridine-3'-phosphate
  modified_base 9: mod_base = OTHER; note = 2'-fluorouridine-3'-phosphate
  modified_base 10: mod_base = OTHER; note = 2'-fluoroguanosine-3'-phosphate
  modified_base 11: mod_base = OTHER; note = 2'-fluoroguanosine-3'-phosphate
  modified_base 12: mod_base = OTHER; note = 2'-O-methyladenosine-3'-phosphate
  modified_base 13: mod_base = OTHER; note = 2'-O-methylguanosine-3'-phosphate
  modified_base 14: mod_base = OTHER; note = 2'-O-methyladenosine-3'-phosphate
  modified_base 15: mod_base = OTHER; note = 2'-O-methylguanosine-3'-phosphate
  modified_base 16: mod_base = OTHER; note = 2'-O-methyladenosine-3'-phosphate
  modified_base 17: mod_base = OTHER; note = 2'-O-methyluridine-3'-phosphate
  modified_base 18: mod_base = OTHER; note = 2'-O-methyluridine-3'-phosphate
  modified_base 19: mod_base = OTHER; note = 2'-O-methyluridine-3'-phosphorothioate
  modified_base 20: mod_base = OTHER; note = 2'-O-methyluridine-3'-phosphorothioate
  modified_base 21: mod_base = OTHER; note = 2'-O-methyladenosine-3'-phosphate
atacagcttggagagatttta

SEQ ID NO: 3122 - RNA, 21 nt, synthetic construct
  source 1..21: mol_type = other RNA
  modified_base 1: mod_base = OTHER; note = 2'-O-methyladenosine-3'-phosphorothioate
  modified_base 2: mod_base = OTHER; note = 2'-O-methyladenosine-3'-phosphorothioate
  modified_base 3: mod_base = OTHER; note = 2'-O-methyladenosine-3'-phosphate
  modified_base 4: mod_base = OTHER; note = 2'-O-methyluridine-3'-phosphate
  modified_base 5: mod_base = OTHER; note = 2'-O-methylguanosine-3'-phosphate
  modified_base 6: mod_base = OTHER; note = 2'-O-methylcytidine-3'-phosphate
  modified_base 7: mod_base = OTHER; note = 2'-fluoroadenosine-3'-phosphate
  modified_base 8: mod_base = OTHER; note = 2'-O-methyluridine-3'-phosphate
  modified_base 9: mod_base = OTHER; note = 2'-fluorouridine-3'-phosphate
  modified_base 10: mod_base = OTHER; note = 2'-fluorocytidine-3'-phosphate
  modified_base 11: mod_base = OTHER; note = 2'-fluoroadenosine-3'-phosphate
  modified_base 12: mod_base = OTHER; note = 2'-O-methyluridine-3'-phosphate
  modified_base 13: mod_base = OTHER; note = 2'-O-methyladenosine-3'-phosphate
  modified_base 14: mod_base = OTHER; note = 2'-O-methylcytidine-3'-phosphate
  modified_base 15: mod_base = OTHER; note = 2'-O-methyladenosine-3'-phosphate
  modified_base 16: mod_base = OTHER; note = 2'-O-methyladenosine-3'-phosphate
  modified_base 17: mod_base = OTHER; note = 2'-O-methyluridine-3'-phosphate
  modified_base 18: mod_base = OTHER; note = 2'-O-methyluridine-3'-phosphate
  modified_base 19: mod_base = OTHER; note = 2'-O-methyladenosine-3'-phosphorothioate
  modified_base 20: mod_base = OTHER; note = 2'-O-methylcytidine-3'-phosphorothioate
  modified_base 21: mod_base = OTHER; note = 2'-O-methyladenosine-3'-phosphate
aaatgcattcatacaattaca

SEQ ID NO: 3123 - RNA, 21 nt, synthetic construct
  source 1..21: mol_type = other RNA
  modified_base 1: mod_base = OTHER; note = 2'-O-methyluridine-3'-phosphorothioate
  modified_base 2: mod_base = OTHER; note = 2'-O-methylcytidine-3'-phosphorothioate
  modified_base 3: mod_base = OTHER; note = 2'-O-methylcytidine-3'-phosphate
  modified_base 4: mod_base = OTHER; note = 2'-O-methylcytidine-3'-phosphate
  modified_base 5: mod_base = OTHER; note = 2'-O-methyladenosine-3'-phosphate
  modified_base 6: mod_base = OTHER; note = 2'-O-methylcytidine-3'-phosphate
  modified_base 7: mod_base = OTHER; note = 2'-fluorouridine-3'-phosphate
  modified_base 8: mod_base = OTHER; note = 2'-O-methylcytidine-3'-phosphate
  modified_base 9: mod_base = OTHER; note = 2'-fluoroguanosine-3'-phosphate
  modified_base 10: mod_base = OTHER; note = 2'-fluorocytidine-3'-phosphate
  modified_base 11: mod_base = OTHER; note = 2'-fluorouridine-3'-phosphate
  modified_base 12: mod_base = OTHER; note = 2'-O-methylcytidine-3'-phosphate
  modified_base 13: mod_base = OTHER; note = 2'-O-methyluridine-3'-phosphate
  modified_base 14: mod_base = OTHER; note = 2'-O-methyluridine-3'-phosphate
  modified_base 15: mod_base = OTHER; note = 2'-O-methyluridine-3'-phosphate
  modified_base 16: mod_base = OTHER; note = 2'-O-methyluridine-3'-phosphate
  modified_base 17: mod_base = OTHER; note = 2'-O-methyluridine-3'-phosphate
  modified_base 18: mod_base = OTHER; note = 2'-O-methylguanosine-3'-phosphate
  modified_base 19: mod_base = OTHER; note = 2'-O-methyladenosine-3'-phosphorothioate
  modified_base 20: mod_base = OTHER; note = 2'-O-methyluridine-3'-phosphorothioate
  modified_base 21: mod_base = OTHER; note = 2'-O-methyladenosine-3'-phosphate
tcccactcgctctttttgata

SEQ ID NO: 3124 - RNA, 21 nt, synthetic construct
  source 1..21: mol_type = other RNA
  modified_base 1: mod_base = OTHER; note = 2'-O-methylguanosine-3'-phosphorothioate
  modified_base 2: mod_base = OTHER; note = 2'-O-methylcytidine-3'-phosphorothioate
  modified_base 3: mod_base = OTHER; note = 2'-O-methyluridine-3'-phosphate
  modified_base 4: mod_base = OTHER; note = 2'-O-methyluridine-3'-phosphate
  modified_base 5: mod_base = OTHER; note = 2'-O-methylguanosine-3'-phosphate
  modified_base 6: mod_base = OTHER; note = 2'-O-methyluridine-3'-phosphate
  modified_base 7: mod_base = OTHER; note = 2'-fluoroguanosine-3'-phosphate
  modified_base 8: mod_base = OTHER; note = 2'-O-methyluridine-3'-phosphate
  modified_base 9: mod_base = OTHER; note = 2'-fluorouridine-3'-phosphate
  modified_base 10: mod_base = OTHER; note = 2'-fluorouridine-3'-phosphate
  modified_base 11: mod_base = OTHER; note = 2'-fluoroadenosine-3'-phosphate
  modified_base 12: mod_base = OTHER; note = 2'-O-methylcytidine-3'-phosphate
  modified_base 13: mod_base = OTHER; note = 2'-O-methyladenosine-3'-phosphate
  modified_base 14: mod_base = OTHER; note = 2'-O-methylcytidine-3'-phosphate
  modified_base 15: mod_base = OTHER; note = 2'-O-methyladenosine-3'-phosphate
  modified_base 16: mod_base = OTHER; note = 2'-O-methyladenosine-3'-phosphate
  modified_base 17: mod_base = OTHER; note = 2'-O-methylguanosine-3'-phosphate
  modified_base 18: mod_base = OTHER; note = 2'-O-methylcytidine-3'-phosphate
  modified_base 19: mod_base = OTHER; note = 2'-O-methyluridine-3'-phosphorothioate
  modified_base 20: mod_base = OTHER; note = 2'-O-methylguanosine-3'-phosphorothioate
  modified_base 21: mod_base = OTHER; note = 2'-O-methyladenosine-3'-phosphate
gcttgtgtttacacaagctga

SEQ ID NO: 3125 - RNA, 21 nt, synthetic construct
  source 1..21: mol_type = other RNA
  modified_base 1: mod_base = OTHER; note = 2'-O-methylcytidine-3'-phosphorothioate
  modified_base 2: mod_base = OTHER; note = 2'-O-methylcytidine-3'-phosphorothioate
  modified_base 3: mod_base = OTHER; note = 2'-O-methyluridine-3'-phosphate
  modified_base 4: mod_base = OTHER; note = 2'-O-methylguanosine-3'-phosphate
  modified_base 5: mod_base = OTHER; note = 2'-O-methylcytidine-3'-phosphate
  modified_base 6: mod_base = OTHER; note = 2'-O-methylcytidine-3'-phosphate
  modified_base 7: mod_base = OTHER; note = 2'-fluorouridine-3'-phosphate
  modified_base 8: mod_base = OTHER; note = 2'-O-methyluridine-3'-phosphate
  modified_base 9: mod_base = OTHER; note = 2'-fluoroadenosine-3'-phosphate
  modified_base 10: mod_base = OTHER; note = 2'-fluorocytidine-3'-phosphate
  modified_base 11: mod_base = OTHER; note = 2'-fluoroadenosine-3'-phosphate
  modified_base 12: mod_base = OTHER; note = 2'-O-methyluridine-3'-phosphate
  modified_base 13: mod_base = OTHER; note = 2'-O-methylguanosine-3'-phosphate
  modified_base 14: mod_base = OTHER; note = 2'-O-methylguanosine-3'-phosphate
  modified_base 15: mod_base = OTHER; note = 2'-O-methylcytidine-3'-phosphate
  modified_base 16: mod_base = OTHER; note = 2'-O-methyluridine-3'-phosphate
  modified_base 17: mod_base = OTHER; note = 2'-O-methyluridine-3'-phosphate
  modified_base 18: mod_base = OTHER; note = 2'-O-methylguanosine-3'-phosphate
  modified_base 19: mod_base = OTHER; note = 2'-O-methyluridine-3'-phosphorothioate
  modified_base 20: mod_base = OTHER; note = 2'-O-methyluridine-3'-phosphorothioate
  modified_base 21: mod_base = OTHER; note = 2'-O-methyladenosine-3'-phosphate
cctgccttacatggcttgtta

SEQ ID NO: 3126 - RNA, 21 nt, synthetic construct
  source 1..21: mol_type = other RNA
  modified_base 1: mod_base = OTHER; note = 2'-O-methylguanosine-3'-phosphorothioate
  modified_base 2: mod_base = OTHER; note = 2'-O-methyladenosine-3'-phosphorothioate
  modified_base 3: mod_base = OTHER; note = 2'-O-methylguanosine-3'-phosphate
  modified_base 4: mod_base = OTHER; note = 2'-O-methyladenosine-3'-phosphate
  modified_base 5: mod_base = OTHER; note = 2'-O-methyluridine-3'-phosphate
  modified_base 6: mod_base = OTHER; note = 2'-O-methyluridine-3'-phosphate
  modified_base 7: mod_base = OTHER; note = 2'-fluorouridine-3'-phosphate
  modified_base 8: mod_base = OTHER; note = 2'-O-methyluridine-3'-phosphate
  modified_base 9: mod_base = OTHER; note = 2'-fluorouridine-3'-phosphate
  modified_base 10: mod_base = OTHER; note = 2'-fluoroguanosine-3'-phosphate
  modified_base 11: mod_base = OTHER; note = 2'-fluorouridine-3'-phosphate
  modified_base 12: mod_base = OTHER; note = 2'-O-methyladenosine-3'-phosphate
  modified_base 13: mod_base = OTHER; note = 2'-O-methyluridine-3'-phosphate
  modified_base 14: mod_base = OTHER; note = 2'-O-methylcytidine-3'-phosphate
  modified_base 15: mod_base = OTHER; note = 2'-O-methyladenosine-3'-phosphate
  modified_base 16: mod_base = OTHER; note = 2'-O-methylcytidine-3'-phosphate
  modified_base 17: mod_base = OTHER; note = 2'-O-methyladenosine-3'-phosphate
  modified_base 18: mod_base = OTHER; note = 2'-O-methyluridine-3'-phosphate
  modified_base 19: mod_base = OTHER; note = 2'-O-methyluridine-3'-phosphorothioate
  modified_base 20: mod_base = OTHER; note = 2'-O-methyladenosine-3'-phosphorothioate
  modified_base 21: mod_base = OTHER; note = 2'-O-methyladenosine-3'-phosphate
gagatttttgtatcacattaa

SEQ ID NO: 3127 - RNA, 21 nt, synthetic construct
  source 1..21: mol_type = other RNA
  modified_base 1: mod_base = OTHER; note = 2'-O-methyladenosine-3'-phosphorothioate
  modified_base 2: mod_base = OTHER; note = 2'-O-methylguanosine-3'-phosphorothioate
  modified_base 3: mod_base = OTHER; note = 2'-O-methylcytidine-3'-phosphate
  modified_base 4: mod_base = OTHER; note = 2'-O-methyladenosine-3'-phosphate
  modified_base 5: mod_base = OTHER; note = 2'-O-methylcytidine-3'-phosphate
  modified_base 6: mod_base = OTHER; note = 2'-O-methyluridine-3'-phosphate
  modified_base 7: mod_base = OTHER; note = 2'-fluorouridine-3'-phosphate
  modified_base 8: mod_base = OTHER; note = 2'-O-methylcytidine-3'-phosphate
  modified_base 9: mod_base = OTHER; note = 2'-fluoroadenosine-3'-phosphate
  modified_base 10: mod_base = OTHER; note = 2'-fluoroguanosine-3'-phosphate
  modified_base 11: mod_base = OTHER; note = 2'-fluoroadenosine-3'-phosphate
  modified_base 12: mod_base = OTHER; note = 2'-O-methylcytidine-3'-phosphate
  modified_base 13: mod_base = OTHER; note = 2'-O-methyladenosine-3'-phosphate
  modified_base 14: mod_base = OTHER; note = 2'-O-methyladenosine-3'-phosphate
  modified_base 15: mod_base = OTHER; note = 2'-O-methylguanosine-3'-phosphate
  modified_base 16: mod_base = OTHER; note = 2'-O-methylguanosine-3'-phosphate
  modified_base 17: mod_base = OTHER; note = 2'-O-methyluridine-3'-phosphate
  modified_base 18: mod_base = OTHER; note = 2'-O-methylcytidine-3'-phosphate
  modified_base 19: mod_base = OTHER; note = 2'-O-methylcytidine-3'-phosphorothioate
  modified_base 20: mod_base = OTHER; note = 2'-O-methyluridine-3'-phosphorothioate
  modified_base 21: mod_base = OTHER; note = 2'-O-methyladenosine-3'-phosphate
agcacttcagacaaggtccta

SEQ ID NO: 3128 - RNA, 21 nt, synthetic construct
  source 1..21: mol_type = other RNA
  modified_base 1: mod_base = OTHER; note = 2'-O-methyluridine-3'-phosphorothioate
  modified_base 2: mod_base = OTHER; note = 2'-O-methylcytidine-3'-phosphorothioate
  modified_base 3: mod_base = OTHER; note = 2'-O-methyladenosine-3'-phosphate
  modified_base 4: mod_base = OTHER; note = 2'-O-methylcytidine-3'-phosphate
  modified_base 5: mod_base = OTHER; note = 2'-O-methyluridine-3'-phosphate
  modified_base 6: mod_base = OTHER; note = 2'-O-methylcytidine-3'-phosphate
  modified_base 7: mod_base = OTHER; note = 2'-fluorouridine-3'-phosphate
  modified_base 8: mod_base = OTHER; note = 2'-O-methylcytidine-3'-phosphate
  modified_base 9: mod_base = OTHER; note = 2'-fluoroadenosine-3'-phosphate
  modified_base 10: mod_base = OTHER; note = 2'-fluoroguanosine-3'-phosphate
  modified_base 11: mod_base = OTHER; note = 2'-fluoroadenosine-3'-phosphate
  modified_base 12: mod_base = OTHER; note = 2'-O-methylguanosine-3'-phosphate
  modified_base 13: mod_base = OTHER; note = 2'-O-methylcytidine-3'-phosphate
  modified_base 14: mod_base = OTHER; note = 2'-O-methylcytidine-3'-phosphate
  modified_base 15: mod_base = OTHER; note = 2'-O-methyladenosine-3'-phosphate
  modified_base 16: mod_base = OTHER; note = 2'-O-methylguanosine-3'-phosphate
  modified_base 17: mod_base = OTHER; note = 2'-O-methyluridine-3'-phosphate
  modified_base 18: mod_base = OTHER; note = 2'-O-methyluridine-3'-phosphate
  modified_base 19: mod_base = OTHER; note = 2'-O-methyluridine-3'-phosphorothioate
  modified_base 20: mod_base = OTHER; note = 2'-O-methyluridine-3'-phosphorothioate
  modified_base 21: mod_base = OTHER; note = 2'-O-methyladenosine-3'-phosphate
tcactctcagagccagtttta

SEQ ID NO: 3129 - RNA, 21 nt, synthetic construct
  source 1..21: mol_type = other RNA
  modified_base 1: mod_base = OTHER; note = 2'-O-methyladenosine-3'-phosphorothioate
  modified_base 2: mod_base = OTHER; note = 2'-O-methylcytidine-3'-phosphorothioate
  modified_base 3: mod_base = OTHER; note = 2'-O-methyluridine-3'-phosphate
  modified_base 4: mod_base = OTHER; note = 2'-O-methylguanosine-3'-phosphate
  modified_base 5: mod_base = OTHER; note = 2'-O-methyladenosine-3'-phosphate
  modified_base 6: mod_base = OTHER; note = 2'-O-methyladenosine-3'-phosphate
  modified_base 7: mod_base = OTHER; note = 2'-fluorocytidine-3'-phosphate
  modified_base 8: mod_base = OTHER; note = 2'-O-methyluridine-3'-phosphate
  modified_base 9: mod_base = OTHER; note = 2'-fluorocytidine-3'-phosphate
  modified_base 10: mod_base = OTHER; note = 2'-fluorocytidine-3'-phosphate
  modified_base 11: mod_base = OTHER; note = 2'-fluorouridine-3'-phosphate
  modified_base 12: mod_base = OTHER; note = 2'-O-methylcytidine-3'-phosphate
  modified_base 13: mod_base = OTHER; note = 2'-O-methyluridine-3'-phosphate
  modified_base 14: mod_base = OTHER; note = 2'-O-methylguanosine-3'-phosphate
  modified_base 15: mod_base = OTHER; note = 2'-O-methyluridine-3'-phosphate
  modified_base 16: mod_base = OTHER; note = 2'-O-methylguanosine-3'-phosphate
  modified_base 17: mod_base = OTHER; note = 2'-O-methyladenosine-3'-phosphate
  modified_base 18: mod_base = OTHER; note = 2'-O-methyluridine-3'-phosphate
  modified_base 19: mod_base = OTHER; note = 2'-O-methylcytidine-3'-phosphorothioate
  modified_base 20: mod_base = OTHER; note = 2'-O-methyluridine-3'-phosphorothioate
  modified_base 21: mod_base = OTHER; note = 2'-O-methyladenosine-3'-phosphate
actgaactcctctgtgatcta

SEQ ID NO: 3130 - RNA, 21 nt, synthetic construct
  source 1..21: mol_type = other RNA
  modified_base 1: mod_base = OTHER; note = 2'-O-methyluridine-3'-phosphorothioate
  modified_base 2: mod_base = OTHER; note = 2'-O-methyladenosine-3'-phosphorothioate
  modified_base 3: mod_base = OTHER; note = 2'-O-methylguanosine-3'-phosphate
  modified_base 4: mod_base = OTHER; note = 2'-O-methyluridine-3'-phosphate
  modified_base 5: mod_base = OTHER; note = 2'-O-methyluridine-3'-phosphate
  modified_base 6: mod_base = OTHER; note = 2'-O-methylcytidine-3'-phosphate
  modified_base 7: mod_base = OTHER; note = 2'-fluorocytidine-3'-phosphate
  modified_base 8: mod_base = OTHER; note = 2'-O-methylcytidine-3'-phosphate
  modified_base 9: mod_base = OTHER; note = 2'-fluorouridine-3'-phosphate
  modified_base 10: mod_base = OTHER; note = 2'-fluoroadenosine-3'-phosphate
  modified_base 11: mod_base = OTHER; note = 2'-fluoroadenosine-3'-phosphate
  modified_base 12: mod_base = OTHER; note = 2'-O-methyluridine-3'-phosphate
  modified_base 13: mod_base = OTHER; note = 2'-O-methylguanosine-3'-phosphate
  modified_base 14: mod_base = OTHER; note = 2'-O-methyladenosine-3'-phosphate
  modified_base 15: mod_base = OTHER; note = 2'-O-methyluridine-3'-phosphate
  modified_base 16: mod_base = OTHER; note = 2'-O-methylguanosine-3'-phosphate
  modified_base 17: mod_base = OTHER; note = 2'-O-methylguanosine-3'-phosphate
  modified_base 18: mod_base = OTHER; note = 2'-O-methyladenosine-3'-phosphate
  modified_base 19: mod_base = OTHER; note = 2'-O-methylcytidine-3'-phosphorothioate
  modified_base 20: mod_base = OTHER; note = 2'-O-methyluridine-3'-phosphorothioate
  modified_base 21: mod_base = OTHER; note = 2'-O-methyladenosine-3'-phosphate
tagttccctaatgatggacta

SEQ ID NO: 3131 - RNA, 21 nt, synthetic construct
  source 1..21: mol_type = other RNA
  modified_base 1: mod_base = OTHER; note = 2'-O-methylguanosine-3'-phosphorothioate
  modified_base 2: mod_base = OTHER; note = 2'-O-methylguanosine-3'-phosphorothioate
  modified_base 3: mod_base = OTHER; note = 2'-O-methylcytidine-3'-phosphate
  modified_base 4: mod_base = OTHER; note = 2'-O-methylguanosine-3'-phosphate
  modified_base 5: mod_base = OTHER; note = 2'-O-methyluridine-3'-phosphate
  modified_base 6: mod_base = OTHER; note = 2'-O-methyluridine-3'-phosphate
  modified_base 7: mod_base = OTHER; note = 2'-fluoroadenosine-3'-phosphate
  modified_base 8: mod_base = OTHER; note = 2'-O-methylcytidine-3'-phosphate
  modified_base 9: mod_base = OTHER; note = 2'-fluorouridine-3'-phosphate
  modified_base 10: mod_base = OTHER; note = 2'-fluoroguanosine-3'-phosphate
  modified_base 11: mod_base = OTHER; note = 2'-fluoroadenosine-3'-phosphate
  modified_base 12: mod_base = OTHER; note = 2'-O-methylcytidine-3'-phosphate
  modified_base 13: mod_base = OTHER; note = 2'-O-methyladenosine-3'-phosphate
  modified_base 14: mod_base = OTHER; note = 2'-O-methyladenosine-3'-phosphate
  modified_base 15: mod_base = OTHER; note = 2'-O-methylcytidine-3'-phosphate
  modified_base 16: mod_base = OTHER; note = 2'-O-methylguanosine-3'-phosphate
  modified_base 17: mod_base = OTHER; note = 2'-O-methyluridine-3'-phosphate
  modified_base 18: mod_base = OTHER; note = 2'-O-methylguanosine-3'-phosphate
  modified_base 19: mod_base = OTHER; note = 2'-O-methylguanosine-3'-phosphorothioate
  modified_base 20: mod_base = OTHER; note = 2'-O-methyluridine-3'-phosphorothioate
  modified_base 21: mod_base = OTHER; note = 2'-O-methyladenosine-3'-phosphate
ggcgttactgacaacgtggta

SEQ ID NO: 3132 - RNA, 21 nt, synthetic construct
  source 1..21: mol_type = other RNA
  modified_base 1: mod_base = OTHER; note = 2'-O-methyluridine-3'-phosphorothioate
  modified_base 2: mod_base = OTHER; note = 2'-O-methylguanosine-3'-phosphorothioate
  modified_base 3: mod_base = OTHER; note = 2'-O-methyladenosine-3'-phosphate
  modified_base 4: mod_base = OTHER; note = 2'-O-methyluridine-3'-phosphate
  modified_base 5: mod_base = OTHER; note = 2'-O-methylcytidine-3'-phosphate
  modified_base 6: mod_base = OTHER; note = 2'-O-methyluridine-3'-phosphate
  modified_base 7: mod_base = OTHER; note = 2'-fluoroadenosine-3'-phosphate
  modified_base 8: mod_base = OTHER; note = 2'-O-methylguanosine-3'-phosphate
  modified_base 9: mod_base = OTHER; note = 2'-fluoroguanosine-3'-phosphate
  modified_base 10: mod_base = OTHER; note = 2'-fluoroadenosine-3'-phosphate
  modified_base 11: mod_base = OTHER; note = 2'-fluorouridine-3'-phosphate
  modified_base 12: mod_base = OTHER; note = 2'-O-methylguanosine-3'-phosphate
  modified_base 13: mod_base = OTHER; note = 2'-O-methyladenosine-3'-phosphate
  modified_base 14: mod_base = OTHER; note = 2'-O-methyluridine-3'-phosphate
  modified_base 15: mod_base = OTHER; note = 2'-O-methylcytidine-3'-phosphate
  modified_base 16: mod_base = OTHER; note = 2'-O-methyluridine-3'-phosphate
  modified_base 17: mod_base = OTHER; note = 2'-O-methylguanosine-3'-phosphate
  modified_base 18: mod_base = OTHER; note = 2'-O-methyluridine-3'-phosphate
  modified_base 19: mod_base = OTHER; note = 2'-O-methyluridine-3'-phosphorothioate
  modified_base 20: mod_base = OTHER; note = 2'-O-methylcytidine-3'-phosphorothioate
  modified_base 21: mod_base = OTHER; note = 2'-O-methyladenosine-3'-phosphate
tgatctaggatgatctgttca

SEQ ID NO: 3133 - RNA, 21 nt, synthetic construct
  source 1..21: mol_type = other RNA
  modified_base 1: mod_base = OTHER; note = 2'-O-methylguanosine-3'-phosphorothioate
  modified_base 2: mod_base = OTHER; note = 2'-O-methyluridine-3'-phosphorothioate
  modified_base 3: mod_base = OTHER; note = 2'-O-methylguanosine-3'-phosphate
  modified_base 4: mod_base = OTHER; note = 2'-O-methyladenosine-3'-phosphate
  modified_base 5: mod_base = OTHER; note = 2'-O-methyluridine-3'-phosphate
  modified_base 6: mod_base = OTHER; note = 2'-O-methylguanosine-3'-phosphate
  modified_base 7: mod_base = OTHER; note = 2'-fluoroadenosine-3'-phosphate
  modified_base 8: mod_base = OTHER; note = 2'-O-methyluridine-3'-phosphate
  modified_base 9: mod_base = OTHER; note = 2'-fluoroadenosine-3'-phosphate
  modified_base 10: mod_base = OTHER; note = 2'-fluorouridine-3'-phosphate
  modified_base 11: mod_base = OTHER; note = 2'-fluoroadenosine-3'-phosphate
  modified_base 12: mod_base = OTHER; note = 2'-O-methyluridine-3'-phosphate
  modified_base 13: mod_base = OTHER; note = 2'-O-methyladenosine-3'-phosphate
  modified_base 14: mod_base = OTHER; note = 2'-O-methylguanosine-3'-phosphate
  modified_base 15: mod_base = OTHER; note = 2'-O-methyladenosine-3'-phosphate
  modified_base 16: mod_base = OTHER; note = 2'-O-methylcytidine-3'-phosphate
  modified_base 17: mod_base = OTHER; note = 2'-O-methyluridine-3'-phosphate
  modified_base 18: mod_base = OTHER; note = 2'-O-methyluridine-3'-phosphate
  modified_base 19: mod_base = OTHER; note = 2'-O-methyluridine-3'-phosphorothioate
  modified_base 20: mod_base = OTHER; note = 2'-O-methyladenosine-3'-phosphorothioate
  modified_base 21: mod_base = OTHER; note = 2'-O-methyladenosine-3'-phosphate
gtgatgatatatagactttaa

SEQ ID NO: 3134 - RNA, 21 nt, synthetic construct
  source 1..21: mol_type = other RNA
  modified_base 1: mod_base = OTHER; note = 2'-O-methylguanosine-3'-phosphorothioate
  modified_base 2: mod_base = OTHER; note = 2'-O-methylguanosine-3'-phosphorothioate
  modified_base 3: mod_base = OTHER; note = 2'-O-methylcytidine-3'-phosphate
  modified_base 4: mod_base = OTHER; note = 2'-O-methyluridine-3'-phosphate
  modified_base 5: mod_base = OTHER; note = 2'-O-methyladenosine-3'-phosphate
  modified_base 6: mod_base = OTHER; note = 2'-O-methylcytidine-3'-phosphate
  modified_base 7: mod_base = OTHER; note = 2'-fluorouridine-3'-phosphate
  modified_base 8: mod_base = OTHER; note = 2'-O-methyluridine-3'-phosphate
  modified_base 9: mod_base = OTHER; note = 2'-fluorouridine-3'-phosphate
  modified_base 10: mod_base = OTHER; note = 2'-fluoroguanosine-3'-phosphate
  modified_base 11: mod_base = OTHER; note = 2'-fluoroadenosine-3'-phosphate
  modified_base 12: mod_base = OTHER; note = 2'-O-methyladenosine-3'-phosphate
  modified_base 13: mod_base = OTHER; note = 2'-O-methylguanosine-3'-phosphate
  modified_base 14: mod_base = OTHER; note = 2'-O-methylguanosine-3'-phosphate
  modified_base 15: mod_base = OTHER; note = 2'-O-methylguanosine-3'-phosphate
  modified_base 16: mod_base = OTHER; note = 2'-O-methyladenosine-3'-phosphate
  modified_base 17: mod_base = OTHER; note = 2'-O-methyladenosine-3'-phosphate
  modified_base 18: mod_base = OTHER; note = 2'-O-methylcytidine-3'-phosphate
  modified_base 19: mod_base = OTHER; note = 2'-O-methyladenosine-3'-phosphorothioate
  modified_base 20: mod_base = OTHER; note = 2'-O-methyladenosine-3'-phosphorothioate
  modified_base 21: mod_base = OTHER; note = 2'-O-methyladenosine-3'-phosphate
ggctactttgaagggaacaaa

SEQ ID NO: 3135 - RNA, 21 nt, synthetic construct
  source 1..21: mol_type = other RNA
  modified_base 1: mod_base = OTHER; note = 2'-O-methylcytidine-3'-phosphorothioate
  modified_base 2: mod_base = OTHER; note = 2'-O-methyluridine-3'-phosphorothioate
  modified_base 3: mod_base = OTHER; note = 2'-O-methylguanosine-3'-phosphate
  modified_base 4: mod_base = OTHER; note = 2'-O-methylcytidine-3'-phosphate
  modified_base 5: mod_base = OTHER; note = 2'-O-methyluridine-3'-phosphate
  modified_base 6: mod_base = OTHER; note = 2'-O-methylcytidine-3'-phosphate
  modified_base 7: mod_base = OTHER; note = 2'-fluorouridine-3'-phosphate
  modified_base 8: mod_base = OTHER; note = 2'-O-methylguanosine-3'-phosphate
  modified_base 9: mod_base = OTHER; note = 2'-fluoroadenosine-3'-phosphate
  modified_base 10: mod_base = OTHER; note = 2'-fluorouridine-3'-phosphate
  modified_base 11: mod_base = OTHER; note = 2'-fluorouridine-3'-phosphate
  modified_base 12: mod_base = OTHER; note = 2'-O-methylcytidine-3'-phosphate
  modified_base 13: mod_base = OTHER; note = 2'-O-methyluridine-3'-phosphate
  modified_base 14: mod_base = OTHER; note = 2'-O-methyladenosine-3'-phosphate
  modified_base 15: mod_base = OTHER; note = 2'-O-methyluridine-3'-phosphate
  modified_base 16: mod_base = OTHER; note = 2'-O-methylguanosine-3'-phosphate
  modified_base 17: mod_base = OTHER; note = 2'-O-methylguanosine-3'-phosphate
  modified_base 18: mod_base = OTHER; note = 2'-O-methylcytidine-3'-phosphate
  modified_base 19: mod_base = OTHER; note = 2'-O-methyluridine-3'-phosphorothioate
  modified_base 20: mod_base = OTHER; note = 2'-O-methyluridine-3'-phosphorothioate
  modified_base 21: mod_base = OTHER; note = 2'-O-methyladenosine-3'-phosphate
ctgctctgattctatggctta

SEQ ID NO: 3136 - RNA, 21 nt, synthetic construct
  source 1..21: mol_type = other RNA
  modified_base 1: mod_base = OTHER; note = 2'-O-methyladenosine-3'-phosphorothioate
  modified_base 2: mod_base = OTHER; note = 2'-O-methylguanosine-3'-phosphorothioate
  modified_base 3: mod_base = OTHER; note = 2'-O-methyladenosine-3'-phosphate
  modified_base 4: mod_base = OTHER; note = 2'-O-methyluridine-3'-phosphate
  modified_base 5: mod_base = OTHER; note = 2'-O-methyluridine-3'-phosphate
  modified_base 6: mod_base = OTHER; note = 2'-O-methylguanosine-3'-phosphate
  modified_base 7: mod_base = OTHER; note = 2'-fluorocytidine-3'-phosphate
  modified_base 8: mod_base = OTHER; note = 2'-O-methyluridine-3'-phosphate
  modified_base 9: mod_base = OTHER; note = 2'-fluorouridine-3'-phosphate
  modified_base 10: mod_base = OTHER; note = 2'-fluorocytidine-3'-phosphate
  modified_base 11: mod_base = OTHER; note = 2'-fluorouridine-3'-phosphate
  modified_base 12: mod_base = OTHER; note = 2'-O-methylguanosine-3'-phosphate
  modified_base 13: mod_base = OTHER; note = 2'-O-methyladenosine-3'-phosphate
  modified_base 14: mod_base = OTHER; note = 2'-O-methylguanosine-3'-phosphate
  modified_base 15: mod_base = OTHER; note = 2'-O-methylcytidine-3'-phosphate
  modified_base 16: mod_base = OTHER; note = 2'-O-methyluridine-3'-phosphate
  modified_base 17: mod_base = OTHER; note = 2'-O-methylguanosine-3'-phosphate
  modified_base 18: mod_base = OTHER; note = 2'-O-methyladenosine-3'-phosphate
  modified_base 19: mod_base = OTHER; note = 2'-O-methyladenosine-3'-phosphorothioate
  modified_base 20: mod_base = OTHER; note = 2'-O-methylguanosine-3'-phosphorothioate
  modified_base 21: mod_base = OTHER; note = 2'-O-methyladenosine-3'-phosphate
agattgcttctgagctgaaga

SEQ ID NO: 3137 - RNA, 21 nt, synthetic construct
  source 1..21: mol_type = other RNA
  modified_base 1: mod_base = OTHER; note = 2'-O-methylguanosine-3'-phosphorothioate
  modified_base 2: mod_base = OTHER; note = 2'-O-methylcytidine-3'-phosphorothioate
  modified_base 3: mod_base = OTHER; note = 2'-O-methylcytidine-3'-phosphate
  modified_base 4: mod_base = OTHER; note = 2'-O-methyladenosine-3'-phosphate
  modified_base 5: mod_base = OTHER; note = 2'-O-methyluridine-3'-phosphate
  modified_base 6: mod_base = OTHER; note = 2'-O-methylcytidine-3'-phosphate
  modified_base 7: mod_base = OTHER; note = 2'-fluorouridine-3'-phosphate
  modified_base 8: mod_base = OTHER; note = 2'-O-methylcytidine-3'-phosphate
  modified_base 9: mod_base = OTHER; note = 2'-fluorouridine-3'-phosphate
  modified_base 10: mod_base = OTHER; note = 2'-fluorouridine-3'-phosphate
  modified_base 11: mod_base = OTHER; note = 2'-fluoroguanosine-3'-phosphate
  modified_base 12: mod_base = OTHER; note = 2'-O-methyluridine-3'-phosphate
  modified_base 13: mod_base = OTHER; note = 2'-O-methylguanosine-3'-phosphate
  modified_base 14: mod_base = OTHER; note = 2'-O-methyluridine-3'-phosphate
  modified_base 15: mod_base = OTHER; note = 2'-O-methyladenosine-3'-phosphate
  modified_base 16: mod_base = OTHER; note = 2'-O-methyluridine-3'-phosphate
  modified_base 17: mod_base = OTHER; note = 2'-O-methylguanosine-3'-phosphate
  modified_base 18: mod_base = OTHER; note = 2'-O-methylcytidine-3'-phosphate
  modified_base 19: mod_base = OTHER; note = 2'-O-methyladenosine-3'-phosphorothioate
  modified_base 20: mod_base = OTHER; note = 2'-O-methylguanosine-3'-phosphorothioate
  modified_base 21: mod_base = OTHER; note = 2'-O-methyladenosine-3'-phosphate
gccatctcttgtgtatgcaga

SEQ ID NO: 3138 - RNA, 21 nt, synthetic construct
  source 1..21: mol_type = other RNA
  modified_base 1: mod_base = OTHER; note = 2'-O-methyladenosine-3'-phosphorothioate
  modified_base 2: mod_base = OTHER; note = 2'-O-methylguanosine-3'-phosphorothioate
  modified_base 3: mod_base = OTHER; note = 2'-O-methylcytidine-3'-phosphate
  modified_base 4: mod_base = OTHER; note = 2'-O-methylcytidine-3'-phosphate
  modified_base 5: mod_base = OTHER; note = 2'-O-methyladenosine-3'-phosphate
  modified_base 6: mod_base = OTHER; note = 2'-O-methylcytidine-3'-phosphate
  modified_base 7: mod_base = OTHER; note = 2'-fluoroadenosine-3'-phosphate
  modified_base 8: mod_base = OTHER; note = 2'-O-methyluridine-3'-phosphate
  modified_base 9: mod_base = OTHER; note = 2'-fluorouridine-3'-phosphate
  modified_base 10: mod_base = OTHER; note = 2'-fluorouridine-3'-phosphate
  modified_base 11: mod_base = OTHER; note = 2'-fluorocytidine-3'-phosphate
  modified_base 12: mod_base = OTHER; note = 2'-O-methylcytidine-3'-phosphate
  modified_base 13: mod_base = OTHER; note = 2'-O-methyladenosine-3'-phosphate
  modified_base 14: mod_base = OTHER; note = 2'-O-methyluridine-3'-phosphate
  modified_base 15: mod_base = OTHER; note = 2'-O-methyluridine-3'-phosphate
  modified_base 16: mod_base = OTHER; note = 2'-O-methyluridine-3'-phosphate
  modified_base 17: mod_base = OTHER; note = 2'-O-methylguanosine-3'-phosphate
  modified_base 18: mod_base = OTHER; note = 2'-O-methylcytidine-3'-phosphate
  modified_base 19: mod_base = OTHER; note = 2'-O-methyladenosine-3'-phosphorothioate
  modified_base 20: mod_base = OTHER; note = 2'-O-methyluridine-3'-phosphorothioate
  modified_base 21: mod_base = OTHER; note = 2'-O-methyladenosine-3'-phosphate
agccacatttccatttgcata

SEQ ID NO: 3139 - RNA, 21 nt, synthetic construct
  source 1..21: mol_type = other RNA
  modified_base 1: mod_base = OTHER; note = 2'-O-methyluridine-3'-phosphorothioate
  modified_base 2: mod_base = OTHER; note = 2'-O-methylcytidine-3'-phosphorothioate
  modified_base 3: mod_base = OTHER; note = 2'-O-methylcytidine-3'-phosphate
  modified_base 4: mod_base = OTHER; note = 2'-O-methyladenosine-3'-phosphate
  modified_base 5: mod_base = OTHER; note = 2'-O-methylguanosine-3'-phosphate
  modified_base 6: mod_base = OTHER; note = 2'-O-methyladenosine-3'-phosphate
  modified_base 7: mod_base = OTHER; note = 2'-fluorocytidine-3'-phosphate
  modified_base 8: mod_base = OTHER; note = 2'-O-methyladenosine-3'-phosphate
  modified_base 9: mod_base = OTHER; note = 2'-fluoroguanosine-3'-phosphate
  modified_base 10: mod_base = OTHER; note = 2'-fluoroadenosine-3'-phosphate
  modified_base 11: mod_base = OTHER; note = 2'-fluoroadenosine-3'-phosphate
  modified_base 12: mod_base = OTHER; note = 2'-O-methylguanosine-3'-phosphate
  modified_base 13: mod_base = OTHER; note = 2'-O-methylguanosine-3'-phosphate
  modified_base 14: mod_base = OTHER; note = 2'-O-methyluridine-3'-phosphate
  modified_base 15: mod_base = OTHER; note = 2'-O-methyluridine-3'-phosphate
  modified_base 16: mod_base = OTHER; note = 2'-O-methyluridine-3'-phosphate
  modified_base 17: mod_base = OTHER; note = 2'-O-methyluridine-3'-phosphate
  modified_base 18: mod_base = OTHER; note = 2'-O-methylguanosine-3'-phosphate
  modified_base 19: mod_base = OTHER; note = 2'-O-methyladenosine-3'-phosphorothioate
  modified_base 20: mod_base = OTHER; note = 2'-O-methylcytidine-3'-phosphorothioate
  modified_base 21: mod_base = OTHER; note = 2'-O-methyladenosine-3'-phosphate
tccagacagaaggttttgaca

SEQ ID NO: 3140 - RNA, 21 nt, synthetic construct
  source 1..21: mol_type = other RNA
  modified_base 1: mod_base = OTHER; note = 2'-O-methylcytidine-3'-phosphorothioate
  modified_base 2: mod_base = OTHER; note = 2'-O-methyluridine-3'-phosphorothioate
  modified_base 3: mod_base = OTHER; note = 2'-O-methylcytidine-3'-phosphate
  modified_base 4: mod_base = OTHER; note = 2'-O-methyluridine-3'-phosphate
  modified_base 5: mod_base = OTHER; note = 2'-O-methylcytidine-3'-phosphate
  modified_base 6: mod_base = OTHER; note = 2'-O-methylguanosine-3'-phosphate
  modified_base 7: mod_base = OTHER; note = 2'-fluoroadenosine-3'-phosphate
  modified_base 8: mod_base = OTHER; note = 2'-O-methyluridine-3'-phosphate
  modified_base 9: mod_base = OTHER; note = 2'-fluoroadenosine-3'-phosphate
  modified_base 10: mod_base = OTHER; note = 2'-fluorocytidine-3'-phosphate
  modified_base 11: mod_base = OTHER; note = 2'-fluoroadenosine-3'-phosphate
  modified_base 12: mod_base = OTHER; note = 2'-O-methylcytidine-3'-phosphate
  modified_base 13: mod_base = OTHER; note = 2'-O-methylcytidine-3'-phosphate
  modified_base 14: mod_base = OTHER; note = 2'-O-methylguanosine-3'-phosphate
  modified_base 15: mod_base = OTHER; note = 2'-O-methyluridine-3'-phosphate
  modified_base 16: mod_base = OTHER; note = 2'-O-methylguanosine-3'-phosphate
  modified_base 17: mod_base = OTHER; note = 2'-O-methylcytidine-3'-phosphate
  modified_base 18: mod_base = OTHER; note = 2'-O-methyladenosine-3'-phosphate
  modified_base 19: mod_base = OTHER; note = 2'-O-methylguanosine-3'-phosphorothioate
  modified_base 20: mod_base = OTHER; note = 2'-O-methyladenosine-3'-phosphorothioate
  modified_base 21: mod_base = OTHER; note = 2'-O-methyladenosine-3'-phosphate
ctctcgatacaccgtgcagaa

SEQ ID NO: 3141 - RNA, 21 nt, synthetic construct
  source 1..21: mol_type = other RNA
  modified_base 1: mod_base = OTHER; note = 2'-O-methylguanosine-3'-phosphorothioate
  modified_base 2: mod_base = OTHER; note = 2'-O-methylguanosine-3'-phosphorothioate
  modified_base 3: mod_base = OTHER; note = 2'-O-methylcytidine-3'-phosphate
  modified_base 4: mod_base = OTHER; note = 2'-O-methylguanosine-3'-phosphate
  modified_base 5: mod_base = OTHER; note = 2'-O-methylcytidine-3'-phosphate
  modified_base 6: mod_base = OTHER; note = 2'-O-methyladenosine-3'-phosphate
  modified_base 7: mod_base = OTHER; note = 2'-fluorocytidine-3'-phosphate
  modified_base 8: mod_base = OTHER; note = 2'-O-methyluridine-3'-phosphate
  modified_base 9: mod_base = OTHER; note = 2'-fluorouridine-3'-phosphate
  modified_base 10: mod_base = OTHER; note = 2'-fluorouridine-3'-phosphate
  modified_base 11: mod_base = OTHER; note = 2'-fluorouridine-3'-phosphate
  modified_base 12: mod_base = OTHER; note = 2'-O-methyluridine-3'-phosphate
  modified_base 13: mod_base = OTHER; note = 2'-O-methyladenosine-3'-phosphate
  modified_base 14: mod_base = OTHER; note = 2'-O-methyluridine-3'-phosphate
  modified_base 15: mod_base = OTHER; note = 2'-O-methyluridine-3'-phosphate
  modified_base 16: mod_base = OTHER; note = 2'-O-methyluridine-3'-phosphate
  modified_base 17: mod_base = OTHER; note = 2'-O-methyluridine-3'-phosphate
  modified_base 18: mod_base = OTHER; note = 2'-O-methyluridine-3'-phosphate
  modified_base 19: mod_base = OTHER; note = 2'-O-methyladenosine-3'-phosphorothioate
  modified_base 20: mod_base = OTHER; note = 2'-O-methyluridine-3'-phosphorothioate
  modified_base 21: mod_base = OTHER; note = 2'-O-methyladenosine-3'-phosphate
ggcgcactttttatttttata

SEQ ID NO: 3142 - RNA, 21 nt, synthetic construct
  source 1..21: mol_type = other RNA
  modified_base 1: mod_base = OTHER; note = 2'-O-methylguanosine-3'-phosphorothioate
  modified_base 2: mod_base = OTHER; note = 2'-O-methyladenosine-3'-phosphorothioate
  modified_base 3: mod_base = OTHER; note = 2'-O-methylguanosine-3'-phosphate
  modified_base 4: mod_base = OTHER; note = 2'-O-methylcytidine-3'-phosphate
  modified_base 5: mod_base = OTHER; note = 2'-O-methylguanosine-3'-phosphate
  modified_base 6: mod_base = OTHER; note = 2'-O-methyluridine-3'-phosphate
  modified_base 7: mod_base = OTHER; note = 2'-fluorouridine-3'-phosphate
  modified_base 8: mod_base = OTHER; note = 2'-O-methylguanosine-3'-phosphate
  modified_base 9: mod_base = OTHER; note = 2'-fluorocytidine-3'-phosphate
  modified_base 10: mod_base = OTHER; note = 2'-fluorocytidine-3'-phosphate
  modified_base 11: mod_base = OTHER; note = 2'-fluoroadenosine-3'-phosphate
  modified_base 12: mod_base = OTHER; note = 2'-O-methylcytidine-3'-phosphate
  modified_base 13: mod_base = OTHER; note = 2'-O-methyluridine-3'-phosphate
  modified_base 14: mod_base = OTHER; note = 2'-O-methyluridine-3'-phosphate
  modified_base 15: mod_base = OTHER; note = 2'-O-methyluridine-3'-phosphate
  modified_base 16: mod_base = OTHER; note = 2'-O-methylcytidine-3'-phosphate
  modified_base 17: mod_base = OTHER; note = 2'-O-methyladenosine-3'-phosphate
  modified_base 18: mod_base = OTHER; note = 2'-O-methyladenosine-3'-phosphate
  modified_base 19: mod_base = OTHER; note = 2'-O-methyladenosine-3'-phosphorothioate
  modified_base 20: mod_base = OTHER; note = 2'-O-methylguanosine-3'-phosphorothioate
  modified_base 21: mod_base = OTHER; note = 2'-O-methyladenosine-3'-phosphate
gagcgttgccactttcaaaga

SEQ ID NO: 3143 - RNA, 21 nt, synthetic construct
  source 1..21: mol_type = other RNA
  modified_base 1: mod_base = OTHER; note = 2'-O-methyluridine-3'-phosphorothioate
  modified_base 2: mod_base = OTHER; note = 2'-O-methyluridine-3'-phosphorothioate
  modified_base 3: mod_base = OTHER; note = 2'-O-methylguanosine-3'-phosphate
  modified_base 4: mod_base = OTHER; note = 2'-O-methylcytidine-3'-phosphate
  modified_base 5: mod_base = OTHER; note = 2'-O-methyladenosine-3'-phosphate
  modified_base 6: mod_base = OTHER; note = 2'-O-methyluridine-3'-phosphate
  modified_base 7: mod_base = OTHER; note = 2'-fluorocytidine-3'-phosphate
  modified_base 8: mod_base = OTHER; note = 2'-O-methyladenosine-3'-phosphate
  modified_base 9: mod_base = OTHER; note = 2'-fluorouridine-3'-phosphate
  modified_base 10: mod_base = OTHER; note = 2'-fluorouridine-3'-phosphate
  modified_base 11: mod_base = OTHER; note = 2'-fluoroadenosine-3'-phosphate
  modified_base 12: mod_base = OTHER; note = 2'-O-methylcytidine-3'-phosphate
  modified_base 13: mod_base = OTHER; note = 2'-O-methyluridine-3'-phosphate
  modified_base 14: mod_base = OTHER; note = 2'-O-methylguanosine-3'-phosphate
  modified_base 15: mod_base = OTHER; note = 2'-O-methylcytidine-3'-phosphate
  modified_base 16: mod_base = OTHER; note = 2'-O-methylcytidine-3'-phosphate
  modified_base 17: mod_base = OTHER; note = 2'-O-methyluridine-3'-phosphate
  modified_base 18: mod_base = OTHER; note = 2'-O-methyluridine-3'-phosphate
  modified_base 19: mod_base = OTHER; note = 2'-O-methylcytidine-3'-phosphorothioate
  modified_base 20: mod_base = OTHER; note = 2'-O-methyladenosine-3'-phosphorothioate
  modified_base 21: mod_base = OTHER; note = 2'-O-methyladenosine-3'-phosphate
ttgcatcattactgccttcaa

SEQ ID NO: 3144 - RNA, 21 nt, synthetic construct
  source 1..21: mol_type = other RNA
  modified_base 1: mod_base = OTHER; note = 2'-O-methylguanosine-3'-phosphorothioate
  modified_base 2: mod_base = OTHER; note = 2'-O-methylcytidine-3'-phosphorothioate
  modified_base 3: mod_base = OTHER; note = 2'-O-methylguanosine-3'-phosphate
  modified_base 4: mod_base = OTHER; note = 2'-O-methylcytidine-3'-phosphate
  modified_base 5: mod_base = OTHER; note = 2'-O-methyladenosine-3'-phosphate
  modified_base 6: mod_base = OTHER; note = 2'-O-methyladenosine-3'-phosphate
  modified_base 7: mod_base = OTHER; note = 2'-fluoroguanosine-3'-phosphate
  modified_base 8: mod_base = OTHER; note = 2'-O-methyladenosine-3'-phosphate
  modified_base 9: mod_base = OTHER; note = 2'-fluoroadenosine-3'-phosphate
  modified_base 10: mod_base = OTHER; note = 2'-fluoroguanosine-3'-phosphate
  modified_base 11: mod_base = OTHER; note = 2'-fluoroadenosine-3'-phosphate
  modified_base 12: mod_base = OTHER; note = 2'-O-methylguanosine-3'-phosphate
  modified_base 13: mod_base = OTHER; note = 2'-O-methylcytidine-3'-phosphate
  modified_base 14: mod_base = OTHER; note = 2'-O-methyluridine-3'-phosphate
  modified_base 15: mod_base = OTHER; note = 2'-O-methylguanosine-3'-phosphate
  modified_base 16: mod_base = OTHER; note = 2'-O-methyladenosine-3'-phosphate
  modified_base 17: mod_base = OTHER; note = 2'-O-methylguanosine-3'-phosphate
  modified_base 18: mod_base = OTHER; note = 2'-O-methyluridine-3'-phosphate
  modified_base 19: mod_base = OTHER; note = 2'-O-methylcytidine-3'-phosphorothioate
  modified_base 20: mod_base = OTHER; note = 2'-O-methylguanosine-3'-phosphorothioate
  modified_base 21: mod_base = OTHER; note = 2'-O-methyladenosine-3'-phosphate
gcgcaagaagagctgagtcga

SEQ ID NO: 3145 - RNA, 21 nt, synthetic construct
  source 1..21: mol_type = other RNA
  modified_base 1: mod_base = OTHER; note = 2'-O-methyluridine-3'-phosphorothioate
  modified_base 2: mod_base = OTHER; note = 2'-O-methylguanosine-3'-phosphorothioate
  modified_base 3: mod_base = OTHER; note = 2'-O-methylcytidine-3'-phosphate
  modified_base 4: mod_base = OTHER; note = 2'-O-methylguanosine-3'-phosphate
  modified_base 5: mod_base = OTHER; note = 2'-O-methylguanosine-3'-phosphate
  modified_base 6: mod_base = OTHER; note = 2'-O-methyladenosine-3'-phosphate
  modified_base 7: mod_base = OTHER; note = 2'-fluoroadenosine-3'-phosphate
  modified_base 8: mod_base = OTHER; note = 2'-O-methyluridine-3'-phosphate
  modified_base 9: mod_base = OTHER; note = 2'-fluorouridine-3'-phosphate
  modified_base 10: mod_base = OTHER; note = 2'-fluorouridine-3'-phosphate
  modified_base 11: mod_base = OTHER; note = 2'-fluoroguanosine-3'-phosphate
  modified_base 12: mod_base = OTHER; note = 2'-O-methylcytidine-3'-phosphate
  modified_base 13: mod_base = OTHER; note = 2'-O-methyluridine-3'-phosphate
  modified_base 14: mod_base = OTHER; note = 2'-O-methylguanosine-3'-phosphate
  modified_base 15: mod_base = OTHER; note = 2'-O-methylcytidine-3'-phosphate
  modified_base 16: mod_base = OTHER; note = 2'-O-methylcytidine-3'-phosphate
  modified_base 17: mod_base = OTHER; note = 2'-O-methyladenosine-3'-phosphate
  modified_base 18: mod_base = OTHER; note = 2'-O-methyladenosine-3'-phosphate
  modified_base 19: mod_base = OTHER; note = 2'-O-methylcytidine-3'-phosphorothioate
  modified_base 20: mod_base = OTHER; note = 2'-O-methyladenosine-3'-phosphorothioate
  modified_base 21: mod_base = OTHER; note = 2'-O-methyladenosine-3'-phosphate
tgcggaatttgctgccaacaa

SEQ ID NO: 3146 - RNA, 21 nt, synthetic construct
  source 1..21: mol_type = other RNA
  modified_base 1: mod_base = OTHER; note = 2'-O-methylguanosine-3'-phosphorothioate
  modified_base 2: mod_base = OTHER; note = 2'-O-methyluridine-3'-phosphorothioate
  modified_base 3: mod_base = OTHER; note = 2'-O-methylguanosine-3'-phosphate
  modified_base 4: mod_base = OTHER; note = 2'-O-methyluridine-3'-phosphate
  modified_base 5: mod_base = OTHER; note = 2'-O-methylguanosine-3'-phosphate
  modified_base 6: mod_base = OTHER; note = 2'-O-methylcytidine-3'-phosphate
  modified_base 7: mod_base = OTHER; note = 2'-fluoroadenosine-3'-phosphate
  modified_base 8: mod_base = OTHER; note = 2'-O-methyladenosine-3'-phosphate
  modified_base 9: mod_base = OTHER; note = 2'-fluorouridine-3'-phosphate
  modified_base 10: mod_base = OTHER; note = 2'-fluoroguanosine-3'-phosphate
  modified_base 11: mod_base = OTHER; note = 2'-fluorocytidine-3'-phosphate
  modified_base 12: mod_base = OTHER; note = 2'-O-methylcytidine-3'-phosphate
  modified_base 13: mod_base = OTHER; note = 2'-O-methyluridine-3'-phosphate
  modified_base 14: mod_base = OTHER; note = 2'-O-methyladenosine-3'-phosphate
  modified_base 15: mod_base = OTHER; note = 2'-O-methyluridine-3'-phosphate
  modified_base 16: mod_base = OTHER; note = 2'-O-methylguanosine-3'-phosphate
  modified_base 17: mod_base = OTHER; note = 2'-O-methyladenosine-3'-phosphate
  modified_base 18: mod_base = OTHER; note = 2'-O-methylguanosine-3'-phosphate
  modified_base 19: mod_base = OTHER; note = 2'-O-methyladenosine-3'-phosphorothioate
  modified_base 20: mod_base = OTHER; note = 2'-O-methyladenosine-3'-phosphorothioate
  modified_base 21: mod_base = OTHER; note = 2'-O-methyladenosine-3'-phosphate
gtgtgcaatgcctatgagaaa

SEQ ID NO: 3147 - RNA, 21 nt, synthetic construct
  source 1..21: mol_type = other RNA
  modified_base 1: mod_base = OTHER; note = 2'-O-methylguanosine-3'-phosphorothioate
  modified_base 2: mod_base = OTHER; note = 2'-O-methyladenosine-3'-phosphorothioate
  modified_base 3: mod_base = OTHER; note = 2'-O-methyladenosine-3'-phosphate
  modified_base 4: mod_base = OTHER; note = 2'-O-methyluridine-3'-phosphate
  modified_base 5: mod_base = OTHER; note = 2'-O-methyluridine-3'-phosphate
  modified_base 6: mod_base = OTHER; note = 2'-O-methylcytidine-3'-phosphate
  modified_base 7: mod_base = OTHER; note = 2'-fluoroadenosine-3'-phosphate
  modified_base 8: mod_base = OTHER; note = 2'-O-methyladenosine-3'-phosphate
  modified_base 9: mod_base = OTHER; note = 2'-fluoroadenosine-3'-phosphate
  modified_base 10: mod_base = OTHER; note = 2'-fluorouridine-3'-phosphate
  modified_base 11: mod_base = OTHER; note = 2'-fluoroadenosine-3'-phosphate
  modified_base 12: mod_base = OTHER; note = 2'-O-methyluridine-3'-phosphate
  modified_base 13: mod_base = OTHER; note = 2'-O-methyluridine-3'-phosphate
  modified_base 14: mod_base = OTHER; note = 2'-O-methylguanosine-3'-phosphate
  modified_base 15: mod_base = OTHER; note = 2'-O-methylcytidine-3'-phosphate
  modified_base 16: mod_base = OTHER; note = 2'-O-methyladenosine-3'-phosphate
  modified_base 17: mod_base = OTHER; note = 2'-O-methyladenosine-3'-phosphate
  modified_base 18: mod_base = OTHER; note = 2'-O-methyladenosine-3'-phosphate
  modified_base 19: mod_base = OTHER; note = 2'-O-methyladenosine-3'-phosphorothioate
  modified_base 20: mod_base = OTHER; note = 2'-O-methylguanosine-3'-phosphorothioate
  modified_base 21: mod_base = OTHER; note = 2'-O-methyladenosine-3'-phosphate
gaattcaaatattgcaaaaga

SEQ ID NO: 3148 - RNA, 21 nt, synthetic construct
  source 1..21: mol_type = other RNA
  modified_base 1: mod_base = OTHER; note = 2'-O-methylcytidine-3'-phosphorothioate
  modified_base 2: mod_base = OTHER; note = 2'-O-methylcytidine-3'-phosphorothioate
  modified_base 3: mod_base = OTHER; note = 2'-O-methyluridine-3'-phosphate
  modified_base 4: mod_base = OTHER; note = 2'-O-methylguanosine-3'-phosphate
  modified_base 5: mod_base = OTHER; note = 2'-O-methyluridine-3'-phosphate
  modified_base 6: mod_base = OTHER; note = 2'-O-methylguanosine-3'-phosphate
  modified_base 7: mod_base = OTHER; note = 2'-fluorouridine-3'-phosphate
  modified_base 8: mod_base = OTHER; note = 2'-O-methylguanosine-3'-phosphate
  modified_base 9: mod_base = OTHER; note = 2'-fluorocytidine-3'-phosphate
  modified_base 10: mod_base = OTHER; note = 2'-fluorouridine-3'-phosphate
  modified_base 11: mod_base = OTHER; note = 2'-fluorouridine-3'-phosphate
  modified_base 12: mod_base = OTHER; note = 2'-O-methyluridine-3'-phosphate
  modified_base 13: mod_base = OTHER; note = 2'-O-methylguanosine-3'-phosphate
  modified_base 14: mod_base = OTHER; note = 2'-O-methyluridine-3'-phosphate
  modified_base 15: mod_base = OTHER; note = 2'-O-methyladenosine-3'-phosphate
  modified_base 16: mod_base = OTHER; note = 2'-O-methylguanosine-3'-phosphate
  modified_base 17: mod_base = OTHER; note = 2'-O-methyladenosine-3'-phosphate
  modified_base 18: mod_base = OTHER; note = 2'-O-methylguanosine-3'-phosphate
  modified_base 19: mod_base = OTHER; note = 2'-O-methylcytidine-3'-phosphorothioate
  modified_base 20: mod_base = OTHER; note = 2'-O-methylcytidine-3'-phosphorothioate
  modified_base 21: mod_base = OTHER; note = 2'-O-methyladenosine-3'-phosphate
cctgtgtgctttgtagagcca

SEQ ID NO: 3149 - RNA, 21 nt, synthetic construct
  source 1..21: mol_type = other RNA
  modified_base 1: mod_base = OTHER; note = 2'-O-methyluridine-3'-phosphorothioate
  modified_base 2: mod_base = OTHER; note = 2'-O-methylcytidine-3'-phosphorothioate
  modified_base 3: mod_base = OTHER; note = 2'-O-methylcytidine-3'-phosphate
  modified_base 4: mod_base = OTHER; note = 2'-O-methyladenosine-3'-phosphate
  modified_base 5: mod_base = OTHER; note = 2'-O-methylguanosine-3'-phosphate
  modified_base 6: mod_base = OTHER; note = 2'-O-methyladenosine-3'-phosphate
  modified_base 7: mod_base = OTHER; note = 2'-fluorocytidine-3'-phosphate
  modified_base 8: mod_base = OTHER; note = 2'-O-methyladenosine-3'-phosphate
  modified_base 9: mod_base = OTHER; note = 2'-fluoroadenosine-3'-phosphate
  modified_base 10: mod_base = OTHER; note = 2'-fluoroguanosine-3'-phosphate
  modified_base 11: mod_base = OTHER; note = 2'-fluoroguanosine-3'-phosphate
  modified_base 12: mod_base = OTHER; note = 2'-O-methyladenosine-3'-phosphate
  modified_base 13: mod_base = OTHER; note = 2'-O-methyladenosine-3'-phosphate
  modified_base 14: mod_base = OTHER; note = 2'-O-methylguanosine-3'-phosphate
  modified_base 15: mod_base = OTHER; note = 2'-O-methyladenosine-3'-phosphate
  modified_base 16: mod_base = OTHER; note = 2'-O-methylguanosine-3'-phosphate
  modified_base 17: mod_base = OTHER; note = 2'-O-methyluridine-3'-phosphate
  modified_base 18: mod_base = OTHER; note = 2'-O-methylcytidine-3'-phosphate
  modified_base 19: mod_base = OTHER; note = 2'-O-methyladenosine-3'-phosphorothioate
  modified_base 20: mod_base = OTHER; note = 2'-O-methylguanosine-3'-phosphorothioate
  modified_base 21: mod_base = OTHER; note = 2'-O-methyladenosine-3'-phosphate
tccagacaaggaagagtcaga

SEQ ID NO: 3150 - RNA, 21 nt, synthetic construct
  source 1..21: mol_type = other RNA
  modified_base 1: mod_base = OTHER; note = 2'-O-methyluridine-3'-phosphorothioate
  modified_base 2: mod_base = OTHER; note = 2'-O-methylguanosine-3'-phosphorothioate
  modified_base 3: mod_base = OTHER; note = 2'-O-methylcytidine-3'-phosphate
  modified_base 4: mod_base = OTHER; note = 2'-O-methylcytidine-3'-phosphate
  modified_base 5: mod_base = OTHER; note = 2'-O-methyladenosine-3'-phosphate
  modified_base 6: mod_base = OTHER; note = 2'-O-methylguanosine-3'-phosphate
  modified_base 7: mod_base = OTHER; note = 2'-fluoroadenosine-3'-phosphate
  modified_base 8: mod_base = OTHER; note = 2'-O-methyladenosine-3'-phosphate
  modified_base 9: mod_base = OTHER; note = 2'-fluoroadenosine-3'-phosphate
  modified_base 10: mod_base = OTHER; note = 2'-fluorocytidine-3'-phosphate
  modified_base 11: mod_base = OTHER; note = 2'-fluoroadenosine-3'-phosphate
  modified_base 12: mod_base = OTHER; note = 2'-O-methylguanosine-3'-phosphate
  modified_base 13: mod_base = OTHER; note = 2'-O-methylcytidine-3'-phosphate
  modified_base 14: mod_base = OTHER; note = 2'-O-methyladenosine-3'-phosphate
  modified_base 15: mod_base = OTHER; note = 2'-O-methyluridine-3'-phosphate
  modified_base 16: mod_base = OTHER; note = 2'-O-methylcytidine-3'-phosphate
  modified_base 17: mod_base = OTHER; note = 2'-O-methyladenosine-3'-phosphate
  modified_base 18: mod_base = OTHER; note = 2'-O-methylguanosine-3'-phosphate
  modified_base 19: mod_base = OTHER; note = 2'-O-methylcytidine-3'-phosphorothioate
  modified_base 20: mod_base = OTHER; note = 2'-O-methylguanosine-3'-phosphorothioate
  modified_base 21: mod_base = OTHER; note = 2'-O-methyladenosine-3'-phosphate
tgccagaaacagcatcagcga

SEQ ID NO: 3151 - RNA, 21 nt, synthetic construct
  source 1..21: mol_type = other RNA
  modified_base 1: mod_base = OTHER; note = 2'-O-methylguanosine-3'-phosphorothioate
  modified_base 2: mod_base = OTHER; note = 2'-O-methylcytidine-3'-phosphorothioate
  modified_base 3: mod_base = OTHER; note = 2'-O-methyladenosine-3'-phosphate
  modified_base 4: mod_base = OTHER; note = 2'-O-methyluridine-3'-phosphate
  modified_base 5: mod_base = OTHER; note = 2'-O-methyladenosine-3'-phosphate
  modified_base 6: mod_base = OTHER; note = 2'-O-methyladenosine-3'-phosphate
  modified_base 7: mod_base = OTHER; note = 2'-fluorouridine-3'-phosphate
  modified_base 8: mod_base = OTHER; note = 2'-O-methyladenosine-3'-phosphate
  modified_base 9: mod_base = OTHER; note = 2'-fluorouridine-3'-phosphate
  modified_base 10: mod_base = OTHER; note = 2'-fluoroguanosine-3'-phosphate
  modified_base 11: mod_base = OTHER; note = 2'-fluoroguanosine-3'-phosphate
  modified_base 12: mod_base = OTHER; note = 2'-O-methyladenosine-3'-phosphate
  modified_base 13: mod_base = OTHER; note = 2'-O-methyluridine-3'-phosphate
  modified_base 14: mod_base = OTHER; note = 2'-O-methyladenosine-3'-phosphate
  modified_base 15: mod_base = OTHER; note = 2'-O-methylcytidine-3'-phosphate
  modified_base 16: mod_base = OTHER; note = 2'-O-methylguanosine-3'-phosphate
  modified_base 17: mod_base = OTHER; note = 2'-O-methylcytidine-3'-phosphate
  modified_base 18: mod_base = OTHER; note = 2'-O-methylcytidine-3'-phosphate
  modified_base 19: mod_base = OTHER; note = 2'-O-methyluridine-3'-phosphorothioate
  modified_base 20: mod_base = OTHER; note = 2'-O-methyluridine-3'-phosphorothioate
  modified_base 21: mod_base = OTHER; note = 2'-O-methyladenosine-3'-phosphate
gcataatatggatacgcctta

SEQ ID NO: 3152 - RNA, 21 nt, synthetic construct
  source 1..21: mol_type = other RNA
  modified_base 1: mod_base = OTHER; note = 2'-O-methyladenosine-3'-phosphorothioate
  modified_base 2: mod_base = OTHER; note = 2'-O-methylguanosine-3'-phosphorothioate
  modified_base 3: mod_base = OTHER; note = 2'-O-methylcytidine-3'-phosphate
  modified_base 4: mod_base = OTHER; note = 2'-O-methylcytidine-3'-phosphate
  modified_base 5: mod_base = OTHER; note = 2'-O-methyluridine-3'-phosphate
  modified_base 6: mod_base = OTHER; note = 2'-O-methylcytidine-3'-phosphate
  modified_base 7: mod_base = OTHER; note = 2'-fluoroadenosine-3'-phosphate
  modified_base 8: mod_base = OTHER; note = 2'-O-methyluridine-3'-phosphate
  modified_base 9: mod_base = OTHER; note = 2'-fluorocytidine-3'-phosphate
  modified_base 10: mod_base = OTHER; note = 2'-fluorocytidine-3'-phosphate
  modified_base 11: mod_base = OTHER; note = 2'-fluorouridine-3'-phosphate
  modified_base 12: mod_base = OTHER; note = 2'-O-methylguanosine-3'-phosphate
  modified_base 13: mod_base = OTHER; note = 2'-O-methyladenosine-3'-phosphate
  modified_base 14: mod_base = OTHER; note = 2'-O-methyluridine-3'-phosphate
  modified_base 15: mod_base = OTHER; note = 2'-O-methylguanosine-3'-phosphate
  modified_base 16: mod_base = OTHER; note = 2'-O-methyladenosine-3'-phosphate
  modified_base 17: mod_base = OTHER; note = 2'-O-methyluridine-3'-phosphate
  modified_base 18: mod_base = OTHER; note = 2'-O-methylguanosine-3'-phosphate
  modified_base 19: mod_base = OTHER; note = 2'-O-methylcytidine-3'-phosphorothioate
  modified_base 20: mod_base = OTHER; note = 2'-O-methyluridine-3'-phosphorothioate
  modified_base 21: mod_base = OTHER; note = 2'-O-methyladenosine-3'-phosphate
agcctcatcctgatgatgcta

SEQ ID NO: 3153 - RNA, 21 nt, synthetic construct
  source 1..21: mol_type = other RNA
  modified_base 1: mod_base = OTHER; note = 2'-O-methyladenosine-3'-phosphorothioate
  modified_base 2: mod_base = OTHER; note = 2'-O-methyladenosine-3'-phosphorothioate
  modified_base 3: mod_base = OTHER; note = 2'-O-methylguanosine-3'-phosphate
  modified_base 4: mod_base = OTHER; note = 2'-O-methylcytidine-3'-phosphate
  modified_base 5: mod_base = OTHER; note = 2'-O-methylcytidine-3'-phosphate
  modified_base 6: mod_base = OTHER; note = 2'-O-methyluridine-3'-phosphate
  modified_base 7: mod_base = OTHER; note = 2'-fluorocytidine-3'-phosphate
  modified_base 8: mod_base = OTHER; note = 2'-O-methyluridine-3'-phosphate
  modified_base 9: mod_base = OTHER; note = 2'-fluorouridine-3'-phosphate
  modified_base 10: mod_base = OTHER; note = 2'-fluoroguanosine-3'-phosphate
  modified_base 11: mod_base = OTHER; note = 2'-fluoroadenosine-3'-phosphate
  modified_base 12: mod_base = OTHER; note = 2'-O-methylguanosine-3'-phosphate
  modified_base 13: mod_base = OTHER; note = 2'-O-methylcytidine-3'-phosphate
  modified_base 14: mod_base = OTHER; note = 2'-O-methyladenosine-3'-phosphate
  modified_base 15: mod_base = OTHER; note = 2'-O-methylguanosine-3'-phosphate
  modified_base 16: mod_base = OTHER; note = 2'-O-methylguanosine-3'-phosphate
  modified_base 17: mod_base = OTHER; note = 2'-O-methylguanosine-3'-phosphate
  modified_base 18: mod_base = OTHER; note = 2'-O-methyluridine-3'-phosphate
  modified_base 19: mod_base = OTHER; note = 2'-O-methyluridine-3'-phosphorothioate
  modified_base 20: mod_base = OTHER; note = 2'-O-methylguanosine-3'-phosphorothioate
  modified_base 21: mod_base = OTHER; note = 2'-O-methyladenosine-3'-phosphate
aagcctcttgagcagggttga

SEQ ID NO: 3154 - RNA, 21 nt, synthetic construct
  source 1..21: mol_type = other RNA
  modified_base 1: mod_base = OTHER; note = 2'-O-methyluridine-3'-phosphorothioate
  modified_base 2: mod_base = OTHER; note = 2'-O-methyladenosine-3'-phosphorothioate
  modified_base 3: mod_base = OTHER; note = 2'-O-methyladenosine-3'-phosphate
  modified_base 4: mod_base = OTHER; note = 2'-O-methyladenosine-3'-phosphate
  modified_base 5: mod_base = OTHER; note = 2'-O-methylguanosine-3'-phosphate
  modified_base 6: mod_base = OTHER; note = 2'-O-methylguanosine-3'-phosphate
  modified_base 7: mod_base = OTHER; note = 2'-fluoroguanosine-3'-phosphate
  modified_base 8: mod_base = OTHER; note = 2'-O-methyladenosine-3'-phosphate
  modified_base 9: mod_base = OTHER; note = 2'-fluoroadenosine-3'-phosphate
  modified_base 10: mod_base = OTHER; note = 2'-fluoroguanosine-3'-phosphate
  modified_base 11: mod_base = OTHER; note = 2'-fluoroadenosine-3'-phosphate
  modified_base 12: mod_base = OTHER; note = 2'-O-methyladenosine-3'-phosphate
  modified_base 13: mod_base = OTHER; note = 2'-O-methylguanosine-3'-phosphate
  modified_base 14: mod_base = OTHER; note = 2'-O-methyluridine-3'-phosphate
  modified_base 15: mod_base = OTHER; note = 2'-O-methyluridine-3'-phosphate
  modified_base 16: mod_base = OTHER; note = 2'-O-methylguanosine-3'-phosphate
  modified_base 17: mod_base = OTHER; note = 2'-O-methyladenosine-3'-phosphate
  modified_base 18: mod_base = OTHER; note = 2'-O-methyladenosine-3'-phosphate
  modified_base 19: mod_base = OTHER; note = 2'-O-methylguanosine-3'-phosphorothioate
  modified_base 20: mod_base = OTHER; note = 2'-O-methylcytidine-3'-phosphorothioate
  modified_base 21: mod_base = OTHER; note = 2'-O-methyladenosine-3'-phosphate
taaagggaagaagttgaagca

SEQ ID NO: 3155 - RNA, 21 nt, synthetic construct
  source 1..21: mol_type = other RNA
  modified_base 1: mod_base = OTHER; note = 2'-O-methylguanosine-3'-phosphorothioate
  modified_base 2: mod_base = OTHER; note = 2'-O-methylguanosine-3'-phosphorothioate
  modified_base 3: mod_base = OTHER; note = 2'-O-methylcytidine-3'-phosphate
  modified_base 4: mod_base = OTHER; note = 2'-O-methyladenosine-3'-phosphate
  modified_base 5: mod_base = OTHER; note = 2'-O-methylguanosine-3'-phosphate
  modified_base 6: mod_base = OTHER; note = 2'-O-methylcytidine-3'-phosphate
  modified_base 7: mod_base = OTHER; note = 2'-fluoroadenosine-3'-phosphate
  modified_base 8: mod_base = OTHER; note = 2'-O-methyluridine-3'-phosphate
  modified_base 9: mod_base = OTHER; note = 2'-fluorouridine-3'-phosphate
  modified_base 10: mod_base = OTHER; note = 2'-fluoroguanosine-3'-phosphate
  modified_base 11: mod_base = OTHER; note = 2'-fluoroadenosine-3'-phosphate
  modified_base 12: mod_base = OTHER; note = 2'-O-methylguanosine-3'-phosphate
  modified_base 13: mod_base = OTHER; note = 2'-O-methyladenosine-3'-phosphate
  modified_base 14: mod_base = OTHER; note = 2'-O-methyladenosine-3'-phosphate
  modified_base 15: mod_base = OTHER; note = 2'-O-methylguanosine-3'-phosphate
  modified_base 16: mod_base = OTHER; note = 2'-O-methylguanosine-3'-phosphate
  modified_base 17: mod_base = OTHER; note = 2'-O-methyluridine-3'-phosphate
  modified_base 18: mod_base = OTHER; note = 2'-O-methylguanosine-3'-phosphate
  modified_base 19: mod_base = OTHER; note = 2'-O-methylguanosine-3'-phosphorothioate
  modified_base 20: mod_base = OTHER; note = 2'-O-methyluridine-3'-phosphorothioate
  modified_base 21: mod_base = OTHER; note = 2'-O-methyladenosine-3'-phosphate
ggcagcattgagaaggtggta

SEQ ID NO: 3156 - RNA, 21 nt, synthetic construct
  source 1..21: mol_type = other RNA
  modified_base 1: mod_base = OTHER; note = 2'-O-methylguanosine-3'-phosphorothioate
  modified_base 2: mod_base = OTHER; note = 2'-O-methyluridine-3'-phosphorothioate
  modified_base 3: mod_base = OTHER; note = 2'-O-methylcytidine-3'-phosphate
  modified_base 4: mod_base = OTHER; note = 2'-O-methyladenosine-3'-phosphate
  modified_base 5: mod_base = OTHER; note = 2'-O-methylguanosine-3'-phosphate
  modified_base 6: mod_base = OTHER; note = 2'-O-methylcytidine-3'-phosphate
  modified_base 7: mod_base = OTHER; note = 2'-fluoroguanosine-3'-phosphate
  modified_base 8: mod_base = OTHER; note = 2'-O-methyladenosine-3'-phosphate
  modified_base 9: mod_base = OTHER; note = 2'-fluorocytidine-3'-phosphate
  modified_base 10: mod_base = OTHER; note = 2'-fluoroadenosine-3'-phosphate
  modified_base 11: mod_base = OTHER; note = 2'-fluoroguanosine-3'-phosphate
  modified_base 12: mod_base = OTHER; note = 2'-O-methylcytidine-3'-phosphate
  modified_base 13: mod_base = OTHER; note = 2'-O-methyluridine-3'-phosphate
  modified_base 14: mod_base = OTHER; note = 2'-O-methyluridine-3'-phosphate
  modified_base 15: mod_base = OTHER; note = 2'-O-methylcytidine-3'-phosphate
  modified_base 16: mod_base = OTHER; note = 2'-O-methyluridine-3'-phosphate
  modified_base 17: mod_base = OTHER; note = 2'-O-methyluridine-3'-phosphate
  modified_base 18: mod_base = OTHER; note = 2'-O-methylcytidine-3'-phosphate
  modified_base 19: mod_base = OTHER; note = 2'-O-methylcytidine-3'-phosphorothioate
  modified_base 20: mod_base = OTHER; note = 2'-O-methylguanosine-3'-phosphorothioate
  modified_base 21: mod_base = OTHER; note = 2'-O-methyladenosine-3'-phosphate
gtcagcgacagcttcttccga

SEQ ID NO: 3157 - RNA, 21 nt, synthetic construct
  source 1..21: mol_type = other RNA
  modified_base 1: mod_base = OTHER; note = 2'-O-methylcytidine-3'-phosphorothioate
  modified_base 2: mod_base = OTHER; note = 2'-O-methyluridine-3'-phosphorothioate
  modified_base 3: mod_base = OTHER; note = 2'-O-methylguanosine-3'-phosphate
  modified_base 4: mod_base = OTHER; note = 2'-O-methylcytidine-3'-phosphate
  modified_base 5: mod_base = OTHER; note = 2'-O-methyluridine-3'-phosphate
  modified_base 6: mod_base = OTHER; note = 2'-O-methylguanosine-3'-phosphate
  modified_base 7: mod_base = OTHER; note = 2'-fluorouridine-3'-phosphate
  modified_base 8: mod_base = OTHER; note = 2'-O-methylcytidine-3'-phosphate
  modified_base 9: mod_base = OTHER; note = 2'-fluorouridine-3'-phosphate
  modified_base 10: mod_base = OTHER; note = 2'-fluorocytidine-3'-phosphate
  modified_base 11: mod_base = OTHER; note = 2'-fluorocytidine-3'-phosphate
  modified_base 12: mod_base = OTHER; note = 2'-O-methyluridine-3'-phosphate
  modified_base 13: mod_base = OTHER; note = 2'-O-methylcytidine-3'-phosphate
  modified_base 14: mod_base = OTHER; note = 2'-O-methyladenosine-3'-phosphate
  modified_base 15: mod_base = OTHER; note = 2'-O-methyladenosine-3'-phosphate
  modified_base 16: mod_base = OTHER; note = 2'-O-methylcytidine-3'-phosphate
  modified_base 17: mod_base = OTHER; note = 2'-O-methylcytidine-3'-phosphate
  modified_base 18: mod_base = OTHER; note = 2'-O-methyladenosine-3'-phosphate
  modified_base 19: mod_base = OTHER; note = 2'-O-methyladenosine-3'-phosphorothioate
  modified_base 20: mod_base = OTHER; note = 2'-O-methylguanosine-3'-phosphorothioate
  modified_base 21: mod_base = OTHER; note = 2'-O-methyladenosine-3'-phosphate
ctgctgtctcctcaaccaaga

SEQ ID NO: 3158 - RNA, 21 nt, synthetic construct
  source 1..21: mol_type = other RNA
  modified_base 1: mod_base = OTHER; note = 2'-O-methyladenosine-3'-phosphorothioate
  modified_base 2: mod_base = OTHER; note = 2'-O-methylguanosine-3'-phosphorothioate
  modified_base 3: mod_base = OTHER; note = 2'-O-methylguanosine-3'-phosphate
  modified_base 4: mod_base = OTHER; note = 2'-O-methyladenosine-3'-phosphate
  modified_base 5: mod_base = OTHER; note = 2'-O-methylguanosine-3'-phosphate
  modified_base 6: mod_base = OTHER; note = 2'-O-methylguanosine-3'-phosphate
  modified_base 7: mod_base = OTHER; note = 2'-fluoroadenosine-3'-phosphate
  modified_base 8: mod_base = OTHER; note = 2'-O-methyladenosine-3'-phosphate
  modified_base 9: mod_base = OTHER; note = 2'-fluoroguanosine-3'-phosphate
  modified_base 10: mod_base = OTHER; note = 2'-fluoroadenosine-3'-phosphate
  modified_base 11: mod_base = OTHER; note = 2'-fluoroadenosine-3'-phosphate
  modified_base 12: mod_base = OTHER; note = 2'-O-methyluridine-3'-phosphate
  modified_base 13: mod_base = OTHER; note = 2'-O-methyluridine-3'-phosphate
  modified_base 14: mod_base = OTHER; note = 2'-O-methylguanosine-3'-phosphate
  modified_base 15: mod_base = OTHER; note = 2'-O-methylguanosine-3'-phosphate
  modified_base 16: mod_base = OTHER; note = 2'-O-methyladenosine-3'-phosphate
  modified_base 17: mod_base = OTHER; note = 2'-O-methylguanosine-3'-phosphate
  modified_base 18: mod_base = OTHER; note = 2'-O-methyladenosine-3'-phosphate
  modified_base 19: mod_base = OTHER; note = 2'-O-methylcytidine-3'-phosphorothioate
  modified_base 20: mod_base = OTHER; note = 2'-O-methyluridine-3'-phosphorothioate
  modified_base 21: mod_base = OTHER; note = 2'-O-methyladenosine-3'-phosphate
aggaggaagaattggagacta

SEQ ID NO: 3159 - RNA, 21 nt, synthetic construct
  source 1..21: mol_type = other RNA
  modified_base 1: mod_base = OTHER; note = 2'-O-methylcytidine-3'-phosphorothioate
  modified_base 2: mod_base = OTHER; note = 2'-O-methylcytidine-3'-phosphorothioate
  modified_base 3: mod_base = OTHER; note = 2'-O-methyluridine-3'-phosphate
  modified_base 4: mod_base = OTHER; note = 2'-O-methylguanosine-3'-phosphate
  modified_base 5: mod_base = OTHER; note = 2'-O-methyluridine-3'-phosphate
  modified_base 6: mod_base = OTHER; note = 2'-O-methylcytidine-3'-phosphate
  modified_base 7: mod_base = OTHER; note = 2'-fluoroadenosine-3'-phosphate
  modified_base 8: mod_base = OTHER; note = 2'-O-methylcytidine-3'-phosphate
  modified_base 9: mod_base = OTHER; note = 2'-fluorocytidine-3'-phosphate
  modified_base 10: mod_base = OTHER; note = 2'-fluoroadenosine-3'-phosphate
  modified_base 11: mod_base = OTHER; note = 2'-fluorocytidine-3'-phosphate
  modified_base 12: mod_base = OTHER; note = 2'-O-methyluridine-3'-phosphate
  modified_base 13: mod_base = OTHER; note = 2'-O-methylcytidine-3'-phosphate
  modified_base 14: mod_base = OTHER; note = 2'-O-methyluridine-3'-phosphate
  modified_base 15: mod_base = OTHER; note = 2'-O-methylguanosine-3'-phosphate
  modified_base 16: mod_base = OTHER; note = 2'-O-methyladenosine-3'-phosphate
  modified_base 17: mod_base = OTHER; note = 2'-O-methyladenosine-3'-phosphate
  modified_base 18: mod_base = OTHER; note = 2'-O-methylguanosine-3'-phosphate
  modified_base 19: mod_base = OTHER; note = 2'-O-methylguanosine-3'-phosphorothioate
  modified_base 20: mod_base = OTHER; note = 2'-O-methyluridine-3'-phosphorothioate
  modified_base 21: mod_base = OTHER; note = 2'-O-methyladenosine-3'-phosphate
cctgtcaccactctgaaggta

SEQ ID NO: 3160 - RNA, 21 nt, synthetic construct
  source 1..21: mol_type = other RNA
  modified_base 1: mod_base = OTHER; note = 2'-O-methyladenosine-3'-phosphorothioate
  modified_base 2: mod_base = OTHER; note = 2'-O-methylguanosine-3'-phosphorothioate
  modified_base 3: mod_base = OTHER; note = 2'-O-methyladenosine-3'-phosphate
  modified_base 4: mod_base = OTHER; note = 2'-O-methylcytidine-3'-phosphate
  modified_base 5: mod_base = OTHER; note = 2'-O-methyluridine-3'-phosphate
  modified_base 6: mod_base = OTHER; note = 2'-O-methyluridine-3'-phosphate
  modified_base 7: mod_base = OTHER; note = 2'-fluorouridine-3'-phosphate
  modified_base 8: mod_base = OTHER; note = 2'-O-methyladenosine-3'-phosphate
  modified_base 9: mod_base = OTHER; note = 2'-fluorouridine-3'-phosphate
  modified_base 10: mod_base = OTHER; note = 2'-fluoroguanosine-3'-phosphate
  modified_base 11: mod_base = OTHER; note = 2'-fluorouridine-3'-phosphate
  modified_base 12: mod_base = OTHER; note = 2'-O-methyladenosine-3'-phosphate
  modified_base 13: mod_base = OTHER; note = 2'-O-methyluridine-3'-phosphate
  modified_base 14: mod_base = OTHER; note = 2'-O-methyladenosine-3'-phosphate
  modified_base 15: mod_base = OTHER; note = 2'-O-methylguanosine-3'-phosphate
  modified_base 16: mod_base = OTHER; note = 2'-O-methylcytidine-3'-phosphate
  modified_base 17: mod_base = OTHER; note = 2'-O-methylcytidine-3'-phosphate
  modified_base 18: mod_base = OTHER; note = 2'-O-methyladenosine-3'-phosphate
  modified_base 19: mod_base = OTHER; note = 2'-O-methylcytidine-3'-phosphorothioate
  modified_base 20: mod_base = OTHER; note = 2'-O-methyladenosine-3'-phosphorothioate
  modified_base 21: mod_base = OTHER; note = 2'-O-methyladenosine-3'-phosphate
agactttatgtatagccacaa

SEQ ID NO: 3161 - RNA, 21 nt, synthetic construct
  source 1..21: mol_type = other RNA
  modified_base 1: mod_base = OTHER; note = 2'-O-methylguanosine-3'-phosphorothioate
  modified_base 2: mod_base = OTHER; note = 2'-O-methyluridine-3'-phosphorothioate
  modified_base 3: mod_base = OTHER; note = 2'-O-methyluridine-3'-phosphate
  modified_base 4: mod_base = OTHER; note = 2'-O-methyladenosine-3'-phosphate
  modified_base 5: mod_base = OTHER; note = 2'-O-methylcytidine-3'-phosphate
  modified_base 6: mod_base = OTHER; note = 2'-O-methylguanosine-3'-phosphate
  modified_base 7: mod_base = OTHER; note = 2'-fluorocytidine-3'-phosphate
  modified_base 8: mod_base = OTHER; note = 2'-O-methyladenosine-3'-phosphate
  modified_base 9: mod_base = OTHER; note = 2'-fluorouridine-3'-phosphate
  modified_base 10: mod_base = OTHER; note = 2'-fluoroguanosine-3'-phosphate
  modified_base 11: mod_base = OTHER; note = 2'-fluorocytidine-3'-phosphate
  modified_base 12: mod_base = OTHER; note = 2'-O-methylcytidine-3'-phosphate
  modified_base 13: mod_base = OTHER; note = 2'-O-methyluridine-3'-phosphate
  modified_base 14: mod_base = OTHER; note = 2'-O-methylguanosine-3'-phosphate
  modified_base 15: mod_base = OTHER; note = 2'-O-methylcytidine-3'-phosphate
  modified_base 16: mod_base = OTHER; note = 2'-O-methyluridine-3'-phosphate
  modified_base 17: mod_base = OTHER; note = 2'-O-methyluridine-3'-phosphate
  modified_base 18: mod_base = OTHER; note = 2'-O-methyluridine-3'-phosphate
  modified_base 19: mod_base = OTHER; note = 2'-O-methyluridine-3'-phosphorothioate
  modified_base 20: mod_base = OTHER; note = 2'-O-methyluridine-3'-phosphorothioate
  modified_base 21: mod_base = OTHER; note = 2'-O-methyladenosine-3'-phosphate
gttacgcatgcctgcttttta

SEQ ID NO: 3162 - RNA, 21 nt, synthetic construct
  source 1..21: mol_type = other RNA
  modified_base 1: mod_base = OTHER; note = 2'-O-methylcytidine-3'-phosphorothioate
  modified_base 2: mod_base = OTHER; note = 2'-O-methylcytidine-3'-phosphorothioate
  modified_base 3: mod_base = OTHER; note = 2'-O-methyladenosine-3'-phosphate
  modified_base 4: mod_base = OTHER; note = 2'-O-methylguanosine-3'-phosphate
  modified_base 5: mod_base = OTHER; note = 2'-O-methyluridine-3'-phosphate
  modified_base 6: mod_base = OTHER; note = 2'-O-methyluridine-3'-phosphate
  modified_base 7: mod_base = OTHER; note = 2'-fluorocytidine-3'-phosphate
  modified_base 8: mod_base = OTHER; note = 2'-O-methyladenosine-3'-phosphate
  modified_base 9: mod_base = OTHER; note = 2'-fluorocytidine-3'-phosphate
  modified_base 10: mod_base = OTHER; note = 2'-fluoroadenosine-3'-phosphate
  modified_base 11: mod_base = OTHER; note = 2'-fluoroguanosine-3'-phosphate
  modified_base 12: mod_base = OTHER; note = 2'-O-methylcytidine-3'-phosphate
  modified_base 13: mod_base = OTHER; note = 2'-O-methyluridine-3'-phosphate
  modified_base 14: mod_base = OTHER; note = 2'-O-methylguanosine-3'-phosphate
  modified_base 15: mod_base = OTHER; note = 2'-O-methylcytidine-3'-phosphate
  modified_base 16: mod_base = OTHER; note = 2'-O-methylcytidine-3'-phosphate
  modified_base 17: mod_base = OTHER; note = 2'-O-methyladenosine-3'-phosphate
  modified_base 18: mod_base = OTHER; note = 2'-O-methyladenosine-3'-phosphate
  modified_base 19: mod_base = OTHER; note = 2'-O-methyluridine-3'-phosphorothioate
  modified_base 20: mod_base = OTHER; note = 2'-O-methylguanosine-3'-phosphorothioate
  modified_base 21: mod_base = OTHER; note = 2'-O-methyladenosine-3'-phosphate
ccagttcacagctgccaatga

SEQ ID NO: 3163 - RNA, 21 nt, synthetic construct
  source 1..21: mol_type = other RNA
  modified_base 1: mod_base = OTHER; note = 2'-O-methylcytidine-3'-phosphorothioate
  modified_base 2: mod_base = OTHER; note = 2'-O-methyladenosine-3'-phosphorothioate
  modified_base 3: mod_base = OTHER; note = 2'-O-methylguanosine-3'-phosphate
  modified_base 4: mod_base = OTHER; note = 2'-O-methylguanosine-3'-phosphate
  modified_base 5: mod_base = OTHER; note = 2'-O-methylcytidine-3'-phosphate
  modified_base 6: mod_base = OTHER; note = 2'-O-methyladenosine-3'-phosphate
  modified_base 7: mod_base = OTHER; note = 2'-fluorocytidine-3'-phosphate
  modified_base 8: mod_base = OTHER; note = 2'-O-methylguanosine-3'-phosphate
  modified_base 9: mod_base = OTHER; note = 2'-fluorouridine-3'-phosphate
  modified_base 10: mod_base = OTHER; note = 2'-fluoroguanosine-3'-phosphate
  modified_base 11: mod_base = OTHER; note = 2'-fluorouridine-3'-phosphate
  modified_base 12: mod_base = OTHER; note = 2'-O-methylguanosine-3'-phosphate
  modified_base 13: mod_base = OTHER; note = 2'-O-methyluridine-3'-phosphate
  modified_base 14: mod_base = OTHER; note = 2'-O-methyladenosine-3'-phosphate
  modified_base 15: mod_base = OTHER; note = 2'-O-methyluridine-3'-phosphate
  modified_base 16: mod_base = OTHER; note = 2'-O-methylguanosine-3'-phosphate
  modified_base 17: mod_base = OTHER; note = 2'-O-methylcytidine-3'-phosphate
  modified_base 18: mod_base = OTHER; note = 2'-O-methyladenosine-3'-phosphate
  modified_base 19: mod_base = OTHER; note = 2'-O-methylcytidine-3'-phosphorothioate
  modified_base 20: mod_base = OTHER; note = 2'-O-methyluridine-3'-phosphorothioate
  modified_base 21: mod_base = OTHER; note = 2'-O-methyladenosine-3'-phosphate
caggcacgtgtgtatgcacta

SEQ ID NO: 3164 - RNA, 21 nt, synthetic construct
  source 1..21: mol_type = other RNA
  modified_base 1: mod_base = OTHER; note = 2'-O-methyladenosine-3'-phosphorothioate
  modified_base 2: mod_base = OTHER; note = 2'-O-methyluridine-3'-phosphorothioate
  modified_base 3: mod_base = OTHER; note = 2'-O-methylguanosine-3'-phosphate
  modified_base 4: mod_base = OTHER; note = 2'-O-methylguanosine-3'-phosphate
  modified_base 5: mod_base = OTHER; note = 2'-O-methylcytidine-3'-phosphate
  modified_base 6: mod_base = OTHER; note = 2'-O-methyladenosine-3'-phosphate
  modified_base 7: mod_base = OTHER; note = 2'-fluoroguanosine-3'-phosphate
  modified_base 8: mod_base = OTHER; note = 2'-O-methyluridine-3'-phosphate
  modified_base 9: mod_base = OTHER; note = 2'-fluorocytidine-3'-phosphate
  modified_base 10: mod_base = OTHER; note = 2'-fluoroadenosine-3'-phosphate
  modified_base 11: mod_base = OTHER; note = 2'-fluoroadenosine-3'-phosphate
  modified_base 12: mod_base = OTHER; note = 2'-O-methylcytidine-3'-phosphate
  modified_base 13: mod_base = OTHER; note = 2'-O-methyladenosine-3'-phosphate
  modified_base 14: mod_base = OTHER; note = 2'-O-methyladenosine-3'-phosphate
  modified_base 15: mod_base = OTHER; note = 2'-O-methyladenosine-3'-phosphate
  modified_base 16: mod_base = OTHER; note = 2'-O-methylguanosine-3'-phosphate
  modified_base 17: mod_base = OTHER; note = 2'-O-methylguanosine-3'-phosphate
  modified_base 18: mod_base = OTHER; note = 2'-O-methylcytidine-3'-phosphate
  modified_base 19: mod_base = OTHER; note = 2'-O-methylcytidine-3'-phosphorothioate
  modified_base 20: mod_base = OTHER; note = 2'-O-methyluridine-3'-phosphorothioate
  modified_base 21: mod_base = OTHER; note = 2'-O-methyladenosine-3'-phosphate
atggcagtcaacaaaggccta

SEQ ID NO: 3165 - RNA, 21 nt, synthetic construct
  source 1..21: mol_type = other RNA
  modified_base 1: mod_base = OTHER; note = 2'-O-methylcytidine-3'-phosphorothioate
  modified_base 2: mod_base = OTHER; note = 2'-O-methyladenosine-3'-phosphorothioate
  modified_base 3: mod_base = OTHER; note = 2'-O-methyladenosine-3'-phosphate
  modified_base 4: mod_base = OTHER; note = 2'-O-methyladenosine-3'-phosphate
  modified_base 5: mod_base = OTHER; note = 2'-O-methylcytidine-3'-phosphate
  modified_base 6: mod_base = OTHER; note = 2'-O-methyluridine-3'-phosphate
  modified_base 7: mod_base = OTHER; note = 2'-fluorouridine-3'-phosphate
  modified_base 8: mod_base = OTHER; note = 2'-O-methylguanosine-3'-phosphate
  modified_base 9: mod_base = OTHER; note = 2'-fluorouridine-3'-phosphate
  modified_base 10: mod_base = OTHER; note = 2'-fluoroguanosine-3'-phosphate
  modified_base 11: mod_base = OTHER; note = 2'-fluoroguanosine-3'-phosphate
  modified_base 12: mod_base = OTHER; note = 2'-O-methylcytidine-3'-phosphate
  modified_base 13: mod_base = OTHER; note = 2'-O-methylcytidine-3'-phosphate
  modified_base 14: mod_base = OTHER; note = 2'-O-methyladenosine-3'-phosphate
  modified_base 15: mod_base = OTHER; note = 2'-O-methyladenosine-3'-phosphate
  modified_base 16: mod_base = OTHER; note = 2'-O-methyladenosine-3'-phosphate
  modified_base 17: mod_base = OTHER; note = 2'-O-methyladenosine-3'-phosphate
  modified_base 18: mod_base = OTHER; note = 2'-O-methylguanosine-3'-phosphate
  modified_base 19: mod_base = OTHER; note = 2'-O-methyladenosine-3'-phosphorothioate
  modified_base 20: mod_base = OTHER; note = 2'-O-methyluridine-3'-phosphorothioate
  modified_base 21: mod_base = OTHER; note = 2'-O-methyladenosine-3'-phosphate
caaacttgtggccaaaagata

SEQ ID NO: 3166 - RNA, 21 nt, synthetic construct
  source 1..21: mol_type = other RNA
  modified_base 1: mod_base = OTHER; note = 2'-O-methyluridine-3'-phosphorothioate
  modified_base 2: mod_base = OTHER; note = 2'-O-methylcytidine-3'-phosphorothioate
  modified_base 3: mod_base = OTHER; note = 2'-O-methyluridine-3'-phosphate
  modified_base 4: mod_base = OTHER; note = 2'-O-methylguanosine-3'-phosphate
  modified_base 5: mod_base = OTHER; note = 2'-O-methyladenosine-3'-phosphate
  modified_base 6: mod_base = OTHER; note = 2'-O-methylcytidine-3'-phosphate
  modified_base 7: mod_base = OTHER; note = 2'-fluorocytidine-3'-phosphate
  modified_base 8: mod_base = OTHER; note = 2'-O-methyladenosine-3'-phosphate
  modified_base 9: mod_base = OTHER; note = 2'-fluoroadenosine-3'-phosphate
  modified_base 10: mod_base = OTHER; note = 2'-fluorocytidine-3'-phosphate
  modified_base 11: mod_base = OTHER; note = 2'-fluoroadenosine-3'-phosphate
  modified_base 12: mod_base = OTHER; note = 2'-O-methylcytidine-3'-phosphate
  modified_base 13: mod_base = OTHER; note = 2'-O-methylcytidine-3'-phosphate
  modified_base 14: mod_base = OTHER; note = 2'-O-methylcytidine-3'-phosphate
  modified_base 15: mod_base = OTHER; note = 2'-O-methyluridine-3'-phosphate
  modified_base 16: mod_base = OTHER; note = 2'-O-methylcytidine-3'-phosphate
  modified_base 17: mod_base = OTHER; note = 2'-O-methyluridine-3'-phosphate
  modified_base 18: mod_base = OTHER; note = 2'-O-methylcytidine-3'-phosphate
  modified_base 19: mod_base = OTHER; note = 2'-O-methyluridine-3'-phosphorothioate
  modified_base 20: mod_base = OTHER; note = 2'-O-methylcytidine-3'-phosphorothioate
  modified_base 21: mod_base = OTHER; note = 2'-O-methyladenosine-3'-phosphate
tctgaccaacaccctctctca

SEQ ID NO: 3167 - RNA, 21 nt, synthetic construct
  source 1..21: mol_type = other RNA
  modified_base 1: mod_base = OTHER; note = 2'-O-methyluridine-3'-phosphorothioate
  modified_base 2: mod_base = OTHER; note = 2'-O-methylcytidine-3'-phosphorothioate
  modified_base 3: mod_base = OTHER; note = 2'-O-methyladenosine-3'-phosphate
  modified_base 4: mod_base = OTHER; note = 2'-O-methylcytidine-3'-phosphate
  modified_base 5: mod_base = OTHER; note = 2'-O-methyladenosine-3'-phosphate
  modified_base 6: mod_base = OTHER; note = 2'-O-methyluridine-3'-phosphate
  modified_base 7: mod_base = OTHER; note = 2'-fluorouridine-3'-phosphate
  modified_base 8: mod_base = OTHER; note = 2'-O-methyladenosine-3'-phosphate
  modified_base 9: mod_base = OTHER; note = 2'-fluorouridine-3'-phosphate
  modified_base 10: mod_base = OTHER; note = 2'-fluoroadenosine-3'-phosphate
  modified_base 11: mod_base = OTHER; note = 2'-fluoroadenosine-3'-phosphate
  modified_base 12: mod_base = OTHER; note = 2'-O-methyladenosine-3'-phosphate
  modified_base 13: mod_base = OTHER; note = 2'-O-methyluridine-3'-phosphate
  modified_base 14: mod_base = OTHER; note = 2'-O-methylcytidine-3'-phosphate
  modified_base 15: mod_base = OTHER; note = 2'-O-methylcytidine-3'-phosphate
  modified_base 16: mod_base = OTHER; note = 2'-O-methylcytidine-3'-phosphate
  modified_base 17: mod_base = OTHER; note = 2'-O-methyladenosine-3'-phosphate
  modified_base 18: mod_base = OTHER; note = 2'-O-methylcytidine-3'-phosphate
  modified_base 19: mod_base = OTHER; note = 2'-O-methyluridine-3'-phosphorothioate
  modified_base 20: mod_base = OTHER; note = 2'-O-methylcytidine-3'-phosphorothioate
  modified_base 21: mod_base = OTHER; note = 2'-O-methyladenosine-3'-phosphate
tcacattataaatcccactca

SEQ ID NO: 3168 - RNA, 21 nt, synthetic construct
  source 1..21: mol_type = other RNA
  modified_base 1: mod_base = OTHER; note = 2'-O-methylguanosine-3'-phosphorothioate
  modified_base 2: mod_base = OTHER; note = 2'-O-methyladenosine-3'-phosphorothioate
  modified_base 3: mod_base = OTHER; note = 2'-O-methylguanosine-3'-phosphate
  modified_base 4: mod_base = OTHER; note = 2'-O-methylguanosine-3'-phosphate
  modified_base 5: mod_base = OTHER; note = 2'-O-methyladenosine-3'-phosphate
  modified_base 6: mod_base = OTHER; note = 2'-O-methylguanosine-3'-phosphate
  modified_base 7: mod_base = OTHER; note = 2'-fluoroadenosine-3'-phosphate
  modified_base 8: mod_base = OTHER; note = 2'-O-methyladenosine-3'-phosphate
  modified_base 9: mod_base = OTHER; note = 2'-fluorocytidine-3'-phosphate
  modified_base 10: mod_base = OTHER; note = 2'-fluoroadenosine-3'-phosphate
  modified_base 11: mod_base = OTHER; note = 2'-fluoroadenosine-3'-phosphate
  modified_base 12: mod_base = OTHER; note = 2'-O-methylguanosine-3'-phosphate
  modified_base 13: mod_base = OTHER; note = 2'-O-methyluridine-3'-phosphate
  modified_base 14: mod_base = OTHER; note = 2'-O-methyluridine-3'-phosphate
  modified_base 15: mod_base = OTHER; note = 2'-O-methylcytidine-3'-phosphate
  modified_base 16: mod_base = OTHER; note = 2'-O-methyladenosine-3'-phosphate
  modified_base 17: mod_base = OTHER; note = 2'-O-methylguanosine-3'-phosphate
  modified_base 18: mod_base = OTHER; note = 2'-O-methyluridine-3'-phosphate
  modified_base 19: mod_base = OTHER; note = 2'-O-methylguanosine-3'-phosphorothioate
  modified_base 20: mod_base = OTHER; note = 2'-O-methyladenosine-3'-phosphorothioate
  modified_base 21: mod_base = OTHER; note = 2'-O-methyladenosine-3'-phosphate
gaggagaacaagttcagtgaa

SEQ ID NO: 3169 - RNA, 21 nt, synthetic construct
  source 1..21: mol_type = other RNA
  modified_base 1: mod_base = OTHER; note = 2'-O-methylguanosine-3'-phosphorothioate
  modified_base 2: mod_base = OTHER; note = 2'-O-methyladenosine-3'-phosphorothioate
  modified_base 3: mod_base = OTHER; note = 2'-O-methylguanosine-3'-phosphate
  modified_base 4: mod_base = OTHER; note = 2'-O-methylcytidine-3'-phosphate
  modified_base 5: mod_base = OTHER; note = 2'-O-methyladenosine-3'-phosphate
  modified_base 6: mod_base = OTHER; note = 2'-O-methylguanosine-3'-phosphate
  modified_base 7: mod_base = OTHER; note = 2'-fluoroguanosine-3'-phosphate
  modified_base 8: mod_base = OTHER; note = 2'-O-methyladenosine-3'-phosphate
  modified_base 9: mod_base = OTHER; note = 2'-fluoroguanosine-3'-phosphate
  modified_base 10: mod_base = OTHER; note = 2'-fluoroadenosine-3'-phosphate
  modified_base 11: mod_base = OTHER; note = 2'-fluoroadenosine-3'-phosphate
  modified_base 12: mod_base = OTHER; note = 2'-O-methyluridine-3'-phosphate
  modified_base 13: mod_base = OTHER; note = 2'-O-methylguanosine-3'-phosphate
  modified_base 14: mod_base = OTHER; note = 2'-O-methyluridine-3'-phosphate
  modified_base 15: mod_base = OTHER; note = 2'-O-methylguanosine-3'-phosphate
  modified_base 16: mod_base = OTHER; note = 2'-O-methylcytidine-3'-phosphate
  modified_base 17: mod_base = OTHER; note = 2'-O-methyluridine-3'-phosphate
  modified_base 18: mod_base = OTHER; note = 2'-O-methylguanosine-3'-phosphate
  modified_base 19: mod_base = OTHER; note = 2'-O-methylcytidine-3'-phosphorothioate
  modified_base 20: mod_base = OTHER; note = 2'-O-methyladenosine-3'-phosphorothioate
  modified_base 21: mod_base = OTHER; note = 2'-O-methyladenosine-3'-phosphate
gagcaggagaatgtgctgcaa

SEQ ID NO: 3170 - RNA, 21 nt, synthetic construct
  source 1..21: mol_type = other RNA
  modified_base 1: mod_base = OTHER; note = 2'-O-methylguanosine-3'-phosphorothioate
  modified_base 2: mod_base = OTHER; note = 2'-O-methyladenosine-3'-phosphorothioate
  modified_base 3: mod_base = OTHER; note = 2'-O-methyladenosine-3'-phosphate
  modified_base 4: mod_base = OTHER; note = 2'-O-methylguanosine-3'-phosphate
  modified_base 5: mod_base = OTHER; note = 2'-O-methyladenosine-3'-phosphate
  modified_base 6: mod_base = OTHER; note = 2'-O-methylcytidine-3'-phosphate
  modified_base 7: mod_base = OTHER; note = 2'-fluorocytidine-3'-phosphate
  modified_base 8: mod_base = OTHER; note = 2'-O-methyluridine-3'-phosphate
  modified_base 9: mod_base = OTHER; note = 2'-fluoroadenosine-3'-phosphate
  modified_base 10: mod_base = OTHER; note = 2'-fluorocytidine-3'-phosphate
  modified_base 11: mod_base = OTHER; note = 2'-fluoroadenosine-3'-phosphate
  modified_base 12: mod_base = OTHER; note = 2'-O-methylcytidine-3'-phosphate
  modified_base 13: mod_base = OTHER; note = 2'-O-methylcytidine-3'-phosphate
  modified_base 14: mod_base = OTHER; note = 2'-O-methyladenosine-3'-phosphate
  modified_base 15: mod_base = OTHER; note = 2'-O-methylguanosine-3'-phosphate
  modified_base 16: mod_base = OTHER; note = 2'-O-methylcytidine-3'-phosphate
  modified_base 17: mod_base = OTHER; note = 2'-O-methyladenosine-3'-phosphate
  modified_base 18: mod_base = OTHER; note = 2'-O-methylcytidine-3'-phosphate
  modified_base 19: mod_base = OTHER; note = 2'-O-methyluridine-3'-phosphorothioate
  modified_base 20: mod_base = OTHER; note = 2'-O-methyladenosine-3'-phosphorothioate
  modified_base 21: mod_base = OTHER; note = 2'-O-methyladenosine-3'-phosphate
gaagacctacaccagcactaa

SEQ ID NO: 3171 - RNA, 21 nt, synthetic construct
  source 1..21: mol_type = other RNA
  modified_base 1: mod_base = OTHER; note = 2'-O-methyladenosine-3'-phosphorothioate
  modified_base 2: mod_base = OTHER; note = 2'-O-methylguanosine-3'-phosphorothioate
  modified_base 3: mod_base = OTHER; note = 2'-O-methylguanosine-3'-phosphate
  modified_base 4: mod_base = OTHER; note = 2'-O-methylcytidine-3'-phosphate
  modified_base 5: mod_base = OTHER; note = 2'-O-methylcytidine-3'-phosphate
  modified_base 6: mod_base = OTHER; note = 2'-O-methyluridine-3'-phosphate
  modified_base 7: mod_base = OTHER; note = 2'-fluorocytidine-3'-phosphate
  modified_base 8: mod_base = OTHER; note = 2'-O-methyladenosine-3'-phosphate
  modified_base 9: mod_base = OTHER; note = 2'-fluorocytidine-3'-phosphate
  modified_base 10: mod_base = OTHER; note = 2'-fluorocytidine-3'-phosphate
  modified_base 11: mod_base = OTHER; note = 2'-fluorouridine-3'-phosphate
  modified_base 12: mod_base = OTHER; note = 2'-O-methyluridine-3'-phosphate
  modified_base 13: mod_base = OTHER; note = 2'-O-methylguanosine-3'-phosphate
  modified_base 14: mod_base = OTHER; note = 2'-O-methylcytidine-3'-phosphate
  modified_base 15: mod_base = OTHER; note = 2'-O-methyluridine-3'-phosphate
  modified_base 16: mod_base = OTHER; note = 2'-O-methylguanosine-3'-phosphate
  modified_base 17: mod_base = OTHER; note = 2'-O-methylguanosine-3'-phosphate
  modified_base 18: mod_base = OTHER; note = 2'-O-methyladenosine-3'-phosphate
  modified_base 19: mod_base = OTHER; note = 2'-O-methyluridine-3'-phosphorothioate
  modified_base 20: mod_base = OTHER; note = 2'-O-methylguanosine-3'-phosphorothioate
  modified_base 21: mod_base = OTHER; note = 2'-O-methyladenosine-3'-phosphate
aggcctcaccttgctggatga

SEQ ID NO: 3172 - RNA, 21 nt, synthetic construct
  source 1..21: mol_type = other RNA
  modified_base 1: mod_base = OTHER; note = 2'-O-methyladenosine-3'-phosphorothioate
  modified_base 2: mod_base = OTHER; note = 2'-O-methylguanosine-3'-phosphorothioate
  modified_base 3: mod_base = OTHER; note = 2'-O-methylcytidine-3'-phosphate
  modified_base 4: mod_base = OTHER; note = 2'-O-methylcytidine-3'-phosphate
  modified_base 5: mod_base = OTHER; note = 2'-O-methyladenosine-3'-phosphate
  modified_base 6: mod_base = OTHER; note = 2'-O-methylguanosine-3'-phosphate
  modified_base 7: mod_base = OTHER; note = 2'-fluorocytidine-3'-phosphate
  modified_base 8: mod_base = OTHER; note = 2'-O-methyluridine-3'-phosphate
  modified_base 9: mod_base = OTHER; note = 2'-fluoroguanosine-3'-phosphate
  modified_base 10: mod_base = OTHER; note = 2'-fluorocytidine-3'-phosphate
  modified_base 11: mod_base = OTHER; note = 2'-fluorouridine-3'-phosphate
  modified_base 12: mod_base = OTHER; note = 2'-O-methyluridine-3'-phosphate
  modified_base 13: mod_base = OTHER; note = 2'-O-methylguanosine-3'-phosphate
  modified_base 14: mod_base = OTHER; note = 2'-O-methylcytidine-3'-phosphate
  modified_base 15: mod_base = OTHER; note = 2'-O-methyluridine-3'-phosphate
  modified_base 16: mod_base = OTHER; note = 2'-O-methylcytidine-3'-phosphate
  modified_base 17: mod_base = OTHER; note = 2'-O-methyladenosine-3'-phosphate
  modified_base 18: mod_base = OTHER; note = 2'-O-methylcytidine-3'-phosphate
  modified_base 19: mod_base = OTHER; note = 2'-O-methyladenosine-3'-phosphorothioate
  modified_base 20: mod_base = OTHER; note = 2'-O-methylguanosine-3'-phosphorothioate
  modified_base 21: mod_base = OTHER; note = 2'-O-methyladenosine-3'-phosphate
agccagctgcttgctcacaga

SEQ ID NO: 3173 - RNA, 21 nt, synthetic construct
  source 1..21: mol_type = other RNA
  modified_base 1: mod_base = OTHER; note = 2'-O-methylguanosine-3'-phosphorothioate
  modified_base 2: mod_base = OTHER; note = 2'-O-methylguanosine-3'-phosphorothioate
  modified_base 3: mod_base = OTHER; note = 2'-O-methylguanosine-3'-phosphate
  modified_base 4: mod_base = OTHER; note = 2'-O-methylcytidine-3'-phosphate
  modified_base 5: mod_base = OTHER; note = 2'-O-methyluridine-3'-phosphate
  modified_base 6: mod_base = OTHER; note = 2'-O-methylcytidine-3'-phosphate
  modified_base 7: mod_base = OTHER; note = 2'-fluorouridine-3'-phosphate
  modified_base 8: mod_base = OTHER; note = 2'-O-methylguanosine-3'-phosphate
  modified_base 9: mod_base = OTHER; note = 2'-fluorouridine-3'-phosphate
  modified_base 10: mod_base = OTHER; note = 2'-fluoroguanosine-3'-phosphate
  modified_base 11: mod_base = OTHER; note = 2'-fluoroadenosine-3'-phosphate
  modified_base 12: mod_base = OTHER; note = 2'-O-methylguanosine-3'-phosphate
  modified_base 13: mod_base = OTHER; note = 2'-O-methyladenosine-3'-phosphate
  modified_base 14: mod_base = OTHER; note = 2'-O-methylcytidine-3'-phosphate
  modified_base 15: mod_base = OTHER; note = 2'-O-methyluridine-3'-phosphate
  modified_base 16: mod_base = OTHER; note = 2'-O-methylguanosine-3'-phosphate
  modified_base 17: mod_base = OTHER; note = 2'-O-methyladenosine-3'-phosphate
  modified_base 18: mod_base = OTHER; note = 2'-O-methylguanosine-3'-phosphate
  modified_base 19: mod_base = OTHER; note = 2'-O-methylguanosine-3'-phosphorothioate
  modified_base 20: mod_base = OTHER; note = 2'-O-methyluridine-3'-phosphorothioate
  modified_base 21: mod_base = OTHER; note = 2'-O-methyladenosine-3'-phosphate
gggctctgtgagactgaggta

SEQ ID NO: 3174 - RNA, 21 nt, synthetic construct
  source 1..21: mol_type = other RNA
  modified_base 1: mod_base = OTHER; note = 2'-O-methylcytidine-3'-phosphorothioate
  modified_base 2: mod_base = OTHER; note = 2'-O-methylguanosine-3'-phosphorothioate
  modified_base 3: mod_base = OTHER; note = 2'-O-methyladenosine-3'-phosphate
  modified_base 4: mod_base = OTHER; note = 2'-O-methylguanosine-3'-phosphate
  modified_base 5: mod_base = OTHER; note = 2'-O-methyladenosine-3'-phosphate
  modified_base 6: mod_base = OTHER; note = 2'-O-methylguanosine-3'-phosphate
  modified_base 7: mod_base = OTHER; note = 2'-fluorocytidine-3'-phosphate
  modified_base 8: mod_base = OTHER; note = 2'-O-methylguanosine-3'-phosphate
  modified_base 9: mod_base = OTHER; note = 2'-fluoroadenosine-3'-phosphate
  modified_base 10: mod_base = OTHER; note = 2'-fluoroadenosine-3'-phosphate
  modified_base 11: mod_base = OTHER; note = 2'-fluorouridine-3'-phosphate
  modified_base 12: mod_base = OTHER; note = 2'-O-methyluridine-3'-phosphate
  modified_base 13: mod_base = OTHER; note = 2'-O-methylcytidine-3'-phosphate
  modified_base 14: mod_base = OTHER; note = 2'-O-methylcytidine-3'-phosphate
  modified_base 15: mod_base = OTHER; note = 2'-O-methylguanosine-3'-phosphate
  modified_base 16: mod_base = OTHER; note = 2'-O-methylguanosine-3'-phosphate
  modified_base 17: mod_base = OTHER; note = 2'-O-methylguanosine-3'-phosphate
  modified_base 18: mod_base = OTHER; note = 2'-O-methyladenosine-3'-phosphate
  modified_base 19: mod_base = OTHER; note = 2'-O-methylcytidine-3'-phosphorothioate
  modified_base 20: mod_base = OTHER; note = 2'-O-methyladenosine-3'-phosphorothioate
  modified_base 21: mod_base = OTHER; note = 2'-O-methyladenosine-3'-phosphate
cgagagcgaattccgggacaa

SEQ ID NO: 3175 - RNA, 21 nt, synthetic construct
  source 1..21: mol_type = other RNA
  modified_base 1: mod_base = OTHER; note = 2'-O-methylguanosine-3'-phosphorothioate
  modified_base 2: mod_base = OTHER; note = 2'-O-methyluridine-3'-phosphorothioate
  modified_base 3: mod_base = OTHER; note = 2'-O-methylguanosine-3'-phosphate
  modified_base 4: mod_base = OTHER; note = 2'-O-methylguanosine-3'-phosphate
  modified_base 5: mod_base = OTHER; note = 2'-O-methylcytidine-3'-phosphate
  modified_base 6: mod_base = OTHER; note = 2'-O-methyladenosine-3'-phosphate
  modified_base 7: mod_base = OTHER; note = 2'-fluorocytidine-3'-phosphate
  modified_base 8: mod_base = OTHER; note = 2'-O-methyladenosine-3'-phosphate
  modified_base 9: mod_base = OTHER; note = 2'-fluorouridine-3'-phosphate
  modified_base 10: mod_base = OTHER; note = 2'-fluoroadenosine-3'-phosphate
  modified_base 11: mod_base = OTHER; note = 2'-fluorocytidine-3'-phosphate
  modified_base 12: mod_base = OTHER; note = 2'-O-methylcytidine-3'-phosphate
  modified_base 13: mod_base = OTHER; note = 2'-O-methylcytidine-3'-phosphate
  modified_base 14: mod_base = OTHER; note = 2'-O-methyluridine-3'-phosphate
  modified_base 15: mod_base = OTHER; note = 2'-O-methylguanosine-3'-phosphate
  modified_base 16: mod_base = OTHER; note = 2'-O-methylcytidine-3'-phosphate
  modified_base 17: mod_base = OTHER; note = 2'-O-methyladenosine-3'-phosphate
  modified_base 18: mod_base = OTHER; note = 2'-O-methylguanosine-3'-phosphate
  modified_base 19: mod_base = OTHER; note = 2'-O-methyladenosine-3'-phosphorothioate
  modified_base 20: mod_base = OTHER; note = 2'-O-methyladenosine-3'-phosphorothioate
  modified_base 21: mod_base = OTHER; note = 2'-O-methyladenosine-3'-phosphate
gtggcacataccctgcagaaa

SEQ ID NO: 3176 - RNA, 21 nt, synthetic construct
  source 1..21: mol_type = other RNA
  modified_base 1: mod_base = OTHER; note = 2'-O-methylguanosine-3'-phosphorothioate
  modified_base 2: mod_base = OTHER; note = 2'-O-methyluridine-3'-phosphorothioate
  modified_base 3: mod_base = OTHER; note = 2'-O-methylguanosine-3'-phosphate
  modified_base 4: mod_base = OTHER; note = 2'-O-methylguanosine-3'-phosphate
  modified_base 5: mod_base = OTHER; note = 2'-O-methyladenosine-3'-phosphate
  modified_base 6: mod_base = OTHER; note = 2'-O-methylcytidine-3'-phosphate
  modified_base 7: mod_base = OTHER; note = 2'-fluoroadenosine-3'-phosphate
  modified_base 8: mod_base = OTHER; note = 2'-O-methylcytidine-3'-phosphate
  modified_base 9: mod_base = OTHER; note = 2'-fluoroadenosine-3'-phosphate
  modified_base 10: mod_base = OTHER; note = 2'-fluoroguanosine-3'-phosphate
  modified_base 11: mod_base = OTHER; note = 2'-fluorouridine-3'-phosphate
  modified_base 12: mod_base = OTHER; note = 2'-O-methylguanosine-3'-phosphate
  modified_base 13: mod_base = OTHER; note = 2'-O-methylguanosine-3'-phosphate
  modified_base 14: mod_base = OTHER; note = 2'-O-methyluridine-3'-phosphate
  modified_base 15: mod_base = OTHER; note = 2'-O-methylguanosine-3'-phosphate
  modified_base 16: mod_base = OTHER; note = 2'-O-methylcytidine-3'-phosphate
  modified_base 17: mod_base = OTHER; note = 2'-O-methyladenosine-3'-phosphate
  modified_base 18: mod_base = OTHER; note = 2'-O-methyluridine-3'-phosphate
  modified_base 19: mod_base = OTHER; note = 2'-O-methyluridine-3'-phosphorothioate
  modified_base 20: mod_base = OTHER; note = 2'-O-methyladenosine-3'-phosphorothioate
  modified_base 21: mod_base = OTHER; note = 2'-O-methyladenosine-3'-phosphate
gtggacacagtggtgcattaa

SEQ ID NO: 3177 - RNA, 21 nt, synthetic construct
  source 1..21: mol_type = other RNA
  modified_base 1: mod_base = OTHER; note = 2'-O-methyladenosine-3'-phosphorothioate
  modified_base 2: mod_base = OTHER; note = 2'-O-methyladenosine-3'-phosphorothioate
  modified_base 3: mod_base = OTHER; note = 2'-O-methylguanosine-3'-phosphate
  modified_base 4: mod_base = OTHER; note = 2'-O-methylcytidine-3'-phosphate
  modified_base 5: mod_base = OTHER; note = 2'-O-methylcytidine-3'-phosphate
  modified_base 6: mod_base = OTHER; note = 2'-O-methylcytidine-3'-phosphate
  modified_base 7: mod_base = OTHER; note = 2'-fluoroadenosine-3'-phosphate
  modified_base 8: mod_base = OTHER; note = 2'-O-methylguanosine-3'-phosphate
  modified_base 9: mod_base = OTHER; note = 2'-fluoroadenosine-3'-phosphate
  modified_base 10: mod_base = OTHER; note = 2'-fluoroadenosine-3'-phosphate
  modified_base 11: mod_base = OTHER; note = 2'-fluoroguanosine-3'-phosphate
  modified_base 12: mod_base = OTHER; note = 2'-O-methyluridine-3'-phosphate
  modified_base 13: mod_base = OTHER; note = 2'-O-methylcytidine-3'-phosphate
  modified_base 14: mod_base = OTHER; note = 2'-O-methyluridine-3'-phosphate
  modified_base 15: mod_base = OTHER; note = 2'-O-methylcytidine-3'-phosphate
  modified_base 16: mod_base = OTHER; note = 2'-O-methylcytidine-3'-phosphate
  modified_base 17: mod_base = OTHER; note = 2'-O-methylcytidine-3'-phosphate
  modified_base 18: mod_base = OTHER; note = 2'-O-methyladenosine-3'-phosphate
  modified_base 19: mod_base = OTHER; note = 2'-O-methyladenosine-3'-phosphorothioate
  modified_base 20: mod_base = OTHER; note = 2'-O-methylguanosine-3'-phosphorothioate
  modified_base 21: mod_base = OTHER; note = 2'-O-methyladenosine-3'-phosphate
aagcccagaagtctcccaaga

SEQ ID NO: 3178 - RNA, 21 nt, synthetic construct
  source 1..21: mol_type = other RNA
  modified_base 1: mod_base = OTHER; note = 2'-O-methylguanosine-3'-phosphorothioate
  modified_base 2: mod_base = OTHER; note = 2'-O-methylguanosine-3'-phosphorothioate
  modified_base 3: mod_base = OTHER; note = 2'-O-methylcytidine-3'-phosphate
  modified_base 4: mod_base = OTHER; note = 2'-O-methylcytidine-3'-phosphate
  modified_base 5: mod_base = OTHER; note = 2'-O-methyladenosine-3'-phosphate
  modified_base 6: mod_base = OTHER; note = 2'-O-methyluridine-3'-phosphate
  modified_base 7: mod_base = OTHER; note = 2'-fluoroguanosine-3'-phosphate
  modified_base 8: mod_base = OTHER; note = 2'-O-methyluridine-3'-phosphate
  modified_base 9: mod_base = OTHER; note = 2'-fluorocytidine-3'-phosphate
  modified_base 10: mod_base = OTHER; note = 2'-fluorocytidine-3'-phosphate
  modified_base 11: mod_base = OTHER; note = 2'-fluorocytidine-3'-phosphate
  modified_base 12: mod_base = OTHER; note = 2'-O-methyluridine-3'-phosphate
  modified_base 13: mod_base = OTHER; note = 2'-O-methyladenosine-3'-phosphate
  modified_base 14: mod_base = OTHER; note = 2'-O-methyluridine-3'-phosphate
  modified_base 15: mod_base = OTHER; note = 2'-O-methylcytidine-3'-phosphate
  modified_base 16: mod_base = OTHER; note = 2'-O-methyladenosine-3'-phosphate
  modified_base 17: mod_base = OTHER; note = 2'-O-methylguanosine-3'-phosphate
  modified_base 18: mod_base = OTHER; note = 2'-O-methyladenosine-3'-phosphate
  modified_base 19: mod_base = OTHER; note = 2'-O-methyluridine-3'-phosphorothioate
  modified_base 20: mod_base = OTHER; note = 2'-O-methylguanosine-3'-phosphorothioate
  modified_base 21: mod_base = OTHER; note = 2'-O-methyladenosine-3'-phosphate
ggccatgtccctatcagatga

SEQ ID NO: 3179 - RNA, 21 nt, synthetic construct
  source 1..21: mol_type = other RNA
  modified_base 1: mod_base = OTHER; note = 2'-O-methylguanosine-3'-phosphorothioate
  modified_base 2: mod_base = OTHER; note = 2'-O-methylcytidine-3'-phosphorothioate
  modified_base 3: mod_base = OTHER; note = 2'-O-methylcytidine-3'-phosphate
  modified_base 4: mod_base = OTHER; note = 2'-O-methylguanosine-3'-phosphate
  modified_base 5: mod_base = OTHER; note = 2'-O-methylguanosine-3'-phosphate
  modified_base 6: mod_base = OTHER; note = 2'-O-methylcytidine-3'-phosphate
  modified_base 7: mod_base = OTHER; note = 2'-fluoroguanosine-3'-phosphate
  modified_base 8: mod_base = OTHER; note = 2'-O-methylguanosine-3'-phosphate
  modified_base 9: mod_base = OTHER; note = 2'-fluoroguanosine-3'-phosphate
  modified_base 10: mod_base = OTHER; note = 2'-fluorouridine-3'-phosphate
  modified_base 11: mod_base = OTHER; note = 2'-fluorouridine-3'-phosphate
  modified_base 12: mod_base = OTHER; note = 2'-O-methyluridine-3'-phosphate
  modified_base 13: mod_base = OTHER; note = 2'-O-methylcytidine-3'-phosphate
  modified_base 14: mod_base = OTHER; note = 2'-O-methyluridine-3'-phosphate
  modified_base 15: mod_base = OTHER; note = 2'-O-methylcytidine-3'-phosphate
  modified_base 16: mod_base = OTHER; note = 2'-O-methyluridine-3'-phosphate
  modified_base 17: mod_base = OTHER; note = 2'-O-methyladenosine-3'-phosphate
  modified_base 18: mod_base = OTHER; note = 2'-O-methyladenosine-3'-phosphate
  modified_base 19: mod_base = OTHER; note = 2'-O-methylcytidine-3'-phosphorothioate
  modified_base 20: mod_base = OTHER; note = 2'-O-methyladenosine-3'-phosphorothioate
  modified_base 21: mod_base = OTHER; note = 2'-O-methyladenosine-3'-phosphate
gccggcgggtttctctaacaa

SEQ ID NO: 3180 - RNA, 21 nt, synthetic construct
  source 1..21: mol_type = other RNA
  modified_base 1: mod_base = OTHER; note = 2'-O-methylcytidine-3'-phosphorothioate
  modified_base 2: mod_base = OTHER; note = 2'-O-methyluridine-3'-phosphorothioate
  modified_base 3: mod_base = OTHER; note = 2'-O-methylguanosine-3'-phosphate
  modified_base 4: mod_base = OTHER; note = 2'-O-methyladenosine-3'-phosphate
  modified_base 5: mod_base = OTHER; note = 2'-O-methyladenosine-3'-phosphate
  modified_base 6: mod_base = OTHER; note = 2'-O-methylguanosine-3'-phosphate
  modified_base 7: mod_base = OTHER; note = 2'-fluoroguanosine-3'-phosphate
  modified_base 8: mod_base = OTHER; note = 2'-O-methyladenosine-3'-phosphate
  modified_base 9: mod_base = OTHER; note = 2'-fluorocytidine-3'-phosphate
  modified_base 10: mod_base = OTHER; note = 2'-fluoroadenosine-3'-phosphate
  modified_base 11: mod_base = OTHER; note = 2'-fluorocytidine-3'-phosphate
  modified_base 12: mod_base = OTHER; note = 2'-O-methylcytidine-3'-phosphate
  modified_base 13: mod_base = OTHER; note = 2'-O-methyladenosine-3'-phosphate
  modified_base 14: mod_base = OTHER; note = 2'-O-methyluridine-3'-phosphate
  modified_base 15: mod_base = OTHER; note = 2'-O-methylcytidine-3'-phosphate
  modified_base 16: mod_base = OTHER; note = 2'-O-methyluridine-3'-phosphate
  modified_base 17: mod_base = OTHER; note = 2'-O-methylcytidine-3'-phosphate
  modified_base 18: mod_base = OTHER; note = 2'-O-methylcytidine-3'-phosphate
  modified_base 19: mod_base = OTHER; note = 2'-O-methyladenosine-3'-phosphorothioate
  modified_base 20: mod_base = OTHER; note = 2'-O-methylcytidine-3'-phosphorothioate
  modified_base 21: mod_base = OTHER; note = 2'-O-methyladenosine-3'-phosphate
ctgaaggacaccatctccaca

SEQ ID NO: 3181 - RNA, 21 nt, synthetic construct
  source 1..21: mol_type = other RNA
  modified_base 1: mod_base = OTHER; note = 2'-O-methylguanosine-3'-phosphorothioate
  modified_base 2: mod_base = OTHER; note = 2'-O-methyladenosine-3'-phosphorothioate
  modified_base 3: mod_base = OTHER; note = 2'-O-methylcytidine-3'-phosphate
  modified_base 4: mod_base = OTHER; note = 2'-O-methylcytidine-3'-phosphate
  modified_base 5: mod_base = OTHER; note = 2'-O-methyladenosine-3'-phosphate
  modified_base 6: mod_base = OTHER; note = 2'-O-methylcytidine-3'-phosphate
  modified_base 7: mod_base = OTHER; note = 2'-fluorocytidine-3'-phosphate
  modified_base 8: mod_base = OTHER; note = 2'-O-methyladenosine-3'-phosphate
  modified_base 9: mod_base = OTHER; note = 2'-fluorouridine-3'-phosphate
  modified_base 10: mod_base = OTHER; note = 2'-fluorocytidine-3'-phosphate
  modified_base 11: mod_base = OTHER; note = 2'-fluorouridine-3'-phosphate
  modified_base 12: mod_base = OTHER; note = 2'-O-methylcytidine-3'-phosphate
  modified_base 13: mod_base = OTHER; note = 2'-O-methylguanosine-3'-phosphate
  modified_base 14: mod_base = OTHER; note = 2'-O-methylguanosine-3'-phosphate
  modified_base 15: mod_base = OTHER; note = 2'-O-methylcytidine-3'-phosphate
  modified_base 16: mod_base = OTHER; note = 2'-O-methyluridine-3'-phosphate
  modified_base 17: mod_base = OTHER; note = 2'-O-methylguanosine-3'-phosphate
  modified_base 18: mod_base = OTHER; note = 2'-O-methyluridine-3'-phosphate
  modified_base 19: mod_base = OTHER; note = 2'-O-methylguanosine-3'-phosphorothioate
  modified_base 20: mod_base = OTHER; note = 2'-O-methyladenosine-3'-phosphorothioate
  modified_base 21: mod_base = OTHER; note = 2'-O-methyladenosine-3'-phosphate
gaccaccatctcggctgtgaa

SEQ ID NO: 3182 - RNA, 21 nt, synthetic construct
  source 1..21: mol_type = other RNA
  modified_base 1: mod_base = OTHER; note = 2'-O-methylcytidine-3'-phosphorothioate
  modified_base 2: mod_base = OTHER; note = 2'-O-methylcytidine-3'-phosphorothioate
  modified_base 3: mod_base = OTHER; note = 2'-O-methyladenosine-3'-phosphate
  modified_base 4: mod_base = OTHER; note = 2'-O-methylguanosine-3'-phosphate
  modified_base 5: mod_base = OTHER; note = 2'-O-methyluridine-3'-phosphate
  modified_base 6: mod_base = OTHER; note = 2'-O-methyluridine-3'-phosphate
  modified_base 7: mod_base = OTHER; note = 2'-fluorouridine-3'-phosphate
  modified_base 8: mod_base = OTHER; note = 2'-O-methyluridine-3'-phosphate
  modified_base 9: mod_base = OTHER; note = 2'-fluorouridine-3'-phosphate
  modified_base 10: mod_base = OTHER; note = 2'-fluoroadenosine-3'-phosphate
  modified_base 11: mod_base = OTHER; note = 2'-fluoroadenosine-3'-phosphate
  modified_base 12: mod_base = OTHER; note = 2'-O-methylguanosine-3'-phosphate
  modified_base 13: mod_base = OTHER; note = 2'-O-methylguanosine-3'-phosphate
  modified_base 14: mod_base = OTHER; note = 2'-O-methylguanosine-3'-phosphate
  modified_base 15: mod_base = OTHER; note = 2'-O-methyladenosine-3'-phosphate
  modified_base 16: mod_base = OTHER; note = 2'-O-methylcytidine-3'-phosphate
  modified_base 17: mod_base = OTHER; note = 2'-O-methyladenosine-3'-phosphate
  modified_base 18: mod_base = OTHER; note = 2'-O-methylcytidine-3'-phosphate
  modified_base 19: mod_base = OTHER; note = 2'-O-methylcytidine-3'-phosphorothioate
  modified_base 20: mod_base = OTHER; note = 2'-O-methyladenosine-3'-phosphorothioate
  modified_base 21: mod_base = OTHER; note = 2'-O-methyladenosine-3'-phosphate
ccagtttttaagggacaccaa

SEQ ID NO: 3183 - RNA, 21 nt, synthetic construct
  source 1..21: mol_type = other RNA
  modified_base 1: mod_base = OTHER; note = 2'-O-methylguanosine-3'-phosphorothioate
  modified_base 2: mod_base = OTHER; note = 2'-O-methylguanosine-3'-phosphorothioate
  modified_base 3: mod_base = OTHER; note = 2'-O-methylcytidine-3'-phosphate
  modified_base 4: mod_base = OTHER; note = 2'-O-methylcytidine-3'-phosphate
  modified_base 5: mod_base = OTHER; note = 2'-O-methyladenosine-3'-phosphate
  modified_base 6: mod_base = OTHER; note = 2'-O-methylguanosine-3'-phosphate
  modified_base 7: mod_base = OTHER; note = 2'-fluoroadenosine-3'-phosphate
  modified_base 8: mod_base = OTHER; note = 2'-O-methylguanosine-3'-phosphate
  modified_base 9: mod_base = OTHER; note = 2'-fluoroadenosine-3'-phosphate
  modified_base 10: mod_base = OTHER; note = 2'-fluorocytidine-3'-phosphate
  modified_base 11: mod_base = OTHER; note = 2'-fluoroadenosine-3'-phosphate
  modified_base 12: mod_base = OTHER; note = 2'-O-methylcytidine-3'-phosphate
  modified_base 13: mod_base = OTHER; note = 2'-O-methyluridine-3'-phosphate
  modified_base 14: mod_base = OTHER; note = 2'-O-methylguanosine-3'-phosphate
  modified_base 15: mod_base = OTHER; note = 2'-O-methylcytidine-3'-phosphate
  modified_base 16: mod_base = OTHER; note = 2'-O-methylguanosine-3'-phosphate
  modified_base 17: mod_base = OTHER; note = 2'-O-methylguanosine-3'-phosphate
  modified_base 18: mod_base = OTHER; note = 2'-O-methyladenosine-3'-phosphate
  modified_base 19: mod_base = OTHER; note = 2'-O-methyladenosine-3'-phosphorothioate
  modified_base 20: mod_base = OTHER; note = 2'-O-methyluridine-3'-phosphorothioate
  modified_base 21: mod_base = OTHER; note = 2'-O-methyladenosine-3'-phosphate
ggccagagacactgcggaata

SEQ ID NO: 3184 - RNA, 21 nt, synthetic construct
  source 1..21: mol_type = other RNA
  modified_base 1: mod_base = OTHER; note = 2'-O-methylcytidine-3'-phosphorothioate
  modified_base 2: mod_base = OTHER; note = 2'-O-methylguanosine-3'-phosphorothioate
  modified_base 3: mod_base = OTHER; note = 2'-O-methyluridine-3'-phosphate
  modified_base 4: mod_base = OTHER; note = 2'-O-methyluridine-3'-phosphate
  modified_base 5: mod_base = OTHER; note = 2'-O-methylcytidine-3'-phosphate
  modified_base 6: mod_base = OTHER; note = 2'-O-methylcytidine-3'-phosphate
  modified_base 7: mod_base = OTHER; note = 2'-fluorocytidine-3'-phosphate
  modified_base 8: mod_base = OTHER; note = 2'-O-methyladenosine-3'-phosphate
  modified_base 9: mod_base = OTHER; note = 2'-fluorouridine-3'-phosphate
  modified_base 10: mod_base = OTHER; note = 2'-fluorocytidine-3'-phosphate
  modified_base 11: mod_base = OTHER; note = 2'-fluoroguanosine-3'-phosphate
  modified_base 12: mod_base = OTHER; note = 2'-O-methylcytidine-3'-phosphate
  modified_base 13: mod_base = OTHER; note = 2'-O-methylguanosine-3'-phosphate
  modified_base 14: mod_base = OTHER; note = 2'-O-methyladenosine-3'-phosphate
  modified_base 15: mod_base = OTHER; note = 2'-O-methylguanosine-3'-phosphate
  modified_base 16: mod_base = OTHER; note = 2'-O-methylcytidine-3'-phosphate
  modified_base 17: mod_base = OTHER; note = 2'-O-methyladenosine-3'-phosphate
  modified_base 18: mod_base = OTHER; note = 2'-O-methylcytidine-3'-phosphate
  modified_base 19: mod_base = OTHER; note = 2'-O-methyluridine-3'-phosphorothioate
  modified_base 20: mod_base = OTHER; note = 2'-O-methyluridine-3'-phosphorothioate
  modified_base 21: mod_base = OTHER; note = 2'-O-methyladenosine-3'-phosphate
cgttcccatcgcgagcactta

SEQ ID NO: 3185 - RNA, 21 nt, synthetic construct
  source 1..21: mol_type = other RNA
  modified_base 1: mod_base = OTHER; note = 2'-O-methylcytidine-3'-phosphorothioate
  modified_base 2: mod_base = OTHER; note = 2'-O-methylcytidine-3'-phosphorothioate
  modified_base 3: mod_base = OTHER; note = 2'-O-methylguanosine-3'-phosphate
  modified_base 4: mod_base = OTHER; note = 2'-O-methylguanosine-3'-phosphate
  modified_base 5: mod_base = OTHER; note = 2'-O-methylguanosine-3'-phosphate
  modified_base 6: mod_base = OTHER; note = 2'-O-methyladenosine-3'-phosphate
  modified_base 7: mod_base = OTHER; note = 2'-fluorocytidine-3'-phosphate
  modified_base 8: mod_base = OTHER; note = 2'-O-methyladenosine-3'-phosphate
  modified_base 9: mod_base = OTHER; note = 2'-fluorouridine-3'-phosphate
  modified_base 10: mod_base = OTHER; note = 2'-fluorocytidine-3'-phosphate
  modified_base 11: mod_base = OTHER; note = 2'-fluoroguanosine-3'-phosphate
  modified_base 12: mod_base = OTHER; note = 2'-O-methyladenosine-3'-phosphate
  modified_base 13: mod_base = OTHER; note = 2'-O-methylcytidine-3'-phosphate
  modified_base 14: mod_base = OTHER; note = 2'-O-methyladenosine-3'-phosphate
  modified_base 15: mod_base = OTHER; note = 2'-O-methyladenosine-3'-phosphate
  modified_base 16: mod_base = OTHER; note = 2'-O-methylcytidine-3'-phosphate
  modified_base 17: mod_base = OTHER; note = 2'-O-methylcytidine-3'-phosphate
  modified_base 18: mod_base = OTHER; note = 2'-O-methylcytidine-3'-phosphate
  modified_base 19: mod_base = OTHER; note = 2'-O-methyladenosine-3'-phosphorothioate
  modified_base 20: mod_base = OTHER; note = 2'-O-methylcytidine-3'-phosphorothioate
  modified_base 21: mod_base = OTHER; note = 2'-O-methyladenosine-3'-phosphate
ccgggacatcgacaacccaca

SEQ ID NO: 3186 - RNA, 21 nt, synthetic construct
  source 1..21: mol_type = other RNA
  modified_base 1: mod_base = OTHER; note = 2'-O-methyluridine-3'-phosphorothioate
  modified_base 2: mod_base = OTHER; note = 2'-O-methylcytidine-3'-phosphorothioate
  modified_base 3: mod_base = OTHER; note = 2'-O-methyluridine-3'-phosphate
  modified_base 4: mod_base = OTHER; note = 2'-O-methylguanosine-3'-phosphate
  modified_base 5: mod_base = OTHER; note = 2'-O-methyladenosine-3'-phosphate
  modified_base 6: mod_base = OTHER; note = 2'-O-methyluridine-3'-phosphate
  modified_base 7: mod_base = OTHER; note = 2'-fluoroguanosine-3'-phosphate
  modified_base 8: mod_base = OTHER; note = 2'-O-methyladenosine-3'-phosphate
  modified_base 9: mod_base = OTHER; note = 2'-fluorouridine-3'-phosphate
  modified_base 10: mod_base = OTHER; note = 2'-fluorocytidine-3'-phosphate
  modified_base 11: mod_base = OTHER; note = 2'-fluorouridine-3'-phosphate
  modified_base 12: mod_base = OTHER; note = 2'-O-methyladenosine-3'-phosphate
  modified_base 13: mod_base = OTHER; note = 2'-O-methylguanosine-3'-phosphate
  modified_base 14: mod_base = OTHER; note = 2'-O-methylguanosine-3'-phosphate
  modified_base 15: mod_base = OTHER; note = 2'-O-methylcytidine-3'-phosphate
  modified_base 16: mod_base = OTHER; note = 2'-O-methyluridine-3'-phosphate
  modified_base 17: mod_base = OTHER; note = 2'-O-methylcytidine-3'-phosphate
  modified_base 18: mod_base = OTHER; note = 2'-O-methylcytidine-3'-phosphate
  modified_base 19: mod_base = OTHER; note = 2'-O-methylcytidine-3'-phosphorothioate
  modified_base 20: mod_base = OTHER; note = 2'-O-methyladenosine-3'-phosphorothioate
  modified_base 21: mod_base = OTHER; note = 2'-O-methyladenosine-3'-phosphate
tctgatgatctaggctcccaa

SEQ ID NO: 3187 - RNA, 21 nt, synthetic construct
  source 1..21: mol_type = other RNA
  modified_base 1: mod_base = OTHER; note = 2'-O-methylcytidine-3'-phosphorothioate
  modified_base 2: mod_base = OTHER; note = 2'-O-methyluridine-3'-phosphorothioate
  modified_base 3: mod_base = OTHER; note = 2'-O-methylguanosine-3'-phosphate
  modified_base 4: mod_base = OTHER; note = 2'-O-methylcytidine-3'-phosphate
  modified_base 5: mod_base = OTHER; note = 2'-O-methyladenosine-3'-phosphate
  modified_base 6: mod_base = OTHER; note = 2'-O-methylguanosine-3'-phosphate
  modified_base 7: mod_base = OTHER; note = 2'-fluoroadenosine-3'-phosphate
  modified_base 8: mod_base = OTHER; note = 2'-O-methyladenosine-3'-phosphate
  modified_base 9: mod_base = OTHER; note = 2'-fluoroguanosine-3'-phosphate
  modified_base 10: mod_base = OTHER; note = 2'-fluoroadenosine-3'-phosphate
  modified_base 11: mod_base = OTHER; note = 2'-fluorocytidine-3'-phosphate
  modified_base 12: mod_base = OTHER; note = 2'-O-methylcytidine-3'-phosphate
  modified_base 13: mod_base = OTHER; note = 2'-O-methylcytidine-3'-phosphate
  modified_base 14: mod_base = OTHER; note = 2'-O-methyluridine-3'-phosphate
  modified_base 15: mod_base = OTHER; note = 2'-O-methylcytidine-3'-phosphate
  modified_base 16: mod_base = OTHER; note = 2'-O-methylcytidine-3'-phosphate
  modified_base 17: mod_base = OTHER; note = 2'-O-methyladenosine-3'-phosphate
  modified_base 18: mod_base = OTHER; note = 2'-O-methylguanosine-3'-phosphate
  modified_base 19: mod_base = OTHER; note = 2'-O-methyladenosine-3'-phosphorothioate
  modified_base 20: mod_base = OTHER; note = 2'-O-methylcytidine-3'-phosphorothioate
  modified_base 21: mod_base = OTHER; note = 2'-O-methyladenosine-3'-phosphate
ctgcagaagaccctccagaca

SEQ ID NO: 3188 - RNA, 21 nt, synthetic construct
  source 1..21: mol_type = other RNA
  modified_base 1: mod_base = OTHER; note = 2'-O-methylcytidine-3'-phosphorothioate
  modified_base 2: mod_base = OTHER; note = 2'-O-methylguanosine-3'-phosphorothioate
  modified_base 3: mod_base = OTHER; note = 2'-O-methylcytidine-3'-phosphate
  modified_base 4: mod_base = OTHER; note = 2'-O-methylcytidine-3'-phosphate
  modified_base 5: mod_base = OTHER; note = 2'-O-methyladenosine-3'-phosphate
  modified_base 6: mod_base = OTHER; note = 2'-O-methylguanosine-3'-phosphate
  modified_base 7: mod_base = OTHER; note = 2'-fluorouridine-3'-phosphate
  modified_base 8: mod_base = OTHER; note = 2'-O-methyladenosine-3'-phosphate
  modified_base 9: mod_base = OTHER; note = 2'-fluoroguanosine-3'-phosphate
  modified_base 10: mod_base = OTHER; note = 2'-fluorocytidine-3'-phosphate
  modified_base 11: mod_base = OTHER; note = 2'-fluorouridine-3'-phosphate
  modified_base 12: mod_base = OTHER; note = 2'-O-methyluridine-3'-phosphate
  modified_base 13: mod_base = OTHER; note = 2'-O-methylguanosine-3'-phosphate
  modified_base 14: mod_base = OTHER; note = 2'-O-methylguanosine-3'-phosphate
  modified_base 15: mod_base = OTHER; note = 2'-O-methylcytidine-3'-phosphate
  modified_base 16: mod_base = OTHER; note = 2'-O-methyluridine-3'-phosphate
  modified_base 17: mod_base = OTHER; note = 2'-O-methylguanosine-3'-phosphate
  modified_base 18: mod_base = OTHER; note = 2'-O-methylcytidine-3'-phosphate
  modified_base 19: mod_base = OTHER; note = 2'-O-methylcytidine-3'-phosphorothioate
  modified_base 20: mod_base = OTHER; note = 2'-O-methyluridine-3'-phosphorothioate
  modified_base 21: mod_base = OTHER; note = 2'-O-methyladenosine-3'-phosphate
cgccagtagcttggctgccta

SEQ ID NO: 3189 - RNA, 21 nt, synthetic construct
  source 1..21: mol_type = other RNA
  modified_base 1: mod_base = OTHER; note = 2'-O-methylcytidine-3'-phosphorothioate
  modified_base 2: mod_base = OTHER; note = 2'-O-methylguanosine-3'-phosphorothioate
  modified_base 3: mod_base = OTHER; note = 2'-O-methylcytidine-3'-phosphate
  modified_base 4: mod_base = OTHER; note = 2'-O-methyluridine-3'-phosphate
  modified_base 5: mod_base = OTHER; note = 2'-O-methyluridine-3'-phosphate
  modified_base 6: mod_base = OTHER; note = 2'-O-methylcytidine-3'-phosphate
  modified_base 7: mod_base = OTHER; note = 2'-fluoroadenosine-3'-phosphate
  modified_base 8: mod_base = OTHER; note = 2'-O-methylcytidine-3'-phosphate
  modified_base 9: mod_base = OTHER; note = 2'-fluoroadenosine-3'-phosphate
  modified_base 10: mod_base = OTHER; note = 2'-fluoroguanosine-3'-phosphate
  modified_base 11: mod_base = OTHER; note = 2'-fluoroguanosine-3'-phosphate
  modified_base 12: mod_base = OTHER; note = 2'-O-methylcytidine-3'-phosphate
  modified_base 13: mod_base = OTHER; note = 2'-O-methyluridine-3'-phosphate
  modified_base 14: mod_base = OTHER; note = 2'-O-methylguanosine-3'-phosphate
  modified_base 15: mod_base = OTHER; note = 2'-O-methyladenosine-3'-phosphate
  modified_base 16: mod_base = OTHER; note = 2'-O-methylguanosine-3'-phosphate
  modified_base 17: mod_base = OTHER; note = 2'-O-methyluridine-3'-phosphate
  modified_base 18: mod_base = OTHER; note = 2'-O-methylcytidine-3'-phosphate
  modified_base 19: mod_base = OTHER; note = 2'-O-methylcytidine-3'-phosphorothioate
  modified_base 20: mod_base = OTHER; note = 2'-O-methyladenosine-3'-phosphorothioate
  modified_base 21: mod_base = OTHER; note = 2'-O-methyladenosine-3'-phosphate
cgcttcacaggctgagtccaa

SEQ ID NO: 3190 - RNA, 21 nt, synthetic construct
  source 1..21: mol_type = other RNA
  modified_base 1: mod_base = OTHER; note = 2'-O-methyluridine-3'-phosphorothioate
  modified_base 2: mod_base = OTHER; note = 2'-O-methyluridine-3'-phosphorothioate
  modified_base 3: mod_base = OTHER; note = 2'-O-methyluridine-3'-phosphate
  modified_base 4: mod_base = OTHER; note = 2'-O-methyluridine-3'-phosphate
  modified_base 5: mod_base = OTHER; note = 2'-O-methyluridine-3'-phosphate
  modified_base 6: mod_base = OTHER; note = 2'-O-methyluridine-3'-phosphate
  modified_base 7: mod_base = OTHER; note = 2'-fluorouridine-3'-phosphate
  modified_base 8: mod_base = OTHER; note = 2'-O-methyladenosine-3'-phosphate
  modified_base 9: mod_base = OTHER; note = 2'-fluoroguanosine-3'-phosphate
  modified_base 10: mod_base = OTHER; note = 2'-fluorocytidine-3'-phosphate
  modified_base 11: mod_base = OTHER; note = 2'-fluoroadenosine-3'-phosphate
  modified_base 12: mod_base = OTHER; note = 2'-O-methyluridine-3'-phosphate
  modified_base 13: mod_base = OTHER; note = 2'-O-methylcytidine-3'-phosphate
  modified_base 14: mod_base = OTHER; note = 2'-O-methylcytidine-3'-phosphate
  modified_base 15: mod_base = OTHER; note = 2'-O-methyluridine-3'-phosphate
  modified_base 16: mod_base = OTHER; note = 2'-O-methyluridine-3'-phosphate
  modified_base 17: mod_base = OTHER; note = 2'-O-methyluridine-3'-phosphate
  modified_base 18: mod_base = OTHER; note = 2'-O-methyluridine-3'-phosphate
  modified_base 19: mod_base = OTHER; note = 2'-O-methylguanosine-3'-phosphorothioate
  modified_base 20: mod_base = OTHER; note = 2'-O-methylguanosine-3'-phosphorothioate
  modified_base 21: mod_base = OTHER; note = 2'-O-methyladenosine-3'-phosphate
tttttttagcatccttttgga

SEQ ID NO: 3191 - RNA, 21 nt, synthetic construct
  source 1..21: mol_type = other RNA
  modified_base 1: mod_base = OTHER; note = 2'-O-methylguanosine-3'-phosphorothioate
  modified_base 2: mod_base = OTHER; note = 2'-O-methyladenosine-3'-phosphorothioate
  modified_base 3: mod_base = OTHER; note = 2'-O-methyladenosine-3'-phosphate
  modified_base 4: mod_base = OTHER; note = 2'-O-methylguanosine-3'-phosphate
  modified_base 5: mod_base = OTHER; note = 2'-O-methylcytidine-3'-phosphate
  modified_base 6: mod_base = OTHER; note = 2'-O-methylcytidine-3'-phosphate
  modified_base 7: mod_base = OTHER; note = 2'-fluoroadenosine-3'-phosphate
  modified_base 8: mod_base = OTHER; note = 2'-O-methyladenosine-3'-phosphate
  modified_base 9: mod_base = OTHER; note = 2'-fluoroadenosine-3'-phosphate
  modified_base 10: mod_base = OTHER; note = 2'-fluoroguanosine-3'-phosphate
  modified_base 11: mod_base = OTHER; note = 2'-fluorocytidine-3'-phosphate
  modified_base 12: mod_base = OTHER; note = 2'-O-methylguanosine-3'-phosphate
  modified_base 13: mod_base = OTHER; note = 2'-O-methylcytidine-3'-phosphate
  modified_base 14: mod_base = OTHER; note = 2'-O-methyladenosine-3'-phosphate
  modified_base 15: mod_base = OTHER; note = 2'-O-methylguanosine-3'-phosphate
  modified_base 16: mod_base = OTHER; note = 2'-O-methylguanosine-3'-phosphate
  modified_base 17: mod_base = OTHER; note = 2'-O-methylguanosine-3'-phosphate
  modified_base 18: mod_base = OTHER; note = 2'-O-methyluridine-3'-phosphate
  modified_base 19: mod_base = OTHER; note = 2'-O-methylcytidine-3'-phosphorothioate
  modified_base 20: mod_base = OTHER; note = 2'-O-methyladenosine-3'-phosphorothioate
  modified_base 21: mod_base = OTHER; note = 2'-O-methyladenosine-3'-phosphate
gaagccaaagcgcagggtcaa

SEQ ID NO: 3192 - RNA, 21 nt, synthetic construct
  source 1..21: mol_type = other RNA
  modified_base 1: mod_base = OTHER; note = 2'-O-methylguanosine-3'-phosphorothioate
  modified_base 2: mod_base = OTHER; note = 2'-O-methyladenosine-3'-phosphorothioate
  modified_base 3: mod_base = OTHER; note = 2'-O-methylguanosine-3'-phosphate
  modified_base 4: mod_base = OTHER; note = 2'-O-methylguanosine-3'-phosphate
  modified_base 5: mod_base = OTHER; note = 2'-O-methyladenosine-3'-phosphate
  modified_base 6: mod_base = OTHER; note = 2'-O-methylguanosine-3'-phosphate
  modified_base 7: mod_base = OTHER; note = 2'-fluoroguanosine-3'-phosphate
  modified_base 8: mod_base = OTHER; note = 2'-O-methyladenosine-3'-phosphate
  modified_base 9: mod_base = OTHER; note = 2'-fluorouridine-3'-phosphate
  modified_base 10: mod_base = OTHER; note = 2'-fluorocytidine-3'-phosphate
  modified_base 11: mod_base = OTHER; note = 2'-fluoroadenosine-3'-phosphate
  modified_base 12: mod_base = OTHER; note = 2'-O-methyluridine-3'-phosphate
  modified_base 13: mod_base = OTHER; note = 2'-O-methylguanosine-3'-phosphate
  modified_base 14: mod_base = OTHER; note = 2'-O-methyladenosine-3'-phosphate
  modified_base 15: mod_base = OTHER; note = 2'-O-methylguanosine-3'-phosphate
  modified_base 16: mod_base = OTHER; note = 2'-O-methylguanosine-3'-phosphate
  modified_base 17: mod_base = OTHER; note = 2'-O-methyladenosine-3'-phosphate
  modified_base 18: mod_base = OTHER; note = 2'-O-methylcytidine-3'-phosphate
  modified_base 19: mod_base = OTHER; note = 2'-O-methylcytidine-3'-phosphorothioate
  modified_base 20: mod_base = OTHER; note = 2'-O-methyladenosine-3'-phosphorothioate
  modified_base 21: mod_base = OTHER; note = 2'-O-methyladenosine-3'-phosphate
gaggaggatcatgaggaccaa

SEQ ID NO: 3193 - RNA, 21 nt, synthetic construct
  source 1..21: mol_type = other RNA
  modified_base 1: mod_base = OTHER; note = 2'-O-methylguanosine-3'-phosphorothioate
  modified_base 2: mod_base = OTHER; note = 2'-O-methylcytidine-3'-phosphorothioate
  modified_base 3: mod_base = OTHER; note = 2'-O-methyladenosine-3'-phosphate
  modified_base 4: mod_base = OTHER; note = 2'-O-methylcytidine-3'-phosphate
  modified_base 5: mod_base = OTHER; note = 2'-O-methylguanosine-3'-phosphate
  modified_base 6: mod_base = OTHER; note = 2'-O-methylcytidine-3'-phosphate
  modified_base 7: mod_base = OTHER; note = 2'-fluoroadenosine-3'-phosphate
  modified_base 8: mod_base = OTHER; note = 2'-O-methyluridine-3'-phosphate
  modified_base 9: mod_base = OTHER; note = 2'-fluorouridine-3'-phosphate
  modified_base 10: mod_base = OTHER; note = 2'-fluoroadenosine-3'-phosphate
  modified_base 11: mod_base = OTHER; note = 2'-fluorocytidine-3'-phosphate
  modified_base 12: mod_base = OTHER; note = 2'-O-methyladenosine-3'-phosphate
  modified_base 13: mod_base = OTHER; note = 2'-O-methylguanosine-3'-phosphate
  modified_base 14: mod_base = OTHER; note = 2'-O-methylcytidine-3'-phosphate
  modified_base 15: mod_base = OTHER; note = 2'-O-methylcytidine-3'-phosphate
  modified_base 16: mod_base = OTHER; note = 2'-O-methyladenosine-3'-phosphate
  modified_base 17: mod_base = OTHER; note = 2'-O-methylguanosine-3'-phosphate
  modified_base 18: mod_base = OTHER; note = 2'-O-methylcytidine-3'-phosphate
  modified_base 19: mod_base = OTHER; note = 2'-O-methyluridine-3'-phosphorothioate
  modified_base 20: mod_base = OTHER; note = 2'-O-methylguanosine-3'-phosphorothioate
  modified_base 21: mod_base = OTHER; note = 2'-O-methyladenosine-3'-phosphate
gcacgcattacagccagctga

SEQ ID NO: 3194 - RNA, 21 nt, synthetic construct
  source 1..21: mol_type = other RNA
  modified_base 1: mod_base = OTHER; note = 2'-O-methylcytidine-3'-phosphorothioate
  modified_base 2: mod_base = OTHER; note = 2'-O-methyluridine-3'-phosphorothioate
  modified_base 3: mod_base = OTHER; note = 2'-O-methyluridine-3'-phosphate
  modified_base 4: mod_base = OTHER; note = 2'-O-methylcytidine-3'-phosphate
  modified_base 5: mod_base = OTHER; note = 2'-O-methyladenosine-3'-phosphate
  modified_base 6: mod_base = OTHER; note = 2'-O-methyluridine-3'-phosphate
  modified_base 7: mod_base = OTHER; note = 2'-fluorouridine-3'-phosphate
  modified_base 8: mod_base = OTHER; note = 2'-O-methylguanosine-3'-phosphate
  modified_base 9: mod_base = OTHER; note = 2'-fluoroadenosine-3'-phosphate
  modified_base 10: mod_base = OTHER; note = 2'-fluoroadenosine-3'-phosphate
  modified_base 11: mod_base = OTHER; note = 2'-fluoroadenosine-3'-phosphate
  modified_base 12: mod_base = OTHER; note = 2'-O-methyladenosine-3'-phosphate
  modified_base 13: mod_base = OTHER; note = 2'-O-methylcytidine-3'-phosphate
  modified_base 14: mod_base = OTHER; note = 2'-O-methylcytidine-3'-phosphate
  modified_base 15: mod_base = OTHER; note = 2'-O-methyladenosine-3'-phosphate
  modified_base 16: mod_base = OTHER; note = 2'-O-methylcytidine-3'-phosphate
  modified_base 17: mod_base = OTHER; note = 2'-O-methylcytidine-3'-phosphate
  modified_base 18: mod_base = OTHER; note = 2'-O-methyladenosine-3'-phosphate
  modified_base 19: mod_base = OTHER; note = 2'-O-methylcytidine-3'-phosphorothioate
  modified_base 20: mod_base = OTHER; note = 2'-O-methylguanosine-3'-phosphorothioate
  modified_base 21: mod_base = OTHER; note = 2'-O-methyladenosine-3'-phosphate
cttcattgaaaaccaccacga

SEQ ID NO: 3195 - RNA, 21 nt, synthetic construct
  source 1..21: mol_type = other RNA
  modified_base 1: mod_base = OTHER; note = 2'-O-methyluridine-3'-phosphorothioate
  modified_base 2: mod_base = OTHER; note = 2'-O-methyluridine-3'-phosphorothioate
  modified_base 3: mod_base = OTHER; note = 2'-O-methyluridine-3'-phosphate
  modified_base 4: mod_base = OTHER; note = 2'-O-methyluridine-3'-phosphate
  modified_base 5: mod_base = OTHER; note = 2'-O-methyluridine-3'-phosphate
  modified_base 6: mod_base = OTHER; note = 2'-O-methylguanosine-3'-phosphate
  modified_base 7: mod_base = OTHER; note = 2'-fluoroadenosine-3'-phosphate
  modified_base 8: mod_base = OTHER; note = 2'-O-methyluridine-3'-phosphate
  modified_base 9: mod_base = OTHER; note = 2'-fluoroguanosine-3'-phosphate
  modified_base 10: mod_base = OTHER; note = 2'-fluoroguanosine-3'-phosphate
  modified_base 11: mod_base = OTHER; note = 2'-fluorocytidine-3'-phosphate
  modified_base 12: mod_base = OTHER; note = 2'-O-methylcytidine-3'-phosphate
  modified_base 13: mod_base = OTHER; note = 2'-O-methyladenosine-3'-phosphate
  modified_base 14: mod_base = OTHER; note = 2'-O-methylcytidine-3'-phosphate
  modified_base 15: mod_base = OTHER; note = 2'-O-methyladenosine-3'-phosphate
  modified_base 16: mod_base = OTHER; note = 2'-O-methyluridine-3'-phosphate
  modified_base 17: mod_base = OTHER; note = 2'-O-methyladenosine-3'-phosphate
  modified_base 18: mod_base = OTHER; note = 2'-O-methyladenosine-3'-phosphate
  modified_base 19: mod_base = OTHER; note = 2'-O-methyluridine-3'-phosphorothioate
  modified_base 20: mod_base = OTHER; note = 2'-O-methyladenosine-3'-phosphorothioate
  modified_base 21: mod_base = OTHER; note = 2'-O-methyladenosine-3'-phosphate
tttttgatggccacataataa

SEQ ID NO: 3196 - RNA, 21 nt, synthetic construct
  source 1..21: mol_type = other RNA
  modified_base 1: mod_base = OTHER; note = 2'-O-methylcytidine-3'-phosphorothioate
  modified_base 2: mod_base = OTHER; note = 2'-O-methylcytidine-3'-phosphorothioate
  modified_base 3: mod_base = OTHER; note = 2'-O-methyladenosine-3'-phosphate
  modified_base 4: mod_base = OTHER; note = 2'-O-methylcytidine-3'-phosphate
  modified_base 5: mod_base = OTHER; note = 2'-O-methylcytidine-3'-phosphate
  modified_base 6: mod_base = OTHER; note = 2'-O-methyluridine-3'-phosphate
  modified_base 7: mod_base = OTHER; note = 2'-fluoroguanosine-3'-phosphate
  modified_base 8: mod_base = OTHER; note = 2'-O-methylguanosine-3'-phosphate
  modified_base 9: mod_base = OTHER; note = 2'-fluoroadenosine-3'-phosphate
  modified_base 10: mod_base = OTHER; note = 2'-fluoroguanosine-3'-phosphate
  modified_base 11: mod_base = OTHER; note = 2'-fluoroguanosine-3'-phosphate
  modified_base 12: mod_base = OTHER; note = 2'-O-methyladenosine-3'-phosphate
  modified_base 13: mod_base = OTHER; note = 2'-O-methyladenosine-3'-phosphate
  modified_base 14: mod_base = OTHER; note = 2'-O-methyladenosine-3'-phosphate
  modified_base 15: mod_base = OTHER; note = 2'-O-methyladenosine-3'-phosphate
  modified_base 16: mod_base = OTHER; note = 2'-O-methylguanosine-3'-phosphate
  modified_base 17: mod_base = OTHER; note = 2'-O-methyladenosine-3'-phosphate
  modified_base 18: mod_base = OTHER; note = 2'-O-methyluridine-3'-phosphate
  modified_base 19: mod_base = OTHER; note = 2'-O-methylcytidine-3'-phosphorothioate
  modified_base 20: mod_base = OTHER; note = 2'-O-methylcytidine-3'-phosphorothioate
  modified_base 21: mod_base = OTHER; note = 2'-O-methyladenosine-3'-phosphate
ccacctggaggaaaagatcca

SEQ ID NO: 3197 - RNA, 21 nt, synthetic construct
  source 1..21: mol_type = other RNA
  modified_base 1: mod_base = OTHER; note = 2'-O-methylcytidine-3'-phosphorothioate
  modified_base 2: mod_base = OTHER; note = 2'-O-methyladenosine-3'-phosphorothioate
  modified_base 3: mod_base = OTHER; note = 2'-O-methyladenosine-3'-phosphate
  modified_base 4: mod_base = OTHER; note = 2'-O-methylguanosine-3'-phosphate
  modified_base 5: mod_base = OTHER; note = 2'-O-methylguanosine-3'-phosphate
  modified_base 6: mod_base = OTHER; note = 2'-O-methylcytidine-3'-phosphate
  modified_base 7: mod_base = OTHER; note = 2'-fluorocytidine-3'-phosphate
  modified_base 8: mod_base = OTHER; note = 2'-O-methyladenosine-3'-phosphate
  modified_base 9: mod_base = OTHER; note = 2'-fluoroadenosine-3'-phosphate
  modified_base 10: mod_base = OTHER; note = 2'-fluoroguanosine-3'-phosphate
  modified_base 11: mod_base = OTHER; note = 2'-fluorocytidine-3'-phosphate
  modified_base 12: mod_base = OTHER; note = 2'-O-methylcytidine-3'-phosphate
  modified_base 13: mod_base = OTHER; note = 2'-O-methyladenosine-3'-phosphate
  modified_base 14: mod_base = OTHER; note = 2'-O-methyladenosine-3'-phosphate
  modified_base 15: mod_base = OTHER; note = 2'-O-methylguanosine-3'-phosphate
  modified_base 16: mod_base = OTHER; note = 2'-O-methylcytidine-3'-phosphate
  modified_base 17: mod_base = OTHER; note = 2'-O-methylcytidine-3'-phosphate
  modified_base 18: mod_base = OTHER; note = 2'-O-methyluridine-3'-phosphate
  modified_base 19: mod_base = OTHER; note = 2'-O-methylcytidine-3'-phosphorothioate
  modified_base 20: mod_base = OTHER; note = 2'-O-methyluridine-3'-phosphorothioate
  modified_base 21: mod_base = OTHER; note = 2'-O-methyladenosine-3'-phosphate
caaggccaagccaagcctcta

SEQ ID NO: 3198 - RNA, 21 nt, synthetic construct
  source 1..21: mol_type = other RNA
  modified_base 1: mod_base = OTHER; note = 2'-O-methylguanosine-3'-phosphorothioate
  modified_base 2: mod_base = OTHER; note = 2'-O-methyladenosine-3'-phosphorothioate
  modified_base 3: mod_base = OTHER; note = 2'-O-methylguanosine-3'-phosphate
  modified_base 4: mod_base = OTHER; note = 2'-O-methylguanosine-3'-phosphate
  modified_base 5: mod_base = OTHER; note = 2'-O-methyladenosine-3'-phosphate
  modified_base 6: mod_base = OTHER; note = 2'-O-methylcytidine-3'-phosphate
  modified_base 7: mod_base = OTHER; note = 2'-fluorocytidine-3'-phosphate
  modified_base 8: mod_base = OTHER; note = 2'-O-methyladenosine-3'-phosphate
  modified_base 9: mod_base = OTHER; note = 2'-fluoroguanosine-3'-phosphate
  modified_base 10: mod_base = OTHER; note = 2'-fluoroadenosine-3'-phosphate
  modified_base 11: mod_base = OTHER; note = 2'-fluorocytidine-3'-phosphate
  modified_base 12: mod_base = OTHER; note = 2'-O-methyladenosine-3'-phosphate
  modified_base 13: mod_base = OTHER; note = 2'-O-methylguanosine-3'-phosphate
  modified_base 14: mod_base = OTHER; note = 2'-O-methyladenosine-3'-phosphate
  modified_base 15: mod_base = OTHER; note = 2'-O-methylcytidine-3'-phosphate
  modified_base 16: mod_base = OTHER; note = 2'-O-methyladenosine-3'-phosphate
  modified_base 17: mod_base = OTHER; note = 2'-O-methylcytidine-3'-phosphate
  modified_base 18: mod_base = OTHER; note = 2'-O-methylguanosine-3'-phosphate
  modified_base 19: mod_base = OTHER; note = 2'-O-methylguanosine-3'-phosphorothioate
  modified_base 20: mod_base = OTHER; note = 2'-O-methyladenosine-3'-phosphorothioate
  modified_base 21: mod_base = OTHER; note = 2'-O-methyladenosine-3'-phosphate
gaggaccagacagacacggaa

SEQ ID NO: 3199 - RNA, 21 nt, synthetic construct
  source 1..21: mol_type = other RNA
  modified_base 1: mod_base = OTHER; note = 2'-O-methylguanosine-3'-phosphorothioate
  modified_base 2: mod_base = OTHER; note = 2'-O-methyladenosine-3'-phosphorothioate
  modified_base 3: mod_base = OTHER; note = 2'-O-methyluridine-3'-phosphate
  modified_base 4: mod_base = OTHER; note = 2'-O-methylguanosine-3'-phosphate
  modified_base 5: mod_base = OTHER; note = 2'-O-methylcytidine-3'-phosphate
  modified_base 6: mod_base = OTHER; note = 2'-O-methylcytidine-3'-phosphate
  modified_base 7: mod_base = OTHER; note = 2'-fluorocytidine-3'-phosphate
  modified_base 8: mod_base = OTHER; note = 2'-O-methyluridine-3'-phosphate
  modified_base 9: mod_base = OTHER; note = 2'-fluoroguanosine-3'-phosphate
  modified_base 10: mod_base = OTHER; note = 2'-fluoroadenosine-3'-phosphate
  modified_base 11: mod_base = OTHER; note = 2'-fluoroadenosine-3'-phosphate
  modified_base 12: mod_base = OTHER; note = 2'-O-methylguanosine-3'-phosphate
  modified_base 13: mod_base = OTHER; note = 2'-O-methylguanosine-3'-phosphate
  modified_base 14: mod_base = OTHER; note = 2'-O-methylguanosine-3'-phosphate
  modified_base 15: mod_base = OTHER; note = 2'-O-methylcytidine-3'-phosphate
  modified_base 16: mod_base = OTHER; note = 2'-O-methylguanosine-3'-phosphate
  modified_base 17: mod_base = OTHER; note = 2'-O-methyluridine-3'-phosphate
  modified_base 18: mod_base = OTHER; note = 2'-O-methyluridine-3'-phosphate
  modified_base 19: mod_base = OTHER; note = 2'-O-methyladenosine-3'-phosphorothioate
  modified_base 20: mod_base = OTHER; note = 2'-O-methylcytidine-3'-phosphorothioate
  modified_base 21: mod_base = OTHER; note = 2'-O-methyladenosine-3'-phosphate
gatgccctgaagggcgttaca

SEQ ID NO: 3200 - RNA, 21 nt, synthetic construct
  source 1..21: mol_type = other RNA
  modified_base 1: mod_base = OTHER; note = 2'-O-methylcytidine-3'-phosphorothioate
  modified_base 2: mod_base = OTHER; note = 2'-O-methylcytidine-3'-phosphorothioate
  modified_base 3: mod_base = OTHER; note = 2'-O-methyladenosine-3'-phosphate
  modified_base 4: mod_base = OTHER; note = 2'-O-methyladenosine-3'-phosphate
  modified_base 5: mod_base = OTHER; note = 2'-O-methylcytidine-3'-phosphate
  modified_base 6: mod_base = OTHER; note = 2'-O-methyladenosine-3'-phosphate
  modified_base 7: mod_base = OTHER; note = 2'-fluorocytidine-3'-phosphate
  modified_base 8: mod_base = OTHER; note = 2'-O-methyluridine-3'-phosphate
  modified_base 9: mod_base = OTHER; note = 2'-fluorocytidine-3'-phosphate
  modified_base 10: mod_base = OTHER; note = 2'-fluoroguanosine-3'-phosphate
  modified_base 11: mod_base = OTHER; note = 2'-fluoroadenosine-3'-phosphate
  modified_base 12: mod_base = OTHER; note = 2'-O-methylguanosine-3'-phosphate
  modified_base 13: mod_base = OTHER; note = 2'-O-methylcytidine-3'-phosphate
  modified_base 14: mod_base = OTHER; note = 2'-O-methyluridine-3'-phosphate
  modified_base 15: mod_base = OTHER; note = 2'-O-methylguanosine-3'-phosphate
  modified_base 16: mod_base = OTHER; note = 2'-O-methylguanosine-3'-phosphate
  modified_base 17: mod_base = OTHER; note = 2'-O-methylcytidine-3'-phosphate
  modified_base 18: mod_base = OTHER; note = 2'-O-methylcytidine-3'-phosphate
  modified_base 19: mod_base = OTHER; note = 2'-O-methylguanosine-3'-phosphorothioate
  modified_base 20: mod_base = OTHER; note = 2'-O-methyladenosine-3'-phosphorothioate
  modified_base 21: mod_base = OTHER; note = 2'-O-methyladenosine-3'-phosphate
ccaacactcgagctggccgaa

SEQ ID NO: 3201 - RNA, 21 nt, synthetic construct
  source 1..21: mol_type = other RNA
  modified_base 1: mod_base = OTHER; note = 2'-O-methylcytidine-3'-phosphorothioate
  modified_base 2: mod_base = OTHER; note = 2'-O-methyladenosine-3'-phosphorothioate
  modified_base 3: mod_base = OTHER; note = 2'-O-methylguanosine-3'-phosphate
  modified_base 4: mod_base = OTHER; note = 2'-O-methylguanosine-3'-phosphate
  modified_base 5: mod_base = OTHER; note = 2'-O-methylguanosine-3'-phosphate
  modified_base 6: mod_base = OTHER; note = 2'-O-methylcytidine-3'-phosphate
  modified_base 7: mod_base = OTHER; note = 2'-fluorouridine-3'-phosphate
  modified_base 8: mod_base = OTHER; note = 2'-O-methyladenosine-3'-phosphate
  modified_base 9: mod_base = OTHER; note = 2'-fluorouridine-3'-phosphate
  modified_base 10: mod_base = OTHER; note = 2'-fluoroguanosine-3'-phosphate
  modified_base 11: mod_base = OTHER; note = 2'-fluorocytidine-3'-phosphate
  modified_base 12: mod_base = OTHER; note = 2'-O-methyladenosine-3'-phosphate
  modified_base 13: mod_base = OTHER; note = 2'-O-methylcytidine-3'-phosphate
  modified_base 14: mod_base = OTHER; note = 2'-O-methylcytidine-3'-phosphate
  modified_base 15: mod_base = OTHER; note = 2'-O-methyluridine-3'-phosphate
  modified_base 16: mod_base = OTHER; note = 2'-O-methylguanosine-3'-phosphate
  modified_base 17: mod_base = OTHER; note = 2'-O-methylcytidine-3'-phosphate
  modified_base 18: mod_base = OTHER; note = 2'-O-methyladenosine-3'-phosphate
  modified_base 19: mod_base = OTHER; note = 2'-O-methylguanosine-3'-phosphorothioate
  modified_base 20: mod_base = OTHER; note = 2'-O-methylguanosine-3'-phosphorothioate
  modified_base 21: mod_base = OTHER; note = 2'-O-methyladenosine-3'-phosphate
cagggctatgcacctgcagga

SEQ ID NO: 3202 - RNA, 21 nt, synthetic construct
  source 1..21: mol_type = other RNA
  modified_base 1: mod_base = OTHER; note = 2'-O-methyladenosine-3'-phosphorothioate
  modified_base 2: mod_base = OTHER; note = 2'-O-methyladenosine-3'-phosphorothioate
  modified_base 3: mod_base = OTHER; note = 2'-O-methylguanosine-3'-phosphate
  modified_base 4: mod_base = OTHER; note = 2'-O-methylguanosine-3'-phosphate
  modified_base 5: mod_base = OTHER; note = 2'-O-methyluridine-3'-phosphate
  modified_base 6: mod_base = OTHER; note = 2'-O-methylguanosine-3'-phosphate
  modified_base 7: mod_base = OTHER; note = 2'-fluoroguanosine-3'-phosphate
  modified_base 8: mod_base = OTHER; note = 2'-O-methyluridine-3'-phosphate
  modified_base 9: mod_base = OTHER; note = 2'-fluoroguanosine-3'-phosphate
  modified_base 10: mod_base = OTHER; note = 2'-fluoroguanosine-3'-phosphate
  modified_base 11: mod_base = OTHER; note = 2'-fluoroadenosine-3'-phosphate
  modified_base 12: mod_base = OTHER; note = 2'-O-methylguanosine-3'-phosphate
  modified_base 13: mod_base = OTHER; note = 2'-O-methyluridine-3'-phosphate
  modified_base 14: mod_base = OTHER; note = 2'-O-methyladenosine-3'-phosphate
  modified_base 15: mod_base = OTHER; note = 2'-O-methylcytidine-3'-phosphate
  modified_base 16: mod_base = OTHER; note = 2'-O-methylcytidine-3'-phosphate
  modified_base 17: mod_base = OTHER; note = 2'-O-methyluridine-3'-phosphate
  modified_base 18: mod_base = OTHER; note = 2'-O-methylcytidine-3'-phosphate
  modified_base 19: mod_base = OTHER; note = 2'-O-methylcytidine-3'-phosphorothioate
  modified_base 20: mod_base = OTHER; note = 2'-O-methyluridine-3'-phosphorothioate
  modified_base 21: mod_base = OTHER; note = 2'-O-methyladenosine-3'-phosphate
aaggtggtggagtacctccta

SEQ ID NO: 3203 - RNA, 21 nt, synthetic construct
  source 1..21: mol_type = other RNA
  modified_base 1: mod_base = OTHER; note = 2'-O-methyluridine-3'-phosphorothioate
  modified_base 2: mod_base = OTHER; note = 2'-O-methyluridine-3'-phosphorothioate
  modified_base 3: mod_base = OTHER; note = 2'-O-methylguanosine-3'-phosphate
  modified_base 4: mod_base = OTHER; note = 2'-O-methyladenosine-3'-phosphate
  modified_base 5: mod_base = OTHER; note = 2'-O-methyladenosine-3'-phosphate
  modified_base 6: mod_base = OTHER; note = 2'-O-methylguanosine-3'-phosphate
  modified_base 7: mod_base = OTHER; note = 2'-fluorocytidine-3'-phosphate
  modified_base 8: mod_base = OTHER; note = 2'-O-methyluridine-3'-phosphate
  modified_base 9: mod_base = OTHER; note = 2'-fluorouridine-3'-phosphate
  modified_base 10: mod_base = OTHER; note = 2'-fluoroguanosine-3'-phosphate
  modified_base 11: mod_base = OTHER; note = 2'-fluoroadenosine-3'-phosphate
  modified_base 12: mod_base = OTHER; note = 2'-O-methylguanosine-3'-phosphate
  modified_base 13: mod_base = OTHER; note = 2'-O-methylguanosine-3'-phosphate
  modified_base 14: mod_base = OTHER; note = 2'-O-methyladenosine-3'-phosphate
  modified_base 15: mod_base = OTHER; note = 2'-O-methylguanosine-3'-phosphate
  modified_base 16: mod_base = OTHER; note = 2'-O-methylcytidine-3'-phosphate
  modified_base 17: mod_base = OTHER; note = 2'-O-methylguanosine-3'-phosphate
  modified_base 18: mod_base = OTHER; note = 2'-O-methyladenosine-3'-phosphate
  modified_base 19: mod_base = OTHER; note = 2'-O-methylguanosine-3'-phosphorothioate
  modified_base 20: mod_base = OTHER; note = 2'-O-methylguanosine-3'-phosphorothioate
  modified_base 21: mod_base = OTHER; note = 2'-O-methyladenosine-3'-phosphate
ttgaagcttgaggagcgagga

SEQ ID NO: 3204 - RNA, 21 nt, synthetic construct
  source 1..21: mol_type = other RNA
  modified_base 1: mod_base = OTHER; note = 2'-O-methylcytidine-3'-phosphorothioate
  modified_base 2: mod_base = OTHER; note = 2'-O-methylguanosine-3'-phosphorothioate
  modified_base 3: mod_base = OTHER; note = 2'-O-methyluridine-3'-phosphate
  modified_base 4: mod_base = OTHER; note = 2'-O-methylguanosine-3'-phosphate
  modified_base 5: mod_base = OTHER; note = 2'-O-methylguanosine-3'-phosphate
  modified_base 6: mod_base = OTHER; note = 2'-O-methylcytidine-3'-phosphate
  modified_base 7: mod_base = OTHER; note = 2'-fluorocytidine-3'-phosphate
  modified_base 8: mod_base = OTHER; note = 2'-O-methyladenosine-3'-phosphate
  modified_base 9: mod_base = OTHER; note = 2'-fluorouridine-3'-phosphate
  modified_base 10: mod_base = OTHER; note = 2'-fluoroguanosine-3'-phosphate
  modified_base 11: mod_base = OTHER; note = 2'-fluorouridine-3'-phosphate
  modified_base 12: mod_base = OTHER; note = 2'-O-methylguanosine-3'-phosphate
  modified_base 13: mod_base = OTHER; note = 2'-O-methylguanosine-3'-phosphate
  modified_base 14: mod_base = OTHER; note = 2'-O-methyladenosine-3'-phosphate
  modified_base 15: mod_base = OTHER; note = 2'-O-methyluridine-3'-phosphate
  modified_base 16: mod_base = OTHER; note = 2'-O-methylcytidine-3'-phosphate
  modified_base 17: mod_base = OTHER; note = 2'-O-methylcytidine-3'-phosphate
  modified_base 18: mod_base = OTHER; note = 2'-O-methylcytidine-3'-phosphate
  modified_base 19: mod_base = OTHER; note = 2'-O-methyladenosine-3'-phosphorothioate
  modified_base 20: mod_base = OTHER; note = 2'-O-methylguanosine-3'-phosphorothioate
  modified_base 21: mod_base = OTHER; note = 2'-O-methyladenosine-3'-phosphate
cgtggccatgtggatcccaga

SEQ ID NO: 3205 - RNA, 21 nt, synthetic construct
  source 1..21: mol_type = other RNA
  modified_base 1: mod_base = OTHER; note = 2'-O-methylcytidine-3'-phosphorothioate
  modified_base 2: mod_base = OTHER; note = 2'-O-methyladenosine-3'-phosphorothioate
  modified_base 3: mod_base = OTHER; note = 2'-O-methylguanosine-3'-phosphate
  modified_base 4: mod_base = OTHER; note = 2'-O-methylcytidine-3'-phosphate
  modified_base 5: mod_base = OTHER; note = 2'-O-methyladenosine-3'-phosphate
  modified_base 6: mod_base = OTHER; note = 2'-O-methylcytidine-3'-phosphate
  modified_base 7: mod_base = OTHER; note = 2'-fluorouridine-3'-phosphate
  modified_base 8: mod_base = OTHER; note = 2'-O-methyladenosine-3'-phosphate
  modified_base 9: mod_base = OTHER; note = 2'-fluoroadenosine-3'-phosphate
  modified_base 10: mod_base = OTHER; note = 2'-fluoroguanosine-3'-phosphate
  modified_base 11: mod_base = OTHER; note = 2'-fluoroguanosine-3'-phosphate
  modified_base 12: mod_base = OTHER; note = 2'-O-methyladenosine-3'-phosphate
  modified_base 13: mod_base = OTHER; note = 2'-O-methyladenosine-3'-phosphate
  modified_base 14: mod_base = OTHER; note = 2'-O-methylguanosine-3'-phosphate
  modified_base 15: mod_base = OTHER; note = 2'-O-methylcytidine-3'-phosphate
  modified_base 16: mod_base = OTHER; note = 2'-O-methylcytidine-3'-phosphate
  modified_base 17: mod_base = OTHER; note = 2'-O-methylcytidine-3'-phosphate
  modified_base 18: mod_base = OTHER; note = 2'-O-methyladenosine-3'-phosphate
  modified_base 19: mod_base = OTHER; note = 2'-O-methylcytidine-3'-phosphorothioate
  modified_base 20: mod_base = OTHER; note = 2'-O-methylcytidine-3'-phosphorothioate
  modified_base 21: mod_base = OTHER; note = 2'-O-methyladenosine-3'-phosphate
cagcactaaggaagcccacca

SEQ ID NO: 3206 - RNA, 21 nt, synthetic construct
  source 1..21: mol_type = other RNA
  modified_base 1: mod_base = OTHER; note = 2'-O-methylguanosine-3'-phosphorothioate
  modified_base 2: mod_base = OTHER; note = 2'-O-methyluridine-3'-phosphorothioate
  modified_base 3: mod_base = OTHER; note = 2'-O-methylcytidine-3'-phosphate
  modified_base 4: mod_base = OTHER; note = 2'-O-methylguanosine-3'-phosphate
  modified_base 5: mod_base = OTHER; note = 2'-O-methylcytidine-3'-phosphate
  modified_base 6: mod_base = OTHER; note = 2'-O-methyluridine-3'-phosphate
  modified_base 7: mod_base = OTHER; note = 2'-fluoroguanosine-3'-phosphate
  modified_base 8: mod_base = OTHER; note = 2'-O-methyladenosine-3'-phosphate
  modified_base 9: mod_base = OTHER; note = 2'-fluorouridine-3'-phosphate
  modified_base 10: mod_base = OTHER; note = 2'-fluoroguanosine-3'-phosphate
  modified_base 11: mod_base = OTHER; note = 2'-fluoroguanosine-3'-phosphate
  modified_base 12: mod_base = OTHER; note = 2'-O-methyladenosine-3'-phosphate
  modified_base 13: mod_base = OTHER; note = 2'-O-methylguanosine-3'-phosphate
  modified_base 14: mod_base = OTHER; note = 2'-O-methylcytidine-3'-phosphate
  modified_base 15: mod_base = OTHER; note = 2'-O-methylcytidine-3'-phosphate
  modified_base 16: mod_base = OTHER; note = 2'-O-methylcytidine-3'-phosphate
  modified_base 17: mod_base = OTHER; note = 2'-O-methylguanosine-3'-phosphate
  modified_base 18: mod_base = OTHER; note = 2'-O-methyladenosine-3'-phosphate
  modified_base 19: mod_base = OTHER; note = 2'-O-methylguanosine-3'-phosphorothioate
  modified_base 20: mod_base = OTHER; note = 2'-O-methyladenosine-3'-phosphorothioate
  modified_base 21: mod_base = OTHER; note = 2'-O-methyladenosine-3'-phosphate
gtcgctgatggagcccgagaa

SEQ ID NO: 3207 - RNA, 21 nt, synthetic construct
  source 1..21: mol_type = other RNA
  modified_base 1: mod_base = OTHER; note = 2'-O-methyluridine-3'-phosphorothioate
  modified_base 2: mod_base = OTHER; note = 2'-O-methyluridine-3'-phosphorothioate
  modified_base 3: mod_base = OTHER; note = 2'-O-methylcytidine-3'-phosphate
  modified_base 4: mod_base = OTHER; note = 2'-O-methyluridine-3'-phosphate
  modified_base 5: mod_base = OTHER; note = 2'-O-methyluridine-3'-phosphate
  modified_base 6: mod_base = OTHER; note = 2'-O-methylcytidine-3'-phosphate
  modified_base 7: mod_base = OTHER; note = 2'-fluorocytidine-3'-phosphate
  modified_base 8: mod_base = OTHER; note = 2'-O-methylguanosine-3'-phosphate
  modified_base 9: mod_base = OTHER; note = 2'-fluoroguanosine-3'-phosphate
  modified_base 10: mod_base = OTHER; note = 2'-fluorocytidine-3'-phosphate
  modified_base 11: mod_base = OTHER; note = 2'-fluorocytidine-3'-phosphate
  modified_base 12: mod_base = OTHER; note = 2'-O-methylcytidine-3'-phosphate
  modified_base 13: mod_base = OTHER; note = 2'-O-methyladenosine-3'-phosphate
  modified_base 14: mod_base = OTHER; note = 2'-O-methylguanosine-3'-phosphate
  modified_base 15: mod_base = OTHER; note = 2'-O-methylcytidine-3'-phosphate
  modified_base 16: mod_base = OTHER; note = 2'-O-methylguanosine-3'-phosphate
  modified_base 17: mod_base = OTHER; note = 2'-O-methyluridine-3'-phosphate
  modified_base 18: mod_base = OTHER; note = 2'-O-methylcytidine-3'-phosphate
  modified_base 19: mod_base = OTHER; note = 2'-O-methyladenosine-3'-phosphorothioate
  modified_base 20: mod_base = OTHER; note = 2'-O-methyluridine-3'-phosphorothioate
  modified_base 21: mod_base = OTHER; note = 2'-O-methyladenosine-3'-phosphate
ttcttccggcccagcgtcata

SEQ ID NO: 3208 - RNA, 21 nt, synthetic construct
  source 1..21: mol_type = other RNA
  modified_base 1: mod_base = OTHER; note = 2'-O-methylcytidine-3'-phosphorothioate
  modified_base 2: mod_base = OTHER; note = 2'-O-methyluridine-3'-phosphorothioate
  modified_base 3: mod_base = OTHER; note = 2'-O-methylguanosine-3'-phosphate
  modified_base 4: mod_base = OTHER; note = 2'-O-methylcytidine-3'-phosphate
  modified_base 5: mod_base = OTHER; note = 2'-O-methyluridine-3'-phosphate
  modified_base 6: mod_base = OTHER; note = 2'-O-methylcytidine-3'-phosphate
  modified_base 7: mod_base = OTHER; note = 2'-fluorocytidine-3'-phosphate
  modified_base 8: mod_base = OTHER; note = 2'-O-methyluridine-3'-phosphate
  modified_base 9: mod_base = OTHER; note = 2'-fluoroguanosine-3'-phosphate
  modified_base 10: mod_base = OTHER; note = 2'-fluoroguanosine-3'-phosphate
  modified_base 11: mod_base = OTHER; note = 2'-fluoroadenosine-3'-phosphate
  modified_base 12: mod_base = OTHER; note = 2'-O-methylcytidine-3'-phosphate
  modified_base 13: mod_base = OTHER; note = 2'-O-methyladenosine-3'-phosphate
  modified_base 14: mod_base = OTHER; note = 2'-O-methylcytidine-3'-phosphate
  modified_base 15: mod_base = OTHER; note = 2'-O-methylcytidine-3'-phosphate
  modified_base 16: mod_base = OTHER; note = 2'-O-methyladenosine-3'-phosphate
  modified_base 17: mod_base = OTHER; note = 2'-O-methylguanosine-3'-phosphate
  modified_base 18: mod_base = OTHER; note = 2'-O-methylcytidine-3'-phosphate
  modified_base 19: mod_base = OTHER; note = 2'-O-methyladenosine-3'-phosphorothioate
  modified_base 20: mod_base = OTHER; note = 2'-O-methyladenosine-3'-phosphorothioate
  modified_base 21: mod_base = OTHER; note = 2'-O-methyladenosine-3'-phosphate
ctgctcctggacaccagcaaa

SEQ ID NO: 3209 - RNA, 21 nt, synthetic construct
  source 1..21: mol_type = other RNA
  modified_base 1: mod_base = OTHER; note = 2'-O-methyluridine-3'-phosphorothioate
  modified_base 2: mod_base = OTHER; note = 2'-O-methyluridine-3'-phosphorothioate
  modified_base 3: mod_base = OTHER; note = 2'-O-methyluridine-3'-phosphate
  modified_base 4: mod_base = OTHER; note = 2'-O-methylcytidine-3'-phosphate
  modified_base 5: mod_base = OTHER; note = 2'-O-methyluridine-3'-phosphate
  modified_base 6: mod_base = OTHER; note = 2'-O-methylguanosine-3'-phosphate
  modified_base 7: mod_base = OTHER; note = 2'-fluoroadenosine-3'-phosphate
  modified_base 8: mod_base = OTHER; note = 2'-O-methylguanosine-3'-phosphate
  modified_base 9: mod_base = OTHER; note = 2'-fluorouridine-3'-phosphate
  modified_base 10: mod_base = OTHER; note = 2'-fluoroadenosine-3'-phosphate
  modified_base 11: mod_base = OTHER; note = 2'-fluorocytidine-3'-phosphate
  modified_base 12: mod_base = OTHER; note = 2'-O-methylcytidine-3'-phosphate
  modified_base 13: mod_base = OTHER; note = 2'-O-methylcytidine-3'-phosphate
  modified_base 14: mod_base = OTHER; note = 2'-O-methylguanosine-3'-phosphate
  modified_base 15: mod_base = OTHER; note = 2'-O-methylcytidine-3'-phosphate
  modified_base 16: mod_base = OTHER; note = 2'-O-methylcytidine-3'-phosphate
  modified_base 17: mod_base = OTHER; note = 2'-O-methylguanosine-3'-phosphate
  modified_base 18: mod_base = OTHER; note = 2'-O-methylcytidine-3'-phosphate
  modified_base 19: mod_base = OTHER; note = 2'-O-methyluridine-3'-phosphorothioate
  modified_base 20: mod_base = OTHER; note = 2'-O-methyluridine-3'-phosphorothioate
  modified_base 21: mod_base = OTHER; note = 2'-O-methyladenosine-3'-phosphate
tttctgagtacccgccgctta

SEQ ID NO: 3210 - RNA, 21 nt, synthetic construct
  source 1..21: mol_type = other RNA
  modified_base 1: mod_base = OTHER; note = 2'-O-methylcytidine-3'-phosphorothioate
  modified_base 2: mod_base = OTHER; note = 2'-O-methylguanosine-3'-phosphorothioate
  modified_base 3: mod_base = OTHER; note = 2'-O-methylcytidine-3'-phosphate
  modified_base 4: mod_base = OTHER; note = 2'-O-methyladenosine-3'-phosphate
  modified_base 5: mod_base = OTHER; note = 2'-O-methylguanosine-3'-phosphate
  modified_base 6: mod_base = OTHER; note = 2'-O-methylguanosine-3'-phosphate
  modified_base 7: mod_base = OTHER; note = 2'-fluorocytidine-3'-phosphate
  modified_base 8: mod_base = OTHER; note = 2'-O-methyluridine-3'-phosphate
  modified_base 9: mod_base = OTHER; note = 2'-fluoroguanosine-3'-phosphate
  modified_base 10: mod_base = OTHER; note = 2'-fluorouridine-3'-phosphate
  modified_base 11: mod_base = OTHER; note = 2'-fluorocytidine-3'-phosphate
  modified_base 12: mod_base = OTHER; note = 2'-O-methylcytidine-3'-phosphate
  modified_base 13: mod_base = OTHER; note = 2'-O-methyladenosine-3'-phosphate
  modified_base 14: mod_base = OTHER; note = 2'-O-methylcytidine-3'-phosphate
  modified_base 15: mod_base = OTHER; note = 2'-O-methylcytidine-3'-phosphate
  modified_base 16: mod_base = OTHER; note = 2'-O-methylcytidine-3'-phosphate
  modified_base 17: mod_base = OTHER; note = 2'-O-methyladenosine-3'-phosphate
  modified_base 18: mod_base = OTHER; note = 2'-O-methylguanosine-3'-phosphate
  modified_base 19: mod_base = OTHER; note = 2'-O-methyluridine-3'-phosphorothioate
  modified_base 20: mod_base = OTHER; note = 2'-O-methyluridine-3'-phosphorothioate
  modified_base 21: mod_base = OTHER; note = 2'-O-methyladenosine-3'-phosphate
cgcaggctgtccacccagtta

SEQ ID NO: 3211 - RNA, 21 nt, synthetic construct
  source 1..21: mol_type = other RNA
  modified_base 1: mod_base = OTHER; note = 2'-O-methylguanosine-3'-phosphorothioate
  modified_base 2: mod_base = OTHER; note = 2'-O-methylguanosine-3'-phosphorothioate
  modified_base 3: mod_base = OTHER; note = 2'-O-methylcytidine-3'-phosphate
  modified_base 4: mod_base = OTHER; note = 2'-O-methyluridine-3'-phosphate
  modified_base 5: mod_base = OTHER; note = 2'-O-methylguanosine-3'-phosphate
  modified_base 6: mod_base = OTHER; note = 2'-O-methyluridine-3'-phosphate
  modified_base 7: mod_base = OTHER; note = 2'-fluoroguanosine-3'-phosphate
  modified_base 8: mod_base = OTHER; note = 2'-O-methyladenosine-3'-phosphate
  modified_base 9: mod_base = OTHER; note = 2'-fluorocytidine-3'-phosphate
  modified_base 10: mod_base = OTHER; note = 2'-fluoroadenosine-3'-phosphate
  modified_base 11: mod_base = OTHER; note = 2'-fluorouridine-3'-phosphate
  modified_base 12: mod_base = OTHER; note = 2'-O-methylguanosine-3'-phosphate
  modified_base 13: mod_base = OTHER; note = 2'-O-methylguanosine-3'-phosphate
  modified_base 14: mod_base = OTHER; note = 2'-O-methylguanosine-3'-phosphate
  modified_base 15: mod_base = OTHER; note = 2'-O-methylcytidine-3'-phosphate
  modified_base 16: mod_base = OTHER; note = 2'-O-methyladenosine-3'-phosphate
  modified_base 17: mod_base = OTHER; note = 2'-O-methylcytidine-3'-phosphate
  modified_base 18: mod_base = OTHER; note = 2'-O-methylcytidine-3'-phosphate
  modified_base 19: mod_base = OTHER; note = 2'-O-methyluridine-3'-phosphorothioate
  modified_base 20: mod_base = OTHER; note = 2'-O-methylguanosine-3'-phosphorothioate
  modified_base 21: mod_base = OTHER; note = 2'-O-methyladenosine-3'-phosphate
ggctgtgacatgggcacctga

SEQ ID NO: 3212 - RNA, 21 nt, synthetic construct
  source 1..21: mol_type = other RNA
  modified_base 1: mod_base = OTHER; note = 2'-O-methyluridine-3'-phosphorothioate
  modified_base 2: mod_base = OTHER; note = 2'-O-methylcytidine-3'-phosphorothioate
  modified_base 3: mod_base = OTHER; note = 2'-O-methyladenosine-3'-phosphate
  modified_base 4: mod_base = OTHER; note = 2'-O-methylguanosine-3'-phosphate
  modified_base 5: mod_base = OTHER; note = 2'-O-methyluridine-3'-phosphate
  modified_base 6: mod_base = OTHER; note = 2'-O-methylguanosine-3'-phosphate
  modified_base 7: mod_base = OTHER; note = 2'-fluoroadenosine-3'-phosphate
  modified_base 8: mod_base = OTHER; note = 2'-O-methylguanosine-3'-phosphate
  modified_base 9: mod_base = OTHER; note = 2'-fluoroguanosine-3'-phosphate
  modified_base 10: mod_base = OTHER; note = 2'-fluorouridine-3'-phosphate
  modified_base 11: mod_base = OTHER; note = 2'-fluoroadenosine-3'-phosphate
  modified_base 12: mod_base = OTHER; note = 2'-O-methylguanosine-3'-phosphate
  modified_base 13: mod_base = OTHER; note = 2'-O-methylcytidine-3'-phosphate
  modified_base 14: mod_base = OTHER; note = 2'-O-methyladenosine-3'-phosphate
  modified_base 15: mod_base = OTHER; note = 2'-O-methylguanosine-3'-phosphate
  modified_base 16: mod_base = OTHER; note = 2'-O-methylcytidine-3'-phosphate
  modified_base 17: mod_base = OTHER; note = 2'-O-methylcytidine-3'-phosphate
  modified_base 18: mod_base = OTHER; note = 2'-O-methylcytidine-3'-phosphate
  modified_base 19: mod_base = OTHER; note = 2'-O-methyluridine-3'-phosphorothioate
  modified_base 20: mod_base = OTHER; note = 2'-O-methylguanosine-3'-phosphorothioate
  modified_base 21: mod_base = OTHER; note = 2'-O-methyladenosine-3'-phosphate
tcagtgaggtagcagccctga

SEQ ID NO: 3213 - RNA, 21 nt, synthetic construct
  source 1..21: mol_type = other RNA
  modified_base 1: mod_base = OTHER; note = 2'-O-methyladenosine-3'-phosphorothioate
  modified_base 2: mod_base = OTHER; note = 2'-O-methylguanosine-3'-phosphorothioate
  modified_base 3: mod_base = OTHER; note = 2'-O-methylcytidine-3'-phosphate
  modified_base 4: mod_base = OTHER; note = 2'-O-methylguanosine-3'-phosphate
  modified_base 5: mod_base = OTHER; note = 2'-O-methyluridine-3'-phosphate
  modified_base 6: mod_base = OTHER; note = 2'-O-methylcytidine-3'-phosphate
  modified_base 7: mod_base = OTHER; note = 2'-fluoroadenosine-3'-phosphate
  modified_base 8: mod_base = OTHER; note = 2'-O-methyluridine-3'-phosphate
  modified_base 9: mod_base = OTHER; note = 2'-fluoroguanosine-3'-phosphate
  modified_base 10: mod_base = OTHER; note = 2'-fluoroguanosine-3'-phosphate
  modified_base 11: mod_base = OTHER; note = 2'-fluoroadenosine-3'-phosphate
  modified_base 12: mod_base = OTHER; note = 2'-O-methylguanosine-3'-phosphate
  modified_base 13: mod_base = OTHER; note = 2'-O-methylcytidine-3'-phosphate
  modified_base 14: mod_base = OTHER; note = 2'-O-methylcytidine-3'-phosphate
  modified_base 15: mod_base = OTHER; note = 2'-O-methylcytidine-3'-phosphate
  modified_base 16: mod_base = OTHER; note = 2'-O-methyladenosine-3'-phosphate
  modified_base 17: mod_base = OTHER; note = 2'-O-methyluridine-3'-phosphate
  modified_base 18: mod_base = OTHER; note = 2'-O-methylcytidine-3'-phosphate
  modified_base 19: mod_base = OTHER; note = 2'-O-methylcytidine-3'-phosphorothioate
  modified_base 20: mod_base = OTHER; note = 2'-O-methyluridine-3'-phosphorothioate
  modified_base 21: mod_base = OTHER; note = 2'-O-methyladenosine-3'-phosphate
agcgtcatggagcccatccta

SEQ ID NO: 3214 - RNA, 21 nt, synthetic construct
  source 1..21: mol_type = other RNA
  modified_base 1: mod_base = OTHER; note = 2'-O-methylcytidine-3'-phosphorothioate
  modified_base 2: mod_base = OTHER; note = 2'-O-methyluridine-3'-phosphorothioate
  modified_base 3: mod_base = OTHER; note = 2'-O-methylguanosine-3'-phosphate
  modified_base 4: mod_base = OTHER; note = 2'-O-methylguanosine-3'-phosphate
  modified_base 5: mod_base = OTHER; note = 2'-O-methyladenosine-3'-phosphate
  modified_base 6: mod_base = OTHER; note = 2'-O-methyluridine-3'-phosphate
  modified_base 7: mod_base = OTHER; note = 2'-fluoroguanosine-3'-phosphate
  modified_base 8: mod_base = OTHER; note = 2'-O-methylguanosine-3'-phosphate
  modified_base 9: mod_base = OTHER; note = 2'-fluoroadenosine-3'-phosphate
  modified_base 10: mod_base = OTHER; note = 2'-fluoroguanosine-3'-phosphate
  modified_base 11: mod_base = OTHER; note = 2'-fluoroadenosine-3'-phosphate
  modified_base 12: mod_base = OTHER; note = 2'-O-methylcytidine-3'-phosphate
  modified_base 13: mod_base = OTHER; note = 2'-O-methylcytidine-3'-phosphate
  modified_base 14: mod_base = OTHER; note = 2'-O-methyluridine-3'-phosphate
  modified_base 15: mod_base = OTHER; note = 2'-O-methylcytidine-3'-phosphate
  modified_base 16: mod_base = OTHER; note = 2'-O-methylcytidine-3'-phosphate
  modified_base 17: mod_base = OTHER; note = 2'-O-methylcytidine-3'-phosphate
  modified_base 18: mod_base = OTHER; note = 2'-O-methyluridine-3'-phosphate
  modified_base 19: mod_base = OTHER; note = 2'-O-methylguanosine-3'-phosphorothioate
  modified_base 20: mod_base = OTHER; note = 2'-O-methyladenosine-3'-phosphorothioate
  modified_base 21: mod_base = OTHER; note = 2'-O-methyladenosine-3'-phosphate
ctggatggagacctccctgaa

SEQ ID NO: 3215 - RNA, 21 nt, synthetic construct
  source 1..21: mol_type = other RNA
  modified_base 1: mod_base = OTHER; note = 2'-O-methyluridine-3'-phosphorothioate
  modified_base 2: mod_base = OTHER; note = 2'-O-methylcytidine-3'-phosphorothioate
  modified_base 3: mod_base = OTHER; note = 2'-O-methyladenosine-3'-phosphate
  modified_base 4: mod_base = OTHER; note = 2'-O-methylguanosine-3'-phosphate
  modified_base 5: mod_base = OTHER; note = 2'-O-methylcytidine-3'-phosphate
  modified_base 6: mod_base = OTHER; note = 2'-O-methylcytidine-3'-phosphate
  modified_base 7: mod_base = OTHER; note = 2'-fluoroguanosine-3'-phosphate
  modified_base 8: mod_base = OTHER; note = 2'-O-methylguanosine-3'-phosphate
  modified_base 9: mod_base = OTHER; note = 2'-fluoroadenosine-3'-phosphate
  modified_base 10: mod_base = OTHER; note = 2'-fluoroguanosine-3'-phosphate
  modified_base 11: mod_base = OTHER; note = 2'-fluorouridine-3'-phosphate
  modified_base 12: mod_base = OTHER; note = 2'-O-methylguanosine-3'-phosphate
  modified_base 13: mod_base = OTHER; note = 2'-O-methyladenosine-3'-phosphate
  modified_base 14: mod_base = OTHER; note = 2'-O-methylguanosine-3'-phosphate
  modified_base 15: mod_base = OTHER; note = 2'-O-methyluridine-3'-phosphate
  modified_base 16: mod_base = OTHER; note = 2'-O-methylguanosine-3'-phosphate
  modified_base 17: mod_base = OTHER; note = 2'-O-methyluridine-3'-phosphate
  modified_base 18: mod_base = OTHER; note = 2'-O-methyluridine-3'-phosphate
  modified_base 19: mod_base = OTHER; note = 2'-O-methylguanosine-3'-phosphorothioate
  modified_base 20: mod_base = OTHER; note = 2'-O-methylguanosine-3'-phosphorothioate
  modified_base 21: mod_base = OTHER; note = 2'-O-methyladenosine-3'-phosphate
tcagccggagtgagtgttgga

SEQ ID NO: 3216 - RNA, 21 nt, synthetic construct
  source 1..21: mol_type = other RNA
  modified_base 1: mod_base = OTHER; note = 2'-O-methylcytidine-3'-phosphorothioate
  modified_base 2: mod_base = OTHER; note = 2'-O-methyluridine-3'-phosphorothioate
  modified_base 3: mod_base = OTHER; note = 2'-O-methylguanosine-3'-phosphate
  modified_base 4: mod_base = OTHER; note = 2'-O-methylguanosine-3'-phosphate
  modified_base 5: mod_base = OTHER; note = 2'-O-methylcytidine-3'-phosphate
  modified_base 6: mod_base = OTHER; note = 2'-O-methylcytidine-3'-phosphate
  modified_base 7: mod_base = OTHER; note = 2'-fluoroguanosine-3'-phosphate
  modified_base 8: mod_base = OTHER; note = 2'-O-methyladenosine-3'-phosphate
  modified_base 9: mod_base = OTHER; note = 2'-fluorocytidine-3'-phosphate
  modified_base 10: mod_base = OTHER; note = 2'-fluorouridine-3'-phosphate
  modified_base 11: mod_base = OTHER; note = 2'-fluoroguanosine-3'-phosphate
  modified_base 12: mod_base = OTHER; note = 2'-O-methylguanosine-3'-phosphate
  modified_base 13: mod_base = OTHER; note = 2'-O-methylcytidine-3'-phosphate
  modified_base 14: mod_base = OTHER; note = 2'-O-methyluridine-3'-phosphate
  modified_base 15: mod_base = OTHER; note = 2'-O-methyluridine-3'-phosphate
  modified_base 16: mod_base = OTHER; note = 2'-O-methylcytidine-3'-phosphate
  modified_base 17: mod_base = OTHER; note = 2'-O-methyluridine-3'-phosphate
  modified_base 18: mod_base = OTHER; note = 2'-O-methylguanosine-3'-phosphate
  modified_base 19: mod_base = OTHER; note = 2'-O-methylguanosine-3'-phosphorothioate
  modified_base 20: mod_base = OTHER; note = 2'-O-methyladenosine-3'-phosphorothioate
  modified_base 21: mod_base = OTHER; note = 2'-O-methyladenosine-3'-phosphate
ctggccgactggcttctggaa

SEQ ID NO: 3217 - RNA, 21 nt, synthetic construct
  source 1..21: mol_type = other RNA
  modified_base 1: mod_base = OTHER; note = 2'-O-methylguanosine-3'-phosphorothioate
  modified_base 2: mod_base = OTHER; note = 2'-O-methylguanosine-3'-phosphorothioate
  modified_base 3: mod_base = OTHER; note = 2'-O-methyluridine-3'-phosphate
  modified_base 4: mod_base = OTHER; note = 2'-O-methylguanosine-3'-phosphate
  modified_base 5: mod_base = OTHER; note = 2'-O-methylcytidine-3'-phosphate
  modified_base 6: mod_base = OTHER; note = 2'-O-methyluridine-3'-phosphate
  modified_base 7: mod_base = OTHER; note = 2'-fluoroguanosine-3'-phosphate
  modified_base 8: mod_base = OTHER; note = 2'-O-methylcytidine-3'-phosphate
  modified_base 9: mod_base = OTHER; note = 2'-fluoroadenosine-3'-phosphate
  modified_base 10: mod_base = OTHER; note = 2'-fluorocytidine-3'-phosphate
  modified_base 11: mod_base = OTHER; note = 2'-fluorocytidine-3'-phosphate
  modified_base 12: mod_base = OTHER; note = 2'-O-methyluridine-3'-phosphate
  modified_base 13: mod_base = OTHER; note = 2'-O-methylcytidine-3'-phosphate
  modified_base 14: mod_base = OTHER; note = 2'-O-methyladenosine-3'-phosphate
  modified_base 15: mod_base = OTHER; note = 2'-O-methylcytidine-3'-phosphate
  modified_base 16: mod_base = OTHER; note = 2'-O-methyladenosine-3'-phosphate
  modified_base 17: mod_base = OTHER; note = 2'-O-methylcytidine-3'-phosphate
  modified_base 18: mod_base = OTHER; note = 2'-O-methylcytidine-3'-phosphate
  modified_base 19: mod_base = OTHER; note = 2'-O-methyladenosine-3'-phosphorothioate
  modified_base 20: mod_base = OTHER; note = 2'-O-methylguanosine-3'-phosphorothioate
  modified_base 21: mod_base = OTHER; note = 2'-O-methyladenosine-3'-phosphate
ggtgctgcacctcacaccaga

SEQ ID NO: 3218 - RNA, 21 nt, synthetic construct
  source 1..21: mol_type = other RNA
  modified_base 1: mod_base = OTHER; note = 2'-O-methylguanosine-3'-phosphorothioate
  modified_base 2: mod_base = OTHER; note = 2'-O-methylguanosine-3'-phosphorothioate
  modified_base 3: mod_base = OTHER; note = 2'-O-methylcytidine-3'-phosphate
  modified_base 4: mod_base = OTHER; note = 2'-O-methyluridine-3'-phosphate
  modified_base 5: mod_base = OTHER; note = 2'-O-methylguanosine-3'-phosphate
  modified_base 6: mod_base = OTHER; note = 2'-O-methylcytidine-3'-phosphate
  modified_base 7: mod_base = OTHER; note = 2'-fluorocytidine-3'-phosphate
  modified_base 8: mod_base = OTHER; note = 2'-O-methyluridine-3'-phosphate
  modified_base 9: mod_base = OTHER; note = 2'-fluoroguanosine-3'-phosphate
  modified_base 10: mod_base = OTHER; note = 2'-fluoroguanosine-3'-phosphate
  modified_base 11: mod_base = OTHER; note = 2'-fluoroadenosine-3'-phosphate
  modified_base 12: mod_base = OTHER; note = 2'-O-methylguanosine-3'-phosphate
  modified_base 13: mod_base = OTHER; note = 2'-O-methylcytidine-3'-phosphate
  modified_base 14: mod_base = OTHER; note = 2'-O-methyladenosine-3'-phosphate
  modified_base 15: mod_base = OTHER; note = 2'-O-methyluridine-3'-phosphate
  modified_base 16: mod_base = OTHER; note = 2'-O-methylguanosine-3'-phosphate
  modified_base 17: mod_base = OTHER; note = 2'-O-methylguanosine-3'-phosphate
  modified_base 18: mod_base = OTHER; note = 2'-O-methyladenosine-3'-phosphate
  modified_base 19: mod_base = OTHER; note = 2'-O-methylguanosine-3'-phosphorothioate
  modified_base 20: mod_base = OTHER; note = 2'-O-methylcytidine-3'-phosphorothioate
  modified_base 21: mod_base = OTHER; note = 2'-O-methyladenosine-3'-phosphate
ggctgcctggagcatggagca

SEQ ID NO: 3219 - RNA, 21 nt, synthetic construct
  source 1..21: mol_type = other RNA
  modified_base 1: mod_base = OTHER; note = 2'-O-methylcytidine-3'-phosphorothioate
  modified_base 2: mod_base = OTHER; note = 2'-O-methylcytidine-3'-phosphorothioate
  modified_base 3: mod_base = OTHER; note = 2'-O-methyluridine-3'-phosphate
  modified_base 4: mod_base = OTHER; note = 2'-O-methylguanosine-3'-phosphate
  modified_base 5: mod_base = OTHER; note = 2'-O-methylcytidine-3'-phosphate
  modified_base 6: mod_base = OTHER; note = 2'-O-methyladenosine-3'-phosphate
  modified_base 7: mod_base = OTHER; note = 2'-fluoroguanosine-3'-phosphate
  modified_base 8: mod_base = OTHER; note = 2'-O-methylcytidine-3'-phosphate
  modified_base 9: mod_base = OTHER; note = 2'-fluorouridine-3'-phosphate
  modified_base 10: mod_base = OTHER; note = 2'-fluoroguanosine-3'-phosphate
  modified_base 11: mod_base = OTHER; note = 2'-fluorouridine-3'-phosphate
  modified_base 12: mod_base = OTHER; note = 2'-O-methylguanosine-3'-phosphate
  modified_base 13: mod_base = OTHER; note = 2'-O-methylcytidine-3'-phosphate
  modified_base 14: mod_base = OTHER; note = 2'-O-methyluridine-3'-phosphate
  modified_base 15: mod_base = OTHER; note = 2'-O-methylguanosine-3'-phosphate
  modified_base 16: mod_base = OTHER; note = 2'-O-methylguanosine-3'-phosphate
  modified_base 17: mod_base = OTHER; note = 2'-O-methylguanosine-3'-phosphate
  modified_base 18: mod_base = OTHER; note = 2'-O-methylcytidine-3'-phosphate
  modified_base 19: mod_base = OTHER; note = 2'-O-methyladenosine-3'-phosphorothioate
  modified_base 20: mod_base = OTHER; note = 2'-O-methyluridine-3'-phosphorothioate
  modified_base 21: mod_base = OTHER; note = 2'-O-methyladenosine-3'-phosphate
cctgcagctgtgctgggcata

SEQ ID NO: 3220 - RNA, 21 nt, synthetic construct
  source 1..21: mol_type = other RNA
  modified_base 1: mod_base = OTHER; note = 2'-O-methyladenosine-3'-phosphorothioate
  modified_base 2: mod_base = OTHER; note = 2'-O-methylguanosine-3'-phosphorothioate
  modified_base 3: mod_base = OTHER; note = 2'-O-methyluridine-3'-phosphate
  modified_base 4: mod_base = OTHER; note = 2'-O-methylguanosine-3'-phosphate
  modified_base 5: mod_base = OTHER; note = 2'-O-methylguanosine-3'-phosphate
  modified_base 6: mod_base = OTHER; note = 2'-O-methylcytidine-3'-phosphate
  modified_base 7: mod_base = OTHER; note = 2'-fluorocytidine-3'-phosphate
  modified_base 8: mod_base = OTHER; note = 2'-O-methyladenosine-3'-phosphate
  modified_base 9: mod_base = OTHER; note = 2'-fluorouridine-3'-phosphate
  modified_base 10: mod_base = OTHER; note = 2'-fluoroguanosine-3'-phosphate
  modified_base 11: mod_base = OTHER; note = 2'-fluorocytidine-3'-phosphate
  modified_base 12: mod_base = OTHER; note = 2'-O-methyladenosine-3'-phosphate
  modified_base 13: mod_base = OTHER; note = 2'-O-methylguanosine-3'-phosphate
  modified_base 14: mod_base = OTHER; note = 2'-O-methylguanosine-3'-phosphate
  modified_base 15: mod_base = OTHER; note = 2'-O-methylcytidine-3'-phosphate
  modified_base 16: mod_base = OTHER; note = 2'-O-methylguanosine-3'-phosphate
  modified_base 17: mod_base = OTHER; note = 2'-O-methylguanosine-3'-phosphate
  modified_base 18: mod_base = OTHER; note = 2'-O-methyluridine-3'-phosphate
  modified_base 19: mod_base = OTHER; note = 2'-O-methylguanosine-3'-phosphorothioate
  modified_base 20: mod_base = OTHER; note = 2'-O-methyluridine-3'-phosphorothioate
  modified_base 21: mod_base = OTHER; note = 2'-O-methyladenosine-3'-phosphate
agtggccatgcaggcggtgta

SEQ ID NO: 3221 - RNA, 21 nt, synthetic construct
  source 1..21: mol_type = other RNA
  modified_base 1: mod_base = OTHER; note = 2'-O-methylguanosine-3'-phosphorothioate
  modified_base 2: mod_base = OTHER; note = 2'-O-methyladenosine-3'-phosphorothioate
  modified_base 3: mod_base = OTHER; note = 2'-O-methylcytidine-3'-phosphate
  modified_base 4: mod_base = OTHER; note = 2'-O-methyluridine-3'-phosphate
  modified_base 5: mod_base = OTHER; note = 2'-O-methyluridine-3'-phosphate
  modified_base 6: mod_base = OTHER; note = 2'-O-methylguanosine-3'-phosphate
  modified_base 7: mod_base = OTHER; note = 2'-fluoroguanosine-3'-phosphate
  modified_base 8: mod_base = OTHER; note = 2'-O-methylcytidine-3'-phosphate
  modified_base 9: mod_base = OTHER; note = 2'-fluorocytidine-3'-phosphate
  modified_base 10: mod_base = OTHER; note = 2'-fluorouridine-3'-phosphate
  modified_base 11: mod_base = OTHER; note = 2'-fluorouridine-3'-phosphate
  modified_base 12: mod_base = OTHER; note = 2'-O-methylguanosine-3'-phosphate
  modified_base 13: mod_base = OTHER; note = 2'-O-methylguanosine-3'-phosphate
  modified_base 14: mod_base = OTHER; note = 2'-O-methylguanosine-3'-phosphate
  modified_base 15: mod_base = OTHER; note = 2'-O-methylcytidine-3'-phosphate
  modified_base 16: mod_base = OTHER; note = 2'-O-methyladenosine-3'-phosphate
  modified_base 17: mod_base = OTHER; note = 2'-O-methylguanosine-3'-phosphate
  modified_base 18: mod_base = OTHER; note = 2'-O-methylcytidine-3'-phosphate
  modified_base 19: mod_base = OTHER; note = 2'-O-methyladenosine-3'-phosphorothioate
  modified_base 20: mod_base = OTHER; note = 2'-O-methyluridine-3'-phosphorothioate
  modified_base 21: mod_base = OTHER; note = 2'-O-methyladenosine-3'-phosphate
gacttggccttgggcagcata

SEQ ID NO: 3222 - RNA, 21 nt, synthetic construct
  source 1..21: mol_type = other RNA
  modified_base 1: mod_base = OTHER; note = 2'-O-methylguanosine-3'-phosphorothioate
  modified_base 2: mod_base = OTHER; note = 2'-O-methyladenosine-3'-phosphorothioate
  modified_base 3: mod_base = OTHER; note = 2'-O-methylguanosine-3'-phosphate
  modified_base 4: mod_base = OTHER; note = 2'-O-methylcytidine-3'-phosphate
  modified_base 5: mod_base = OTHER; note = 2'-O-methylguanosine-3'-phosphate
  modified_base 6: mod_base = OTHER; note = 2'-O-methyladenosine-3'-phosphate
  modified_base 7: mod_base = OTHER; note = 2'-fluoroadenosine-3'-phosphate
  modified_base 8: mod_base = OTHER; note = 2'-O-methylguanosine-3'-phosphate
  modified_base 9: mod_base = OTHER; note = 2'-fluorouridine-3'-phosphate
  modified_base 10: mod_base = OTHER; note = 2'-fluoroguanosine-3'-phosphate
  modified_base 11: mod_base = OTHER; note = 2'-fluorocytidine-3'-phosphate
  modified_base 12: mod_base = OTHER; note = 2'-O-methylguanosine-3'-phosphate
  modified_base 13: mod_base = OTHER; note = 2'-O-methylguanosine-3'-phosphate
  modified_base 14: mod_base = OTHER; note = 2'-O-methylguanosine-3'-phosphate
  modified_base 15: mod_base = OTHER; note = 2'-O-methyluridine-3'-phosphate
  modified_base 16: mod_base = OTHER; note = 2'-O-methyladenosine-3'-phosphate
  modified_base 17: mod_base = OTHER; note = 2'-O-methylcytidine-3'-phosphate
  modified_base 18: mod_base = OTHER; note = 2'-O-methylcytidine-3'-phosphate
  modified_base 19: mod_base = OTHER; note = 2'-O-methylcytidine-3'-phosphorothioate
  modified_base 20: mod_base = OTHER; note = 2'-O-methyluridine-3'-phosphorothioate
  modified_base 21: mod_base = OTHER; note = 2'-O-methyladenosine-3'-phosphate
gagcgaagtgcgggtacccta

SEQ ID NO: 3223 - RNA, 21 nt, synthetic construct
  source 1..21: mol_type = other RNA
  modified_base 1: mod_base = OTHER; note = 2'-O-methylcytidine-3'-phosphorothioate
  modified_base 2: mod_base = OTHER; note = 2'-O-methyluridine-3'-phosphorothioate
  modified_base 3: mod_base = OTHER; note = 2'-O-methylguanosine-3'-phosphate
  modified_base 4: mod_base = OTHER; note = 2'-O-methylguanosine-3'-phosphate
  modified_base 5: mod_base = OTHER; note = 2'-O-methyluridine-3'-phosphate
  modified_base 6: mod_base = OTHER; note = 2'-O-methylguanosine-3'-phosphate
  modified_base 7: mod_base = OTHER; note = 2'-fluoroguanosine-3'-phosphate
  modified_base 8: mod_base = OTHER; note = 2'-O-methylcytidine-3'-phosphate
  modified_base 9: mod_base = OTHER; note = 2'-fluorocytidine-3'-phosphate
  modified_base 10: mod_base = OTHER; note = 2'-fluorouridine-3'-phosphate
  modified_base 11: mod_base = OTHER; note = 2'-fluorocytidine-3'-phosphate
  modified_base 12: mod_base = OTHER; note = 2'-O-methyluridine-3'-phosphate
  modified_base 13: mod_base = OTHER; note = 2'-O-methylguanosine-3'-phosphate
  modified_base 14: mod_base = OTHER; note = 2'-O-methyluridine-3'-phosphate
  modified_base 15: mod_base = OTHER; note = 2'-O-methylguanosine-3'-phosphate
  modified_base 16: mod_base = OTHER; note = 2'-O-methyluridine-3'-phosphate
  modified_base 17: mod_base = OTHER; note = 2'-O-methylguanosine-3'-phosphate
  modified_base 18: mod_base = OTHER; note = 2'-O-methylcytidine-3'-phosphate
  modified_base 19: mod_base = OTHER; note = 2'-O-methyladenosine-3'-phosphorothioate
  modified_base 20: mod_base = OTHER; note = 2'-O-methyladenosine-3'-phosphorothioate
  modified_base 21: mod_base = OTHER; note = 2'-O-methyladenosine-3'-phosphate
ctggtggcctctgtgtgcaaa

SEQ ID NO: 3224 - RNA, 21 nt, synthetic construct
  source 1..21: mol_type = other RNA
  modified_base 1: mod_base = OTHER; note = 2'-O-methyladenosine-3'-phosphorothioate
  modified_base 2: mod_base = OTHER; note = 2'-O-methyladenosine-3'-phosphorothioate
  modified_base 3: mod_base = OTHER; note = 2'-O-methylcytidine-3'-phosphate
  modified_base 4: mod_base = OTHER; note = 2'-O-methylcytidine-3'-phosphate
  modified_base 5: mod_base = OTHER; note = 2'-O-methylcytidine-3'-phosphate
  modified_base 6: mod_base = OTHER; note = 2'-O-methyladenosine-3'-phosphate
  modified_base 7: mod_base = OTHER; note = 2'-fluorocytidine-3'-phosphate
  modified_base 8: mod_base = OTHER; note = 2'-O-methylcytidine-3'-phosphate
  modified_base 9: mod_base = OTHER; note = 2'-fluoroadenosine-3'-phosphate
  modified_base 10: mod_base = OTHER; note = 2'-fluoroguanosine-3'-phosphate
  modified_base 11: mod_base = OTHER; note = 2'-fluorocytidine-3'-phosphate
  modified_base 12: mod_base = OTHER; note = 2'-O-methylcytidine-3'-phosphate
  modified_base 13: mod_base = OTHER; note = 2'-O-methylguanosine-3'-phosphate
  modified_base 14: mod_base = OTHER; note = 2'-O-methyladenosine-3'-phosphate
  modified_base 15: mod_base = OTHER; note = 2'-O-methylguanosine-3'-phosphate
  modified_base 16: mod_base = OTHER; note = 2'-O-methylguanosine-3'-phosphate
  modified_base 17: mod_base = OTHER; note = 2'-O-methyluridine-3'-phosphate
  modified_base 18: mod_base = OTHER; note = 2'-O-methylcytidine-3'-phosphate
  modified_base 19: mod_base = OTHER; note = 2'-O-methylguanosine-3'-phosphorothioate
  modified_base 20: mod_base = OTHER; note = 2'-O-methyladenosine-3'-phosphorothioate
  modified_base 21: mod_base = OTHER; note = 2'-O-methyladenosine-3'-phosphate
aacccaccagccgaggtcgaa

SEQ ID NO: 3225 - RNA, 21 nt, synthetic construct
  source 1..21: mol_type = other RNA
  modified_base 1: mod_base = OTHER; note = 2'-O-methyluridine-3'-phosphorothioate
  modified_base 2: mod_base = OTHER; note = 2'-O-methylguanosine-3'-phosphorothioate
  modified_base 3: mod_base = OTHER; note = 2'-O-methyladenosine-3'-phosphate
  modified_base 4: mod_base = OTHER; note = 2'-O-methyluridine-3'-phosphate
  modified_base 5: mod_base = OTHER; note = 2'-O-methylguanosine-3'-phosphate
  modified_base 6: mod_base = OTHER; note = 2'-O-methylcytidine-3'-phosphate
  modified_base 7: mod_base = OTHER; note = 2'-fluorouridine-3'-phosphate
  modified_base 8: mod_base = OTHER; note = 2'-O-methylguanosine-3'-phosphate
  modified_base 9: mod_base = OTHER; note = 2'-fluorocytidine-3'-phosphate
  modified_base 10: mod_base = OTHER; note = 2'-fluorocytidine-3'-phosphate
  modified_base 11: mod_base = OTHER; note = 2'-fluoroadenosine-3'-phosphate
  modified_base 12: mod_base = OTHER; note = 2'-O-methyladenosine-3'-phosphate
  modified_base 13: mod_base = OTHER; note = 2'-O-methylguanosine-3'-phosphate
  modified_base 14: mod_base = OTHER; note = 2'-O-methylguanosine-3'-phosphate
  modified_base 15: mod_base = OTHER; note = 2'-O-methylcytidine-3'-phosphate
  modified_base 16: mod_base = OTHER; note = 2'-O-methylguanosine-3'-phosphate
  modified_base 17: mod_base = OTHER; note = 2'-O-methylcytidine-3'-phosphate
  modified_base 18: mod_base = OTHER; note = 2'-O-methyladenosine-3'-phosphate
  modified_base 19: mod_base = OTHER; note = 2'-O-methylcytidine-3'-phosphorothioate
  modified_base 20: mod_base = OTHER; note = 2'-O-methyluridine-3'-phosphorothioate
  modified_base 21: mod_base = OTHER; note = 2'-O-methyladenosine-3'-phosphate
tgatgctgccaaggcgcacta

SEQ ID NO: 3226 - RNA, 21 nt, synthetic construct
  source 1..21: mol_type = other RNA
  modified_base 1: mod_base = OTHER; note = 2'-O-methylcytidine-3'-phosphorothioate
  modified_base 2: mod_base = OTHER; note = 2'-O-methylcytidine-3'-phosphorothioate
  modified_base 3: mod_base = OTHER; note = 2'-O-methyladenosine-3'-phosphate
  modified_base 4: mod_base = OTHER; note = 2'-O-methyladenosine-3'-phosphate
  modified_base 5: mod_base = OTHER; note = 2'-O-methyluridine-3'-phosphate
  modified_base 6: mod_base = OTHER; note = 2'-O-methylguanosine-3'-phosphate
  modified_base 7: mod_base = OTHER; note = 2'-fluoroadenosine-3'-phosphate
  modified_base 8: mod_base = OTHER; note = 2'-O-methylguanosine-3'-phosphate
  modified_base 9: mod_base = OTHER; note = 2'-fluorocytidine-3'-phosphate
  modified_base 10: mod_base = OTHER; note = 2'-fluorouridine-3'-phosphate
  modified_base 11: mod_base = OTHER; note = 2'-fluoroguanosine-3'-phosphate
  modified_base 12: mod_base = OTHER; note = 2'-O-methylguanosine-3'-phosphate
  modified_base 13: mod_base = OTHER; note = 2'-O-methylcytidine-3'-phosphate
  modified_base 14: mod_base = OTHER; note = 2'-O-methylcytidine-3'-phosphate
  modified_base 15: mod_base = OTHER; note = 2'-O-methyluridine-3'-phosphate
  modified_base 16: mod_base = OTHER; note = 2'-O-methylguanosine-3'-phosphate
  modified_base 17: mod_base = OTHER; note = 2'-O-methylcytidine-3'-phosphate
  modified_base 18: mod_base = OTHER; note = 2'-O-methylcytidine-3'-phosphate
  modified_base 19: mod_base = OTHER; note = 2'-O-methylguanosine-3'-phosphorothioate
  modified_base 20: mod_base = OTHER; note = 2'-O-methyladenosine-3'-phosphorothioate
  modified_base 21: mod_base = OTHER; note = 2'-O-methyladenosine-3'-phosphate
ccaatgagctggcctgccgaa

SEQ ID NO: 3227 - RNA, 21 nt, synthetic construct
  source 1..21: mol_type = other RNA
  modified_base 1: mod_base = OTHER; note = 2'-O-methylguanosine-3'-phosphorothioate
  modified_base 2: mod_base = OTHER; note = 2'-O-methyluridine-3'-phosphorothioate
  modified_base 3: mod_base = OTHER; note = 2'-O-methylguanosine-3'-phosphate
  modified_base 4: mod_base = OTHER; note = 2'-O-methylcytidine-3'-phosphate
  modified_base 5: mod_base = OTHER; note = 2'-O-methyluridine-3'-phosphate
  modified_base 6: mod_base = OTHER; note = 2'-O-methylguanosine-3'-phosphate
  modified_base 7: mod_base = OTHER; note = 2'-fluorocytidine-3'-phosphate
  modified_base 8: mod_base = OTHER; note = 2'-O-methyladenosine-3'-phosphate
  modified_base 9: mod_base = OTHER; note = 2'-fluoroguanosine-3'-phosphate
  modified_base 10: mod_base = OTHER; note = 2'-fluorocytidine-3'-phosphate
  modified_base 11: mod_base = OTHER; note = 2'-fluoroguanosine-3'-phosphate
  modified_base 12: mod_base = OTHER; note = 2'-O-methylguanosine-3'-phosphate
  modified_base 13: mod_base = OTHER; note = 2'-O-methylguanosine-3'-phosphate
  modified_base 14: mod_base = OTHER; note = 2'-O-methyluridine-3'-phosphate
  modified_base 15: mod_base = OTHER; note = 2'-O-methylcytidine-3'-phosphate
  modified_base 16: mod_base = OTHER; note = 2'-O-methylcytidine-3'-phosphate
  modified_base 17: mod_base = OTHER; note = 2'-O-methyluridine-3'-phosphate
  modified_base 18: mod_base = OTHER; note = 2'-O-methylguanosine-3'-phosphate
  modified_base 19: mod_base = OTHER; note = 2'-O-methylcytidine-3'-phosphorothioate
  modified_base 20: mod_base = OTHER; note = 2'-O-methyladenosine-3'-phosphorothioate
  modified_base 21: mod_base = OTHER; note = 2'-O-methyladenosine-3'-phosphate
gtgctgcagcgggtcctgcaa

SEQ ID NO: 3228 - RNA, 21 nt, synthetic construct
  source 1..21: mol_type = other RNA
  modified_base 1: mod_base = OTHER; note = 2'-O-methylguanosine-3'-phosphorothioate
  modified_base 2: mod_base = OTHER; note = 2'-O-methylguanosine-3'-phosphorothioate
  modified_base 3: mod_base = OTHER; note = 2'-O-methylguanosine-3'-phosphate
  modified_base 4: mod_base = OTHER; note = 2'-O-methylcytidine-3'-phosphate
  modified_base 5: mod_base = OTHER; note = 2'-O-methylguanosine-3'-phosphate
  modified_base 6: mod_base = OTHER; note = 2'-O-methyluridine-3'-phosphate
  modified_base 7: mod_base = OTHER; note = 2'-fluoroguanosine-3'-phosphate
  modified_base 8: mod_base = OTHER; note = 2'-O-methylcytidine-3'-phosphate
  modified_base 9: mod_base = OTHER; note = 2'-fluoroadenosine-3'-phosphate
  modified_base 10: mod_base = OTHER; note = 2'-fluoroguanosine-3'-phosphate
  modified_base 11: mod_base = OTHER; note = 2'-fluoroadenosine-3'-phosphate
  modified_base 12: mod_base = OTHER; note = 2'-O-methylguanosine-3'-phosphate
  modified_base 13: mod_base = OTHER; note = 2'-O-methylcytidine-3'-phosphate
  modified_base 14: mod_base = OTHER; note = 2'-O-methylguanosine-3'-phosphate
  modified_base 15: mod_base = OTHER; note = 2'-O-methylcytidine-3'-phosphate
  modified_base 16: mod_base = OTHER; note = 2'-O-methylcytidine-3'-phosphate
  modified_base 17: mod_base = OTHER; note = 2'-O-methyladenosine-3'-phosphate
  modified_base 18: mod_base = OTHER; note = 2'-O-methylguanosine-3'-phosphate
  modified_base 19: mod_base = OTHER; note = 2'-O-methyluridine-3'-phosphorothioate
  modified_base 20: mod_base = OTHER; note = 2'-O-methyladenosine-3'-phosphorothioate
  modified_base 21: mod_base = OTHER; note = 2'-O-methyladenosine-3'-phosphate
gggcgtgcagagcgccagtaa

SEQ ID NO: 3229 - RNA, 21 nt, synthetic construct
  source 1..21: mol_type = other RNA
  modified_base 1: mod_base = OTHER; note = 2'-O-methylguanosine-3'-phosphorothioate
  modified_base 2: mod_base = OTHER; note = 2'-O-methylguanosine-3'-phosphorothioate
  modified_base 3: mod_base = OTHER; note = 2'-O-methyluridine-3'-phosphate
  modified_base 4: mod_base = OTHER; note = 2'-O-methylguanosine-3'-phosphate
  modified_base 5: mod_base = OTHER; note = 2'-O-methyladenosine-3'-phosphate
  modified_base 6: mod_base = OTHER; note = 2'-O-methylguanosine-3'-phosphate
  modified_base 7: mod_base = OTHER; note = 2'-fluorouridine-3'-phosphate
  modified_base 8: mod_base = OTHER; note = 2'-O-methylguanosine-3'-phosphate
  modified_base 9: mod_base = OTHER; note = 2'-fluoroguanosine-3'-phosphate
  modified_base 10: mod_base = OTHER; note = 2'-fluorocytidine-3'-phosphate
  modified_base 11: mod_base = OTHER; note = 2'-fluoroadenosine-3'-phosphate
  modified_base 12: mod_base = OTHER; note = 2'-O-methylcytidine-3'-phosphate
  modified_base 13: mod_base = OTHER; note = 2'-O-methylcytidine-3'-phosphate
  modified_base 14: mod_base = OTHER; note = 2'-O-methyluridine-3'-phosphate
  modified_base 15: mod_base = OTHER; note = 2'-O-methylguanosine-3'-phosphate
  modified_base 16: mod_base = OTHER; note = 2'-O-methylcytidine-3'-phosphate
  modified_base 17: mod_base = OTHER; note = 2'-O-methylguanosine-3'-phosphate
  modified_base 18: mod_base = OTHER; note = 2'-O-methyladenosine-3'-phosphate
  modified_base 19: mod_base = OTHER; note = 2'-O-methyladenosine-3'-phosphorothioate
  modified_base 20: mod_base = OTHER; note = 2'-O-methyluridine-3'-phosphorothioate
  modified_base 21: mod_base = OTHER; note = 2'-O-methyladenosine-3'-phosphate
ggtgagtggcacctgcgaata

SEQ ID NO: 3230 - RNA, 21 nt, synthetic construct
  source 1..21: mol_type = other RNA
  modified_base 1: mod_base = OTHER; note = 2'-O-methyladenosine-3'-phosphorothioate
  modified_base 2: mod_base = OTHER; note = 2'-O-methylcytidine-3'-phosphorothioate
  modified_base 3: mod_base = OTHER; note = 2'-O-methylguanosine-3'-phosphate
  modified_base 4: mod_base = OTHER; note = 2'-O-methylguanosine-3'-phosphate
  modified_base 5: mod_base = OTHER; note = 2'-O-methyladenosine-3'-phosphate
  modified_base 6: mod_base = OTHER; note = 2'-O-methylguanosine-3'-phosphate
  modified_base 7: mod_base = OTHER; note = 2'-fluoroguanosine-3'-phosphate
  modified_base 8: mod_base = OTHER; note = 2'-O-methylguanosine-3'-phosphate
  modified_base 9: mod_base = OTHER; note = 2'-fluoroadenosine-3'-phosphate
  modified_base 10: mod_base = OTHER; note = 2'-fluoroguanosine-3'-phosphate
  modified_base 11: mod_base = OTHER; note = 2'-fluoroadenosine-3'-phosphate
  modified_base 12: mod_base = OTHER; note = 2'-O-methylguanosine-3'-phosphate
  modified_base 13: mod_base = OTHER; note = 2'-O-methylguanosine-3'-phosphate
  modified_base 14: mod_base = OTHER; note = 2'-O-methyladenosine-3'-phosphate
  modified_base 15: mod_base = OTHER; note = 2'-O-methylcytidine-3'-phosphate
  modified_base 16: mod_base = OTHER; note = 2'-O-methyladenosine-3'-phosphate
  modified_base 17: mod_base = OTHER; note = 2'-O-methylcytidine-3'-phosphate
  modified_base 18: mod_base = OTHER; note = 2'-O-methylguanosine-3'-phosphate
  modified_base 19: mod_base = OTHER; note = 2'-O-methylguanosine-3'-phosphorothioate
  modified_base 20: mod_base = OTHER; note = 2'-O-methyladenosine-3'-phosphorothioate
  modified_base 21: mod_base = OTHER; note = 2'-O-methyladenosine-3'-phosphate
acggagggagaggacacggaa

SEQ ID NO: 3231 - RNA, 21 nt, synthetic construct
  source 1..21: mol_type = other RNA
ttccttcttcatcttgatcaa

SEQ ID NO: 3232 - RNA, 21 nt, synthetic construct
  source 1..21: mol_type = other RNA
cactctaaaactgatgttcaa

SEQ ID NO: 3233 - RNA, 21 nt, synthetic construct
  source 1..21: mol_type = other RNA
tcttctgtatcactgactcaa

SEQ ID NO: 3234 - RNA, 21 nt, synthetic construct
  source 1..21: mol_type = other RNA
cagatcttctgactgatccaa

SEQ ID NO: 3235 - RNA, 21 nt, synthetic construct
  source 1..21: mol_type = other RNA
tgacacatttttctccataaa

SEQ ID NO: 3236 - RNA, 21 nt, synthetic construct
  source 1..21: mol_type = other RNA
ggaaactcatttttacataaa

SEQ ID NO: 3237 - RNA, 21 nt, synthetic construct
  source 1..21: mol_type = other RNA
atcagcaacttagaaattcta

SEQ ID NO: 3238 - RNA, 21 nt, synthetic construct
  source 1..21: mol_type = other RNA
cttatatttctctagagtaca

SEQ ID NO: 3239 - RNA, 21 nt, synthetic construct
  source 1..21: mol_type = other RNA
aactccaagaatcttttatca

SEQ ID NO: 3240 - RNA, 21 nt, synthetic construct
  source 1..21: mol_type = other RNA
cttcaaacattcctgcattaa

SEQ ID NO: 3241 - RNA, 21 nt, synthetic construct
  source 1..21: mol_type = other RNA
tcgttcttctcctcaactaga

SEQ ID NO: 3242 - RNA, 21 nt, synthetic construct
  source 1..21: mol_type = other RNA
aaagattaatcctctcacaca

SEQ ID NO: 3243 - RNA, 21 nt, synthetic construct
  source 1..21: mol_type = other RNA
actaacctcatcaaagataca

SEQ ID NO: 3244 - RNA, 21 nt, synthetic construct
  source 1..21: mol_type = other RNA
caccacttattactaataaaa

SEQ ID NO: 3245 - RNA, 21 nt, synthetic construct
  source 1..21: mol_type = other RNA
tggtactagaaatattcttta

SEQ ID NO: 3246 - RNA, 21 nt, synthetic construct
  source 1..21: mol_type = other RNA
gctgtcatttgttcactctaa

SEQ ID NO: 3247 - RNA, 21 nt, synthetic construct
  source 1..21: mol_type = other RNA
actcaacaatttatgaactaa

SEQ ID NO: 3248 - RNA, 21 nt, synthetic construct
  source 1..21: mol_type = other RNA
agtatgactcattaatagaaa

SEQ ID NO: 3249 - RNA, 21 nt, synthetic construct
  source 1..21: mol_type = other RNA
ctgctgattttcttaataaga

SEQ ID NO: 3250 - RNA, 21 nt, synthetic construct
  source 1..21: mol_type = other RNA
tatctttagatccacatctta

SEQ ID NO: 3251 - RNA, 21 nt, synthetic construct
  source 1..21: mol_type = other RNA
cgagacattccttatcacaaa

SEQ ID NO: 3252 - RNA, 21 nt, synthetic construct
  source 1..21: mol_type = other RNA
tactgaatcagattaatttca

SEQ ID NO: 3253 - RNA, 21 nt, synthetic construct
  source 1..21: mol_type = other RNA
cttacttaaatccttcactga

SEQ ID NO: 3254 - RNA, 21 nt, synthetic construct
  source 1..21: mol_type = other RNA
tcgaaagaatcattcaaacta

SEQ ID NO: 3255 - RNA, 21 nt, synthetic construct
  source 1..21: mol_type = other RNA
aaatgacctatcactacttaa

SEQ ID NO: 3256 - RNA, 21 nt, synthetic construct
  source 1..21: mol_type = other RNA
caagtcatttcctctctacga

SEQ ID NO: 3257 - RNA, 21 nt, synthetic construct
  source 1..21: mol_type = other RNA
atgcagtttcttacttatcta

SEQ ID NO: 3258 - RNA, 21 nt, synthetic construct
  source 1..21: mol_type = other RNA
tcaatgcaatacactgttcaa

SEQ ID NO: 3259 - RNA, 21 nt, synthetic construct
  source 1..21: mol_type = other RNA
tctatgtacctactgacacaa

SEQ ID NO: 3260 - RNA, 21 nt, synthetic construct
  source 1..21: mol_type = other RNA
tgaattccagtcttatcttaa

SEQ ID NO: 3261 - RNA, 21 nt, synthetic construct
  source 1..21: mol_type = other RNA
ttgctgtaataccaaaactaa

SEQ ID NO: 3262 - RNA, 21 nt, synthetic construct
  source 1..21: mol_type = other RNA
ggatcacttctttcaaatcaa

SEQ ID NO: 3263 - RNA, 21 nt, synthetic construct
  source 1..21: mol_type = other RNA
gaactagaaaactattcttaa

SEQ ID NO: 3264 - RNA, 21 nt, synthetic construct
  source 1..21: mol_type = other RNA
acatttccatactgtctgtta

SEQ ID NO: 3265 - RNA, 21 nt, synthetic construct
  source 1..21: mol_type = other RNA
tgatccttcacagtgtcaata

SEQ ID NO: 3266 - RNA, 21 nt, synthetic construct
  source 1..21: mol_type = other RNA
gatttctgagaacaagtaaaa

SEQ ID NO: 3267 - RNA, 21 nt, synthetic construct
  source 1..21: mol_type = other RNA
cctacttgtgaaatacattta

SEQ ID NO: 3268 - RNA, 21 nt, synthetic construct
  source 1..21: mol_type = other RNA
caactggaattttccaattta

SEQ ID NO: 3269 - RNA, 21 nt, synthetic construct
  source 1..21: mol_type = other RNA
tctaatcctgatgagagttaa

SEQ ID NO: 3270 - RNA, 21 nt, synthetic construct
  source 1..21: mol_type = other RNA
agcctcattatcaaaattcta

SEQ ID NO: 3271 - RNA, 21 nt, synthetic construct
  source 1..21: mol_type = other RNA
aatttctgatgctttttacta

SEQ ID NO: 3272 - RNA, 21 nt, synthetic construct
  source 1..21: mol_type = other RNA
taccattagatgaaatcttaa

SEQ ID NO: 3273 - RNA, 21 nt, synthetic construct
  source 1..21: mol_type = other RNA
ctgtgaattcttccaaccata

SEQ ID NO: 3274 - RNA, 21 nt, synthetic construct
  source 1..21: mol_type = other RNA
ctaatactccagatttttata

SEQ ID NO: 3275 - RNA, 21 nt, synthetic construct
  source 1..21: mol_type = other RNA
ggacacatacattgaataaaa

SEQ ID NO: 3276 - RNA, 21 nt, synthetic construct
  source 1..21: mol_type = other RNA
tttgtcataatgctgctttga

SEQ ID NO: 3277 - RNA, 21 nt, synthetic construct
  source 1..21: mol_type = other RNA
ttcatctttctgttaatttca

SEQ ID NO: 3278 - RNA, 21 nt, synthetic construct
  source 1..21: mol_type = other RNA
cagtgaaaccattaattttca

SEQ ID NO: 3279 - RNA, 21 nt, synthetic construct
  source 1..21: mol_type = other RNA
taactgcaagactgatttcta

SEQ ID NO: 3280 - RNA, 21 nt, synthetic construct
  source 1..21: mol_type = other RNA
agaattcctccttacctcaaa

SEQ ID NO: 3281 - RNA, 21 nt, synthetic construct
  source 1..21: mol_type = other RNA
tattacagatcttactttgta

SEQ ID NO: 3282 - RNA, 21 nt, synthetic construct
  source 1..21: mol_type = other RNA
ttatctgaaagatatcaatta

SEQ ID NO: 3283 - RNA, 21 nt, synthetic construct
  source 1..21: mol_type = other RNA
agatctgttctggaaaatcaa

SEQ ID NO: 3284 - RNA, 21 nt, synthetic construct
  source 1..21: mol_type = other RNA
cccagaatacaacttccttca

SEQ ID NO: 3285 - RNA, 21 nt, synthetic construct
  source 1..21: mol_type = other RNA
gttgatctttcagtgctaaaa

SEQ ID NO: 3286 - RNA, 21 nt, synthetic construct
  source 1..21: mol_type = other RNA
ctaagctttatttattagaca

SEQ ID NO: 3287 - RNA, 21 nt, synthetic construct
  source 1..21: mol_type = other RNA
agcttggaatctatatcttta

SEQ ID NO: 3288 - RNA, 21 nt, synthetic construct
  source 1..21: mol_type = other RNA
ttattatttctgaagcctaaa

SEQ ID NO: 3289 - RNA, 21 nt, synthetic construct
  source 1..21: mol_type = other RNA
cctttgttgtatttaacaaaa

SEQ ID NO: 3290 - RNA, 21 nt, synthetic construct
  source 1..21: mol_type = other RNA
gctctctaactaatcgatcaa

SEQ ID NO: 3291 - RNA, 21 nt, synthetic construct
  source 1..21: mol_type = other RNA
aaagactacatgacagaaata

SEQ ID NO: 3292 - RNA, 21 nt, synthetic construct
  source 1..21: mol_type = other RNA
caggattcgtatttttaaaga

SEQ ID NO: 3293 - RNA, 21 nt, synthetic construct
  source 1..21: mol_type = other RNA
ccttgctaagtaattgacata

SEQ ID NO: 3294 - RNA, 21 nt, synthetic construct
  source 1..21: mol_type = other RNA
cctatgcactttcacaggaaa

SEQ ID NO: 3295 - RNA, 21 nt, synthetic construct
  source 1..21: mol_type = other RNA
atgctgaaatatgtttcaaca

SEQ ID NO: 3296 - RNA, 21 nt, synthetic construct
  source 1..21: mol_type = other RNA
ccttttaattcaaatctacta

SEQ ID NO: 3297 - RNA, 21 nt, synthetic construct
  source 1..21: mol_type = other RNA
actggacttattggatttaaa

SEQ ID NO: 3298 - RNA, 21 nt, synthetic construct
  source 1..21: mol_type = other RNA
catctgaatcagatggtacaa

SEQ ID NO: 3299 - RNA, 21 nt, synthetic construct
  source 1..21: mol_type = other RNA
aattctgatagcaatctgtga

SEQ ID NO: 3300 - RNA, 21 nt, synthetic construct
  source 1..21: mol_type = other RNA
tcaagtcaaggatgctatcta

SEQ ID NO: 3301 - RNA, 21 nt, synthetic construct
  source 1..21: mol_type = other RNA
tcactgaaaaccacaagataa

SEQ ID NO: 3302 - RNA, 21 nt, synthetic construct
  source 1..21: mol_type = other RNA
acctgttgaacagtcttcaaa

SEQ ID NO: 3303 - RNA, 21 nt, synthetic construct
  source 1..21: mol_type = other RNA
tcaagtgacatatttcagtta

SEQ ID NO: 3304 - RNA, 21 nt, synthetic construct
  source 1..21: mol_type = other RNA
tcaggaacttcaggattgcta

SEQ ID NO: 3305 - RNA, 21 nt, synthetic construct
  source 1..21: mol_type = other RNA
acggagtattagtagcttaaa

SEQ ID NO: 3306 - RNA, 21 nt, synthetic construct
  source 1..21: mol_type = other RNA
attgtcaatgaattttatgaa

SEQ ID NO: 3307 - RNA, 21 nt, synthetic construct
  source 1..21: mol_type = other RNA
gaacagcaaacaaatattgaa

SEQ ID NO: 3308 - RNA, 21 nt, synthetic construct
  source 1..21: mol_type = other RNA
tgaactattttcgtgcattaa

SEQ ID NO: 3309 - RNA, 21 nt, synthetic construct
  source 1..21: mol_type = other RNA
actggaatacttatttttcaa

SEQ ID NO: 3310 - RNA, 21 nt, synthetic construct
  source 1..21: mol_type = other RNA
ttatcttgcagagatctctga

SEQ ID NO: 3311 - RNA, 21 nt, synthetic construct
  source 1..21: mol_type = other RNA
gaagtgttagaatttttgata

SEQ ID NO: 3312 - RNA, 21 nt, synthetic construct
  source 1..21: mol_type = other RNA
tcaatttaagatctctggaaa

SEQ ID NO: 3313 - RNA, 21 nt, synthetic construct
  source 1..21: mol_type = other RNA
tggaccatatttacaatgtta

SEQ ID NO: 3314 - RNA, 21 nt, synthetic construct
  source 1..21: mol_type = other RNA
tagtcattgaagcaatcctta

SEQ ID NO: 3315 - RNA, 21 nt, synthetic construct
  source 1..21: mol_type = other RNA
agctgtttaggtttaacaata

SEQ ID NO: 3316 - RNA, 21 nt, synthetic construct
  source 1..21: mol_type = other RNA
caaggcaaatgatgtaaataa

SEQ ID NO: 3317 - RNA, 21 nt, synthetic construct
  source 1..21: mol_type = other RNA
atccaattactactggaaaca

SEQ ID NO: 3318 - RNA, 21 nt, synthetic construct
  source 1..21: mol_type = other RNA
acttacaatatatatatccta

SEQ ID NO: 3319 - RNA, 21 nt, synthetic construct
  source 1..21: mol_type = other RNA
atgcagtttggtatctgacaa

SEQ ID NO: 3320 - RNA, 21 nt, synthetic construct
  source 1..21: mol_type = other RNA
ccttatttcaagacactggta

SEQ ID NO: 3321 - RNA, 21 nt, synthetic construct
  source 1..21: mol_type = other RNA
gaagggatttattctttagta

SEQ ID NO: 3322 - RNA, 21 nt, synthetic construct
  source 1..21: mol_type = other RNA
atccttgctacggatcttaaa

SEQ ID NO: 3323 - RNA, 21 nt, synthetic construct
  source 1..21: mol_type = other RNA
actgactatcccgaagcaaaa

SEQ ID NO: 3324 - RNA, 21 nt, synthetic construct
  source 1..21: mol_type = other RNA
tgtatttctgctattatttca

SEQ ID NO: 3325 - RNA, 21 nt, synthetic construct
  source 1..21: mol_type = other RNA
tgtaacaataactagcctaaa

SEQ ID NO: 3326 - RNA, 21 nt, synthetic construct
  source 1..21: mol_type = other RNA
gttgtttttactctagctcaa

SEQ ID NO: 3327 - RNA, 21 nt, synthetic construct
  source 1..21: mol_type = other RNA
caggcagttttatacaatgaa

SEQ ID NO: 3328 - RNA, 21 nt, synthetic construct
  source 1..21: mol_type = other RNA
aggattctcagtcaggttata

SEQ ID NO: 3329 - RNA, 21 nt, synthetic construct
  source 1..21: mol_type = other RNA
attttccatcatgtttaagta

SEQ ID NO: 3330 - RNA, 21 nt, synthetic construct
  source 1..21: mol_type = other RNA
tgccacttttgttaccattga

SEQ ID NO: 3331 - RNA, 21 nt, synthetic construct
  source 1..21: mol_type = other RNA
acttgctagtgtgtggatata

SEQ ID NO: 3332 - RNA, 21 nt, synthetic construct
  source 1..21: mol_type = other RNA
aatcttacttgagaaattgca

SEQ ID NO: 3333 - RNA, 21 nt, synthetic construct
  source 1..21: mol_type = other RNA
agttcgagacttgcatttgaa

SEQ ID NO: 3334 - RNA, 21 nt, synthetic construct
  source 1..21: mol_type = other RNA
ccatagaatttcctgatacta

SEQ ID NO: 3335 - RNA, 21 nt, synthetic construct
  source 1..21: mol_type = other RNA
aggtaattcctttagaatata

SEQ ID NO: 3336 - RNA, 21 nt, synthetic construct
  source 1..21: mol_type = other RNA
cttatggaaactcaacaagaa

SEQ ID NO: 3337 - RNA, 21 nt, synthetic construct
  source 1..21: mol_type = other RNA
aagcagcattttaaattacga

SEQ ID NO: 3338 - RNA, 21 nt, synthetic construct
  source 1..21: mol_type = other RNA
tgactctcaactgaccattca

SEQ ID NO: 3339 - RNA, 21 nt, synthetic construct
  source 1..21: mol_type = other RNA
aggtttatccatgaaggacta

SEQ ID NO: 3340 - RNA, 21 nt, synthetic construct
  source 1..21: mol_type = other RNA
accaagaatttggcatttcaa

SEQ ID NO: 3341 - RNA, 21 nt, synthetic construct
  source 1..21: mol_type = other RNA
tatctagaatatttggcttaa

SEQ ID NO: 3342 - RNA, 21 nt, synthetic construct
  source 1..21: mol_type = other RNA
ctcctgcagaatacatacaaa

SEQ ID NO: 3343 - RNA, 21 nt, synthetic construct
  source 1..21: mol_type = other RNA
tcacaccatttcctggattta

SEQ ID NO: 3344 - RNA, 21 nt, synthetic construct
  source 1..21: mol_type = other RNA
atgtggaattcaagcgcttta

SEQ ID NO: 3345 - RNA, 21 nt, synthetic construct
  source 1..21: mol_type = other RNA
attgtgtattatctactatga

SEQ ID NO: 3346 - RNA, 21 nt, synthetic construct
  source 1..21: mol_type = other RNA
aatggagtaatgaaaatgata

SEQ ID NO: 3347 - RNA, 21 nt, synthetic construct
  source 1..21: mol_type = other RNA
actggtttattggaaatatta

SEQ ID NO: 3348 - RNA, 21 nt, synthetic construct
  source 1..21: mol_type = other RNA
caagtgtatgtgtataaagta

SEQ ID NO: 3349 - RNA, 21 nt, synthetic construct
  source 1..21: mol_type = other RNA
tacaagcatgcatattgagaa

SEQ ID NO: 3350 - RNA, 21 nt, synthetic construct
  source 1..21: mol_type = other RNA
tgtgtcttttatgtctttgaa

SEQ ID NO: 3351 - RNA, 21 nt, synthetic construct
  source 1..21: mol_type = other RNA
attttctcgcagaattcaata

SEQ ID NO: 3352 - RNA, 21 nt, synthetic construct
  source 1..21: mol_type = other RNA
tagcgacagtttgagtaaaaa

SEQ ID NO: 3353 - RNA, 21 nt, synthetic construct
  source 1..21: mol_type = other RNA
ctggtgtatgaatactttgta

SEQ ID NO: 3354 - RNA, 21 nt, synthetic construct
  source 1..21: mol_type = other RNA
gtgataagtggctaacagaaa

SEQ ID NO: 3355 - RNA, 21 nt, synthetic construct
  source 1..21: mol_type = other RNA
gtaggctaatattttctatta

SEQ ID NO: 3356 - RNA, 21 nt, synthetic construct
  source 1..21: mol_type = other RNA
cctcttcatcctcgactgtca

SEQ ID NO: 3357 - RNA, 21 nt, synthetic construct
  source 1..21: mol_type = other RNA
aattgccataagccatattaa

SEQ ID NO: 3358 - RNA, 21 nt, synthetic construct
  source 1..21: mol_type = other RNA
gcgaatattttgtcagctaaa

SEQ ID NO: 3359 - RNA, 21 nt, synthetic construct
  source 1..21: mol_type = other RNA
atccagtgttgcctttctgaa

SEQ ID NO: 3360 - RNA, 21 nt, synthetic construct
  source 1..21: mol_type = other RNA
aaagtctatgcctgtctaaaa

SEQ ID NO: 3361 - RNA, 21 nt, synthetic construct
  source 1..21: mol_type = other RNA
ggacatcagaagtttgaatta

SEQ ID NO: 3362 - RNA, 21 nt, synthetic construct
  source 1..21: mol_type = other RNA
ggcgaattgcttatatttcta

SEQ ID NO: 3363 - RNA, 21 nt, synthetic construct
  source 1..21: mol_type = other RNA
cacactatgtgtaaaccagta

SEQ ID NO: 3364 - RNA, 21 nt, synthetic construct
  source 1..21: mol_type = other RNA
caggtgaagaagaaaacatta

SEQ ID NO: 3365 - RNA, 21 nt, synthetic construct
  source 1..21: mol_type = other RNA
gtgagctcttatttttcacta

SEQ ID NO: 3366 - RNA, 21 nt, synthetic construct
  source 1..21: mol_type = other RNA
aaagctgatgggaataaacta

SEQ ID NO: 3367 - RNA, 21 nt, synthetic construct
  source 1..21: mol_type = other RNA
gtgtcgttaggagaaactgca

SEQ ID NO: 3368 - RNA, 21 nt, synthetic construct
  source 1..21: mol_type = other RNA
gggacttaaaacaatggtata

SEQ ID NO: 3369 - RNA, 21 nt, synthetic construct
  source 1..21: mol_type = other RNA
ctgatggtagaattaaccata

SEQ ID NO: 3370 - RNA, 21 nt, synthetic construct
  source 1..21: mol_type = other RNA
actatgtgtgttttatttcta

SEQ ID NO: 3371 - RNA, 21 nt, synthetic construct
  source 1..21: mol_type = other RNA
ctgataatttatatttgcaca

SEQ ID NO: 3372 - RNA, 21 nt, synthetic construct
  source 1..21: mol_type = other RNA
gtccttaaattatttaaccca

SEQ ID NO: 3373 - RNA, 21 nt, synthetic construct
  source 1..21: mol_type = other RNA
cgcaatatggtgtcagatcta

SEQ ID NO: 3374 - RNA, 21 nt, synthetic construct
  source 1..21: mol_type = other RNA
ttcgaagagctgctctaatca

SEQ ID NO: 3375 - RNA, 21 nt, synthetic construct
  source 1..21: mol_type = other RNA
tttctgctgagagtattcaga

SEQ ID NO: 3376 - RNA, 21 nt, synthetic construct
  source 1..21: mol_type = other RNA
ttgaacaggaagtatcactga

SEQ ID NO: 3377 - RNA, 21 nt, synthetic construct
  source 1..21: mol_type = other RNA
tgccttgtatttccagagaaa

SEQ ID NO: 3378 - RNA, 21 nt, synthetic construct
  source 1..21: mol_type = other RNA
gttactatggcagttgcaaaa

SEQ ID NO: 3379 - RNA, 21 nt, synthetic construct
  source 1..21: mol_type = other RNA
atggctgaattttaaagctga

SEQ ID NO: 3380 - RNA, 21 nt, synthetic construct
  source 1..21: mol_type = other RNA
gtccattcatggatcgttcta

SEQ ID NO: 3381 - RNA, 21 nt, synthetic construct
  source 1..21: mol_type = other RNA
tgtgtaactcctatgatgcta

SEQ ID NO: 3382 - RNA, 21 nt, synthetic construct
  source 1..21: mol_type = other RNA
tggcagtttcccactcctata

SEQ ID NO: 3383 - RNA, 21 nt, synthetic construct
  source 1..21: mol_type = other RNA
cctcaagcagatgagattcaa

SEQ ID NO: 3384 - RNA, 21 nt, synthetic construct
  source 1..21: mol_type = other RNA
atgttgttttctcaaaagcaa

SEQ ID NO: 3385 - RNA, 21 nt, synthetic construct
  source 1..21: mol_type = other RNA
gagggatttctgctcaatgca

SEQ ID NO: 3386 - RNA, 21 nt, synthetic construct
  source 1..21: mol_type = other RNA
gccttcttcttcctcacctga

SEQ ID NO: 3387 - RNA, 21 nt, synthetic construct
  source 1..21: mol_type = other RNA
ttgagattgaatcacatttca

SEQ ID NO: 3388 - RNA, 21 nt, synthetic construct
  source 1..21: mol_type = other RNA
ctgttcagtgctattctccca

SEQ ID NO: 3389 - RNA, 21 nt, synthetic construct
  source 1..21: mol_type = other RNA
cctggcttacagcagatccaa

SEQ ID NO: 3390 - RNA, 21 nt, synthetic construct
  source 1..21: mol_type = other RNA
gacagcagaaaattatttcaa

SEQ ID NO: 3391 - RNA, 21 nt, synthetic construct
  source 1..21: mol_type = other RNA
ttgggtttctttagtttatga

SEQ ID NO: 3392 - RNA, 21 nt, synthetic construct
  source 1..21: mol_type = other RNA
caccatgtaggtctcagaaga

SEQ ID NO: 3393 - RNA, 21 nt, synthetic construct
  source 1..21: mol_type = other RNA
gttgtggaacaggaaatgaaa

SEQ ID NO: 3394 - RNA, 21 nt, synthetic construct
  source 1..21: mol_type = other RNA
ggagaacatatcatattttga

SEQ ID NO: 3395 - RNA, 21 nt, synthetic construct
  source 1..21: mol_type = other RNA
cagccaaaatgatggcaaaaa

SEQ ID NO: 3396 - RNA, 21 nt, synthetic construct
  source 1..21: mol_type = other RNA
ccaatttttgaacttgtagaa

SEQ ID NO: 3397 - RNA, 21 nt, synthetic construct
  source 1..21: mol_type = other RNA
ataggaatagtttgccaacta

SEQ ID NO: 3398 - RNA, 21 nt, synthetic construct
  source 1..21: mol_type = other RNA
tttgaatgttttggagaaaaa

SEQ ID NO: 3399 - RNA, 21 nt, synthetic construct
  source 1..21: mol_type = other RNA
gtcaatatttaatgaatcaca

SEQ ID NO: 3400 - RNA, 21 nt, synthetic construct
  source 1..21: mol_type = other RNA
tgagaatatattaaatgcaca

SEQ ID NO: 3401 - RNA, 21 nt, synthetic construct
  source 1..21: mol_type = other RNA
taacaagggactaaataggaa

SEQ ID NO: 3402 - RNA, 21 nt, synthetic construct
  source 1..21: mol_type = other RNA
ggcttcttcttccacctctga

SEQ ID NO: 3403 - RNA, 21 nt, synthetic construct
  source 1..21: mol_type = other RNA
ttggaacatgtggttatctta

SEQ ID NO: 3404 - RNA, 21 nt, synthetic construct
  source 1..21: mol_type = other RNA
cagagaacagatgattcttta

SEQ ID NO: 3405 - RNA, 21 nt, synthetic construct
  source 1..21: mol_type = other RNA
ctgttattttattgggtttta

SEQ ID NO: 3406 - RNA, 21 nt, synthetic construct
  source 1..21: mol_type = other RNA
atgaagaagcaaatcttggta

SEQ ID NO: 3407 - RNA, 21 nt, synthetic construct
  source 1..21: mol_type = other RNA
tttggaatcatgcaattttga

SEQ ID NO: 3408 - RNA, 21 nt, synthetic construct
  source 1..21: mol_type = other RNA
caatgttttgtaaacttgcta

SEQ ID NO: 3409 - RNA, 21 nt, synthetic construct
  source 1..21: mol_type = other RNA
ggatcgtaataatggcaaaaa

SEQ ID NO: 3410 - RNA, 21 nt, synthetic construct
  source 1..21: mol_type = other RNA
gtgctttctcaggttcctgta

SEQ ID NO: 3411 - RNA, 21 nt, synthetic construct
  source 1..21: mol_type = other RNA
atgatactgaaagtggtgata

SEQ ID NO: 3412 - RNA, 21 nt, synthetic construct
  source 1..21: mol_type = other RNA
tcactggacctgattttagta

SEQ ID NO: 3413 - RNA, 21 nt, synthetic construct
  source 1..21: mol_type = other RNA
gaactttttgcttttatgaaa

SEQ ID NO: 3414 - RNA, 21 nt, synthetic construct
  source 1..21: mol_type = other RNA
gaacacagcacagatttgtta

SEQ ID NO: 3415 - RNA, 21 nt, synthetic construct
  source 1..21: mol_type = other RNA
atatggaaggaaatcgtagaa

SEQ ID NO: 3416 - RNA, 21 nt, synthetic construct
  source 1..21: mol_type = other RNA
gctatctaaatgggcctttta

SEQ ID NO: 3417 - RNA, 21 nt, synthetic construct
  source 1..21: mol_type = other RNA
caaaaccaccaagaaggaaaa

SEQ ID NO: 3418 - RNA, 21 nt, synthetic construct
  source 1..21: mol_type = other RNA
ccacagatgtgctacatgcaa

SEQ ID NO: 3419 - RNA, 21 nt, synthetic construct
  source 1..21: mol_type = other RNA
aaagtcatacatgtacaagca

SEQ ID NO: 3420 - RNA, 21 nt, synthetic construct
  source 1..21: mol_type = other RNA
tagaagcagaagaggataata

SEQ ID NO: 3421 - RNA, 21 nt, synthetic construct
  source 1..21: mol_type = other RNA
cgtgtgttcgcacagcttgaa

SEQ ID NO: 3422 - RNA, 21 nt, synthetic construct
  source 1..21: mol_type = other RNA
gctggtgttttgtccagtcta

SEQ ID NO: 3423 - RNA, 21 nt, synthetic construct
  source 1..21: mol_type = other RNA
atggaaaacaatctaaatcca

SEQ ID NO: 3424 - RNA, 21 nt, synthetic construct
  source 1..21: mol_type = other RNA
cattagaaaatggctatcgaa

SEQ ID NO: 3425 - RNA, 21 nt, synthetic construct
  source 1..21: mol_type = other RNA
atggacagaaggcattgtcaa

SEQ ID NO: 3426 - RNA, 21 nt, synthetic construct
  source 1..21: mol_type = other RNA
cagattgctgcagtggaaaaa

SEQ ID NO: 3427 - RNA, 21 nt, synthetic construct
  source 1..21: mol_type = other RNA
aggtggaaatggagttgatca

SEQ ID NO: 3428 - RNA, 21 nt, synthetic construct
  source 1..21: mol_type = other RNA
ctgggcaatgcacctaataca

SEQ ID NO: 3429 - RNA, 21 nt, synthetic construct
  source 1..21: mol_type = other RNA
atttccctctgcctaaagaca

SEQ ID NO: 3430 - RNA, 21 nt, synthetic construct
  source 1..21: mol_type = other RNA
cgcttctgcaacgtggagcta

SEQ ID NO: 3431 - RNA, 21 nt, synthetic construct
  source 1..21: mol_type = other RNA
agattcatattgtatttccca

SEQ ID NO: 3432 - RNA, 21 nt, synthetic construct
  source 1..21: mol_type = other RNA
aggacaaatgcatttctagta

SEQ ID NO: 3433 - RNA, 21 nt, synthetic construct
  source 1..21: mol_type = other RNA
ttagacgtgttgagtgagtga

SEQ ID NO: 3434 - RNA, 21 nt, synthetic construct
  source 1..21: mol_type = other RNA
ctgtggacatcaaatgctgaa

SEQ ID NO: 3435 - RNA, 21 nt, synthetic construct
  source 1..21: mol_type = other RNA
aggccttaatactgtgagaga

SEQ ID NO: 3436 - RNA, 21 nt, synthetic construct
  source 1..21: mol_type = other RNA
agaaatcattgcctagtgtta

SEQ ID NO: 3437 - RNA, 21 nt, synthetic construct
  source 1..21: mol_type = other RNA
tgagtgctgagttccttgcta

SEQ ID NO: 3438 - RNA, 21 nt, synthetic construct
  source 1..21: mol_type = other RNA
gccatgcatgattatgatcaa

SEQ ID NO: 3439 - RNA, 21 nt, synthetic construct
  source 1..21: mol_type = other RNA
tgctgctggtttgctaccaga

SEQ ID NO: 3440 - RNA, 21 nt, synthetic construct
  source 1..21: mol_type = other RNA
cagatgaagaggaatagcgaa

SEQ ID NO: 3441 - RNA, 21 nt, synthetic construct
  source 1..21: mol_type = other RNA
atccaggtgcatcaatttcta

SEQ ID NO: 3442 - RNA, 21 nt, synthetic construct
  source 1..21: mol_type = other RNA
aataagccaagcgttatctta

SEQ ID NO: 3443 - RNA, 21 nt, synthetic construct
  source 1..21: mol_type = other RNA
gagaggatccttgctctgcta

SEQ ID NO: 3444 - RNA, 21 nt, synthetic construct
  source 1..21: mol_type = other RNA
atgatgaagacggtgaagaaa

SEQ ID NO: 3445 - RNA, 21 nt, synthetic construct
  source 1..21: mol_type = other RNA
tcgtaagtgtaagaaagaata

SEQ ID NO: 3446 - RNA, 21 nt, synthetic construct
  source 1..21: mol_type = other RNA
atctgtgtaacagctgtggaa

SEQ ID NO: 3447 - RNA, 21 nt, synthetic construct
  source 1..21: mol_type = other RNA
atttaaaattcccactcaaca

SEQ ID NO: 3448 - RNA, 21 nt, synthetic construct
  source 1..21: mol_type = other RNA
gaccagtgtctactggctcta

SEQ ID NO: 3449 - RNA, 21 nt, synthetic construct
  source 1..21: mol_type = other RNA
cgctttcgttttttagtcata

SEQ ID NO: 3450 - RNA, 21 nt, synthetic construct
  source 1..21: mol_type = other RNA
tccgtgttgacccatgttgca

SEQ ID NO: 3451 - RNA, 21 nt, synthetic construct
  source 1..21: mol_type = other RNA
atacagaagatgaagaaatga

SEQ ID NO: 3452 - RNA, 21 nt, synthetic construct
  source 1..21: mol_type = other RNA
tctcccgagctgaaacttaaa

SEQ ID NO: 3453 - RNA, 21 nt, synthetic construct
  source 1..21: mol_type = other RNA
tgcatcaaactggcagatata

SEQ ID NO: 3454 - RNA, 21 nt, synthetic construct
  source 1..21: mol_type = other RNA
ttgcaaaatattcaggagaca

SEQ ID NO: 3455 - RNA, 21 nt, synthetic construct
  source 1..21: mol_type = other RNA
acaatcgtatacatgccacaa

SEQ ID NO: 3456 - RNA, 21 nt, synthetic construct
  source 1..21: mol_type = other RNA
aatagaaaagatgagcaacta

SEQ ID NO: 3457 - RNA, 21 nt, synthetic construct
  source 1..21: mol_type = other RNA
tatcttatgttccatggctga

SEQ ID NO: 3458 - RNA, 21 nt, synthetic construct
  source 1..21: mol_type = other RNA
ctacgtgaagagctgcgtgaa

SEQ ID NO: 3459 - RNA, 21 nt, synthetic construct
  source 1..21: mol_type = other RNA
gaattgatggctctatacgta

SEQ ID NO: 3460 - RNA, 21 nt, synthetic construct
  source 1..21: mol_type = other RNA
ttcaggtaattgaagaggcaa

SEQ ID NO: 3461 - RNA, 21 nt, synthetic construct
  source 1..21: mol_type = other RNA
aaggactgagtgacctttgta

SEQ ID NO: 3462 - RNA, 21 nt, synthetic construct
  source 1..21: mol_type = other RNA
cgagagtctgaggaacggcta

SEQ ID NO: 3463 - RNA, 21 nt, synthetic construct
  source 1..21: mol_type = other RNA
attctttgggattgggactta

SEQ ID NO: 3464 - RNA, 21 nt, synthetic construct
  source 1..21: mol_type = other RNA
taccaggtcagtggttagaaa

SEQ ID NO: 3465 - RNA, 21 nt, synthetic construct
  source 1..21: mol_type = other RNA
attcaggtttgccatggacaa

SEQ ID NO: 3466 - RNA, 21 nt, synthetic construct
  source 1..21: mol_type = other RNA
gcagctaaactggtcctggaa

SEQ ID NO: 3467 - RNA, 21 nt, synthetic construct
  source 1..21: mol_type = other RNA
agtaatggcatagaatggaga

SEQ ID NO: 3468 - RNA, 21 nt, synthetic construct
  source 1..21: mol_type = other RNA
aattgcaagaaaatggaccaa

SEQ ID NO: 3469 - RNA, 21 nt, synthetic construct
  source 1..21: mol_type = other RNA
cggcactgcgttctggtgcta

SEQ ID NO: 3470 - RNA, 21 nt, synthetic construct
  source 1..21: mol_type = other RNA
agtcatattgaagaagcccaa

SEQ ID NO: 3471 - RNA, 21 nt, synthetic construct
  source 1..21: mol_type = other RNA
tcatcatgctgcgtcagctta

SEQ ID NO: 3472 - RNA, 21 nt, synthetic construct
  source 1..21: mol_type = other RNA
aaatgatcgcctcttggtata

SEQ ID NO: 3473 - RNA, 21 nt, synthetic construct
  source 1..21: mol_type = other RNA
atttgaagatataaagagcaa

SEQ ID NO: 3474 - RNA, 21 nt, synthetic construct
  source 1..21: mol_type = other RNA
ggtctccttcaccagcctcga

SEQ ID NO: 3475 - RNA, 21 nt, synthetic construct
  source 1..21: mol_type = other RNA
gaaacagagaagaaagacaga

SEQ ID NO: 3476 - RNA, 21 nt, synthetic construct
  source 1..21: mol_type = other RNA
ttctagtggctacaaatgcca

SEQ ID NO: 3477 - RNA, 21 nt, synthetic construct
  source 1..21: mol_type = other RNA
ggagagaaatcaggaaggata

SEQ ID NO: 3478 - RNA, 21 nt, synthetic construct
  source 1..21: mol_type = other RNA
atatagtgagccctaaaggaa

SEQ ID NO: 3479 - RNA, 21 nt, synthetic construct
  source 1..21: mol_type = other RNA
gctgcctttgtcctcgcccta

SEQ ID NO: 3480 - RNA, 21 nt, synthetic construct
  source 1..21: mol_type = other RNA
ggcaaaagacctcaccaagaa

SEQ ID NO: 3481 - RNA, 21 nt, synthetic construct
  source 1..21: mol_type = other RNA
ttcagcatcgcctgtgcctta

SEQ ID NO: 3482 - RNA, 21 nt, synthetic construct
  source 1..21: mol_type = other RNA
gctaaatgaggctcgcaataa

SEQ ID NO: 3483 - RNA, 21 nt, synthetic construct
  source 1..21: mol_type = other RNA
cagcttcgtctggtgggtcta

SEQ ID NO: 3484 - RNA, 21 nt, synthetic construct
  source 1..21: mol_type = other RNA
atatggtattggcatgcagta

SEQ ID NO: 3485 - RNA, 21 nt, synthetic construct
  source 1..21: mol_type = other RNA
aaactgcaggtggagaattca

SEQ ID NO: 3486 - RNA, 21 nt, synthetic construct
  source 1..21: mol_type = other RNA
tatggctgcctgtcttcaaaa

SEQ ID NO: 3487 - RNA, 21 nt, synthetic construct
  source 1..21: mol_type = other RNA
ctgttctgaaatagaggacca

SEQ ID NO: 3488 - RNA, 21 nt, synthetic construct
  source 1..21: mol_type = other RNA
tctatttttaaagccgctgga

SEQ ID NO: 3489 - RNA, 21 nt, synthetic construct
  source 1..21: mol_type = other RNA
gctgaggagaagctcaggaaa

SEQ ID NO: 3490 - RNA, 21 nt, synthetic construct
  source 1..21: mol_type = other RNA
caagccttccaccacaagtca

SEQ ID NO: 3491 - RNA, 21 nt, synthetic construct
  source 1..21: mol_type = other RNA
ttcagttaccaaagtggccaa

SEQ ID NO: 3492 - RNA, 21 nt, synthetic construct
  source 1..21: mol_type = other RNA
cacctgcttcctcacccggaa

SEQ ID NO: 3493 - RNA, 21 nt, synthetic construct
  source 1..21: mol_type = other RNA
ttttatcacccacatagtgga

SEQ ID NO: 3494 - RNA, 21 nt, synthetic construct
  source 1..21: mol_type = other RNA
aggagaccgtcgttgccttga

SEQ ID NO: 3495 - RNA, 21 nt, synthetic construct
  source 1..21: mol_type = other RNA
atggcccagcaaaagttcgaa

SEQ ID NO: 3496 - RNA, 21 nt, synthetic construct
  source 1..21: mol_type = other RNA
agacgccaaagccatgcggta

SEQ ID NO: 3497 - RNA, 21 nt, synthetic construct
  source 1..21: mol_type = other RNA
cagctaatgcaccacctcaca

SEQ ID NO: 3498 - RNA, 21 nt, synthetic construct
  source 1..21: mol_type = other RNA
ggaaaagcagacggcgaataa

SEQ ID NO: 3499 - RNA, 21 nt, synthetic construct
  source 1..21: mol_type = other RNA
gctttgctgggtagtgagcta

SEQ ID NO: 3500 - RNA, 23 nt, synthetic construct
  source 1..23: mol_type = other RNA
ttgatcaagatgaagaaggaagt

SEQ ID NO: 3501 - RNA, 23 nt, synthetic construct
  source 1..23: mol_type = other RNA
ttgaacatcagttttagagtgaa

SEQ ID NO: 3502 - RNA, 23 nt, synthetic construct
  source 1..23: mol_type = other RNA
ttgagtcagtgatacagaagatg

SEQ ID NO: 3503 - RNA, 23 nt, synthetic construct
  source 1..23: mol_type = other RNA
ttggatcagtcagaagatctgac

SEQ ID NO: 3504 - RNA, 23 nt, synthetic construct
  source 1..23: mol_type = other RNA
tttatggagaaaaatgtgtcagt

SEQ ID NO: 3505 - RNA, 23 nt, synthetic construct
  source 1..23: mol_type = other RNA
tttatgtaaaaatgagtttccag

SEQ ID NO: 3506 - RNA, 23 nt, synthetic construct
  source 1..23: mol_type = other RNA
tagaatttctaagttgctgataa

SEQ ID NO: 3507 - RNA, 23 nt, synthetic construct
  source 1..23: mol_type = other RNA
tgtactctagagaaatataagga

SEQ ID NO: 3508 - RNA, 23 nt, synthetic construct
  source 1..23: mol_type = other RNA
tgataaaagattcttggagtttt

SEQ ID NO: 3509 - RNA, 23 nt, synthetic construct
  source 1..23: mol_type = other RNA
ttaatgcaggaatgtttgaagac

SEQ ID NO: 3510 - RNA, 23 nt, synthetic construct
  source 1..23: mol_type = other RNA
tctagttgaggagaagaacgatc

SEQ ID NO: 3511 - RNA, 23 nt, synthetic construct
  source 1..23: mol_type = other RNA
tgtgtgagaggattaatctttgg

SEQ ID NO: 3512 - RNA, 23 nt, synthetic construct
  source 1..23: mol_type = other RNA
tgtatctttgatgaggttagttt

SEQ ID NO: 3513 - RNA, 23 nt, synthetic construct
  source 1..23: mol_type = other RNA
ttttattagtaataagtggtggg

SEQ ID NO: 3514 - RNA, 23 nt, synthetic construct
  source 1..23: mol_type = other RNA
taaagaatatttctagtaccagc

SEQ ID NO: 3515 - RNA, 23 nt, synthetic construct
  source 1..23: mol_type = other RNA
ttagagtgaacaaatgacagcta

SEQ ID NO: 3516 - RNA, 23 nt, synthetic construct
  source 1..23: mol_type = other RNA
ttagttcataaattgttgagtgg

SEQ ID NO: 3517 - RNA, 23 nt, synthetic construct
  source 1..23: mol_type = other RNA
tttctattaatgagtcatactct

SEQ ID NO: 3518 - RNA, 23 nt, synthetic construct
  source 1..23: mol_type = other RNA
tcttattaagaaaatcagcagta

SEQ ID NO: 3519 - RNA, 23 nt, synthetic construct
  source 1..23: mol_type = other RNA
taagatgtggatctaaagataac

SEQ ID NO: 3520 - RNA, 23 nt, synthetic construct
  source 1..23: mol_type = other RNA
tttgtgataaggaatgtctcgat

SEQ ID NO: 3521 - RNA, 23 nt, synthetic construct
  source 1..23: mol_type = other RNA
tgaaattaatctgattcagtaac

SEQ ID NO: 3522 - RNA, 23 nt, synthetic construct
  source 1..23: mol_type = other RNA
tcagtgaaggatttaagtaaggg

SEQ ID NO: 3523 - RNA, 23 nt, synthetic construct
  source 1..23: mol_type = other RNA
tagtttgaatgattctttcgaga

SEQ ID NO: 3524 - RNA, 23 nt, synthetic construct
  source 1..23: mol_type = other RNA
ttaagtagtgataggtcatttct

SEQ ID NO: 3525 - RNA, 23 nt, synthetic construct
  source 1..23: mol_type = other RNA
tcgtagagaggaaatgacttgtg

SEQ ID NO: 3526 - RNA, 23 nt, synthetic construct
  source 1..23: mol_type = other RNA
tagataagtaagaaactgcatgc

SEQ ID NO: 3527 - RNA, 23 nt, synthetic construct
  source 1..23: mol_type = other RNA
ttgaacagtgtattgcattgagc

SEQ ID NO: 3528 - RNA, 23 nt, synthetic construct
  source 1..23: mol_type = other RNA
ttgtgtcagtaggtacatagata

SEQ ID NO: 3529 - RNA, 23 nt, synthetic construct
  source 1..23: mol_type = other RNA
ttaagataagactggaattcaaa

SEQ ID NO: 3530 - RNA, 23 nt, synthetic construct
  source 1..23: mol_type = other RNA
ttagttttggtattacagcaaat

SEQ ID NO: 3531 - RNA, 23 nt, synthetic construct
  source 1..23: mol_type = other RNA
ttgatttgaaagaagtgatccaa

SEQ ID NO: 3532 - RNA, 23 nt, synthetic construct
  source 1..23: mol_type = other RNA
ttaagaatagttttctagttcct

SEQ ID NO: 3533 - RNA, 23 nt, synthetic construct
  source 1..23: mol_type = other RNA
taacagacagtatggaaatgtga

SEQ ID NO: 3534 - RNA, 23 nt, synthetic construct
  source 1..23: mol_type = other RNA
tattgacactgtgaaggatcaaa

SEQ ID NO: 3535 - RNA, 23 nt, synthetic construct
  source 1..23: mol_type = other RNA
ttttacttgttctcagaaatcag

SEQ ID NO: 3536 - RNA, 23 nt, synthetic construct
  source 1..23: mol_type = other RNA
taaatgtatttcacaagtagggt

SEQ ID NO: 3537 - RNA, 23 nt, synthetic construct
  source 1..23: mol_type = other RNA
taaattggaaaattccagttgct

SEQ ID NO: 3538 - RNA, 23 nt, synthetic construct
  source 1..23: mol_type = other RNA
ttaactctcatcaggattagagc

SEQ ID NO: 3539 - RNA, 23 nt, synthetic construct
  source 1..23: mol_type = other RNA
tagaattttgataatgaggctta

SEQ ID NO: 3540 - RNA, 23 nt, synthetic construct
  source 1..23: mol_type = other RNA
tagtaaaaagcatcagaaattga

SEQ ID NO: 3541 - RNA, 23 nt, synthetic construct
  source 1..23: mol_type = other RNA
ttaagatttcatctaatggtaca

SEQ ID NO: 3542 - RNA, 23 nt, synthetic construct
  source 1..23: mol_type = other RNA
tatggttggaagaattcacagga

SEQ ID NO: 3543 - RNA, 23 nt, synthetic construct
  source 1..23: mol_type = other RNA
tataaaaatctggagtattaggt

SEQ ID NO: 3544 - RNA, 23 nt, synthetic construct
  source 1..23: mol_type = other RNA
ttttattcaatgtatgtgtcctt

SEQ ID NO: 3545 - RNA, 23 nt, synthetic construct
  source 1..23: mol_type = other RNA
tcaaagcagcattatgacaaagt

SEQ ID NO: 3546 - RNA, 23 nt, synthetic construct
  source 1..23: mol_type = other RNA
tgaaattaacagaaagatgaaca

SEQ ID NO: 3547 - RNA, 23 nt, synthetic construct
  source 1..23: mol_type = other RNA
tgaaaattaatggtttcactgtg

SEQ ID NO: 3548 - RNA, 23 nt, synthetic construct
  source 1..23: mol_type = other RNA
tagaaatcagtcttgcagttagg

SEQ ID NO: 3549 - RNA, 23 nt, synthetic construct
  source 1..23: mol_type = other RNA
tttgaggtaaggaggaattctcc

SEQ ID NO: 3550 - RNA, 23 nt, synthetic construct
  source 1..23: mol_type = other RNA
tacaaagtaagatctgtaatatg

SEQ ID NO: 3551 - RNA, 23 nt, synthetic construct
  source 1..23: mol_type = other RNA
taattgatatctttcagataagc

SEQ ID NO: 3552 - RNA, 23 nt, synthetic construct
  source 1..23: mol_type = other RNA
ttgattttccagaacagatctgt

SEQ ID NO: 3553 - RNA, 23 nt, synthetic construct
  source 1..23: mol_type = other RNA
tgaaggaagttgtattctgggcg

SEQ ID NO: 3554 - RNA, 23 nt, synthetic construct
  source 1..23: mol_type = other RNA
ttttagcactgaaagatcaactc

SEQ ID NO: 3555 - RNA, 23 nt, synthetic construct
  source 1..23: mol_type = other RNA
tgtctaataaataaagcttagtg

SEQ ID NO: 3556 - RNA, 23 nt, synthetic construct
  source 1..23: mol_type = other RNA
taaagatatagattccaagctga

SEQ ID NO: 3557 - RNA, 23 nt, synthetic construct
  source 1..23: mol_type = other RNA
tttaggcttcagaaataataagt

SEQ ID NO: 3558 - RNA, 23 nt, synthetic construct
  source 1..23: mol_type = other RNA
ttttgttaaatacaacaaaggtc

SEQ ID NO: 3559 - RNA, 23 nt, synthetic construct
  source 1..23: mol_type = other RNA
ttgatcgattagttagagagcca

SEQ ID NO: 3560 - RNA, 23 nt, synthetic construct
  source 1..23: mol_type = other RNA
tatttctgtcatgtagtctttag

SEQ ID NO: 3561 - RNA, 23 nt, synthetic construct
  source 1..23: mol_type = other RNA
tctttaaaaatacgaatcctgag

SEQ ID NO: 3562 - RNA, 23 nt, synthetic construct
  source 1..23: mol_type = other RNA
tatgtcaattacttagcaagggt

SEQ ID NO: 3563 - RNA, 23 nt, synthetic construct
  source 1..23: mol_type = other RNA
tttcctgtgaaagtgcataggag

SEQ ID NO: 3564 - RNA, 23 nt, synthetic construct
  source 1..23: mol_type = other RNA
tgttgaaacatatttcagcattt

SEQ ID NO: 3565 - RNA, 23 nt, synthetic construct
  source 1..23: mol_type = other RNA
tagtagatttgaattaaaaggcc

SEQ ID NO: 3566 - RNA, 23 nt, synthetic construct
  source 1..23: mol_type = other RNA
tttaaatccaataagtccagtat

SEQ ID NO: 3567 - RNA, 23 nt, synthetic construct
  source 1..23: mol_type = other RNA
ttgtaccatctgattcagatgtt

SEQ ID NO: 3568 - RNA, 23 nt, synthetic construct
  source 1..23: mol_type = other RNA
tcacagattgctatcagaatttc

SEQ ID NO: 3569 - RNA, 23 nt, synthetic construct
  source 1..23: mol_type = other RNA
tagatagcatccttgacttgaaa

SEQ ID NO: 3570 - RNA, 23 nt, synthetic construct
  source 1..23: mol_type = other RNA
ttatcttgtggttttcagtgagg

SEQ ID NO: 3571 - RNA, 23 nt, synthetic construct
  source 1..23: mol_type = other RNA
tttgaagactgttcaacaggtag

SEQ ID NO: 3572 - RNA, 23 nt, synthetic construct
  source 1..23: mol_type = other RNA
taactgaaatatgtcacttgagt

SEQ ID NO: 3573 - RNA, 23 nt, synthetic construct
  source 1..23: mol_type = other RNA
tagcaatcctgaagttcctgagc

SEQ ID NO: 3574 - RNA, 23 nt, synthetic construct
  source 1..23: mol_type = other RNA
tttaagctactaatactccgtag

SEQ ID NO: 3575 - RNA, 23 nt, synthetic construct
  source 1..23: mol_type = other RNA
ttcataaaattcattgacaatgc

SEQ ID NO: 3576 - RNA, 23 nt, synthetic construct
  source 1..23: mol_type = other RNA
ttcaatatttgtttgctgttcac

SEQ ID NO: 3577 - RNA, 23 nt, synthetic construct
  source 1..23: mol_type = other RNA
ttaatgcacgaaaatagttcata

SEQ ID NO: 3578 - RNA, 23 nt, synthetic construct
  source 1..23: mol_type = other RNA
ttgaaaaataagtattccagttc

SEQ ID NO: 3579 - RNA, 23 nt, synthetic construct
  source 1..23: mol_type = other RNA
tcagagatctctgcaagataacg

SEQ ID NO: 3580 - RNA, 23 nt, synthetic construct
  source 1..23: mol_type = other RNA
tatcaaaaattctaacacttcca

SEQ ID NO: 3581 - RNA, 23 nt, synthetic construct
  source 1..23: mol_type = other RNA
tttccagagatcttaaattgata

SEQ ID NO: 3582 - RNA, 23 nt, synthetic construct
  source 1..23: mol_type = other RNA
taacattgtaaatatggtccatt

SEQ ID NO: 3583 - RNA, 23 nt, synthetic construct
  source 1..23: mol_type = other RNA
taaggattgcttcaatgactaaa

SEQ ID NO: 3584 - RNA, 23 nt, synthetic construct
  source 1..23: mol_type = other RNA
tattgttaaacctaaacagcttt

SEQ ID NO: 3585 - RNA, 23 nt, synthetic construct
  source 1..23: mol_type = other RNA
ttatttacatcatttgccttggc

SEQ ID NO: 3586 - RNA, 23 nt, synthetic construct
  source 1..23: mol_type = other RNA
tgtttccagtagtaattggattt

SEQ ID NO: 3587 - RNA, 23 nt, synthetic construct
  source 1..23: mol_type = other RNA
taggatatatatattgtaagtgc

SEQ ID NO: 3588 - RNA, 23 nt, synthetic construct
  source 1..23: mol_type = other RNA
ttgtcagataccaaactgcatgt

SEQ ID NO: 3589 - RNA, 23 nt, synthetic construct
  source 1..23: mol_type = other RNA
taccagtgtcttgaaataaggta

SEQ ID NO: 3590 - RNA, 23 nt, synthetic construct
  source 1..23: mol_type = other RNA
tactaaagaataaatcccttcat

SEQ ID NO: 3591 - RNA, 23 nt, synthetic construct
  source 1..23: mol_type = other RNA
tttaagatccgtagcaaggattg

SEQ ID NO: 3592 - RNA, 23 nt, synthetic construct
  source 1..23: mol_type = other RNA
ttttgcttcgggatagtcagtag

SEQ ID NO: 3593 - RNA, 23 nt, synthetic construct
  source 1..23: mol_type = other RNA
tgaaataatagcagaaatacact

SEQ ID NO: 3594 - RNA, 23 nt, synthetic construct
  source 1..23: mol_type = other RNA
tttaggctagttattgttacata

SEQ ID NO: 3595 - RNA, 23 nt, synthetic construct
  source 1..23: mol_type = other RNA
ttgagctagagtaaaaacaacaa

SEQ ID NO: 3596 - RNA, 23 nt, synthetic construct
  source 1..23: mol_type = other RNA
ttcattgtataaaactgcctgag

SEQ ID NO: 3597 - RNA, 23 nt, synthetic construct
  source 1..23: mol_type = other RNA
tataacctgactgagaatccttc

SEQ ID NO: 3598 - RNA, 23 nt, synthetic construct
  source 1..23: mol_type = other RNA
tacttaaacatgatggaaaatgt

SEQ ID NO: 3599 - RNA, 23 nt, synthetic construct
  source 1..23: mol_type = other RNA
tcaatggtaacaaaagtggcagc

SEQ ID NO: 3600 - RNA, 23 nt, synthetic construct
  source 1..23: mol_type = other RNA
tatatccacacactagcaagttt

SEQ ID NO: 3601 - RNA, 23 nt, synthetic construct
  source 1..23: mol_type = other RNA
tgcaatttctcaagtaagatttc

SEQ ID NO: 3602 - RNA, 23 nt, synthetic construct
  source 1..23: mol_type = other RNA
ttcaaatgcaagtctcgaacttt

SEQ ID NO: 3603 - RNA, 23 nt, synthetic construct
  source 1..23: mol_type = other RNA
tagtatcaggaaattctatgggt

SEQ ID NO: 3604 - RNA, 23 nt, synthetic construct
  source 1..23: mol_type = other RNA
tatattctaaaggaattaccttg

SEQ ID NO: 3605 - RNA, 23 nt, synthetic construct
  source 1..23: mol_type = other RNA
ttcttgttgagtttccataagtt

SEQ ID NO: 3606 - RNA, 23 nt, synthetic construct
  source 1..23: mol_type = other RNA
tcgtaatttaaaatgctgctttt

SEQ ID NO: 3607 - RNA, 23 nt, synthetic construct
  source 1..23: mol_type = other RNA
tgaatggtcagttgagagtcagc

SEQ ID NO: 3608 - RNA, 23 nt, synthetic construct
  source 1..23: mol_type = other RNA
tagtccttcatggataaacctag

SEQ ID NO: 3609 - RNA, 23 nt, synthetic construct
  source 1..23: mol_type = other RNA
ttgaaatgccaaattcttggtga

SEQ ID NO: 3610 - RNA, 23 nt, synthetic construct
  source 1..23: mol_type = other RNA
ttaagccaaatattctagataag

SEQ ID NO: 3611 - RNA, 23 nt, synthetic construct
  source 1..23: mol_type = other RNA
tttgtatgtattctgcaggagag

SEQ ID NO: 3612 - RNA, 23 nt, synthetic construct
  source 1..23: mol_type = other RNA
taaatccaggaaatggtgtgaga

SEQ ID NO: 3613 - RNA, 23 nt, synthetic construct
  source 1..23: mol_type = other RNA
taaagcgcttgaattccacatga

SEQ ID NO: 3614 - RNA, 23 nt, synthetic construct
  source 1..23: mol_type = other RNA
tcatagtagataatacacaatag

SEQ ID NO: 3615 - RNA, 23 nt, synthetic construct
  source 1..23: mol_type = other RNA
tatcattttcattactccattct

SEQ ID NO: 3616 - RNA, 23 nt, synthetic construct
  source 1..23: mol_type = other RNA
taatatttccaataaaccagtgt

SEQ ID NO: 3617 - RNA, 23 nt, synthetic construct
  source 1..23: mol_type = other RNA
tactttatacacatacacttgta

SEQ ID NO: 3618 - RNA, 23 nt, synthetic construct
  source 1..23: mol_type = other RNA
ttctcaatatgcatgcttgtaca

SEQ ID NO: 3619 - RNA, 23 nt, synthetic construct
  source 1..23: mol_type = other RNA
ttcaaagacataaaagacacact

SEQ ID NO: 3620 - RNA, 23 nt, synthetic construct
  source 1..23: mol_type = other RNA
tattgaattctgcgagaaaatca

SEQ ID NO: 3621 - RNA, 23 nt, synthetic construct
  source 1..23: mol_type = other RNA
tttttactcaaactgtcgctatt

SEQ ID NO: 3622 - RNA, 23 nt, synthetic construct
  source 1..23: mol_type = other RNA
tacaaagtattcatacaccagtg

SEQ ID NO: 3623 - RNA, 23 nt, synthetic construct
  source 1..23: mol_type = other RNA
tttctgttagccacttatcacct

SEQ ID NO: 3624 - RNA, 23 nt, synthetic construct
  source 1..23: mol_type = other RNA
taatagaaaatattagcctacca

SEQ ID NO: 3625 - RNA, 23 nt, synthetic construct
  source 1..23: mol_type = other RNA
tgacagtcgaggatgaagaggcg

SEQ ID NO: 3626 - RNA, 23 nt, synthetic construct
  source 1..23: mol_type = other RNA
ttaatatggcttatggcaatttc

SEQ ID NO: 3627 - RNA, 23 nt, synthetic construct
  source 1..23: mol_type = other RNA
tttagctgacaaaatattcgccg

SEQ ID NO: 3628 - RNA, 23 nt, synthetic construct
  source 1..23: mol_type = other RNA
ttcagaaaggcaacactggattc

SEQ ID NO: 3629 - RNA, 23 nt, synthetic construct
  source 1..23: mol_type = other RNA
ttttagacaggcatagacttttc

SEQ ID NO: 3630 - RNA, 23 nt, synthetic construct
  source 1..23: mol_type = other RNA
taattcaaacttctgatgtccat

SEQ ID NO: 3631 - RNA, 23 nt, synthetic construct
  source 1..23: mol_type = other RNA
tagaaatataagcaattcgccca

SEQ ID NO: 3632 - RNA, 23 nt, synthetic construct
  source 1..23: mol_type = other RNA
tactggtttacacatagtgtgtg

SEQ ID NO: 3633 - RNA, 23 nt, synthetic construct
  source 1..23: mol_type = other RNA
taatgttttcttcttcacctgat

SEQ ID NO: 3634 - RNA, 23 nt, synthetic construct
  source 1..23: mol_type = other RNA
tagtgaaaaataagagctcacta

SEQ ID NO: 3635 - RNA, 23 nt, synthetic construct
  source 1..23: mol_type = other RNA
tagtttattcccatcagctttac

SEQ ID NO: 3636 - RNA, 23 nt, synthetic construct
  source 1..23: mol_type = other RNA
tgcagtttctcctaacgacacgc

SEQ ID NO: 3637 - RNA, 23 nt, synthetic construct
  source 1..23: mol_type = other RNA
tataccattgttttaagtcccaa

SEQ ID NO: 3638 - RNA, 23 nt, synthetic construct
  source 1..23: mol_type = other RNA
tatggttaattctaccatcagaa

SEQ ID NO: 3639 - RNA, 23 nt, synthetic construct
  source 1..23: mol_type = other RNA
tagaaataaaacacacatagtag

SEQ ID NO: 3640 - RNA, 23 nt, synthetic construct
  source 1..23: mol_type = other RNA
tgtgcaaatataaattatcagtc

SEQ ID NO: 3641 - RNA, 23 nt, synthetic construct
  source 1..23: mol_type = other RNA
tgggttaaataatttaaggacta

SEQ ID NO: 3642 - RNA, 23 nt, synthetic construct
  source 1..23: mol_type = other RNA
tagatctgacaccatattgcgag

SEQ ID NO: 3643 - RNA, 23 nt, synthetic construct
  source 1..23: mol_type = other RNA
tgattagagcagctcttcgaaga

SEQ ID NO: 3644 - RNA, 23 nt, synthetic construct
  source 1..23: mol_type = other RNA
tctgaatactctcagcagaaata

SEQ ID NO: 3645 - RNA, 23 nt, synthetic construct
  source 1..23: mol_type = other RNA
tcagtgatacttcctgttcaata

SEQ ID NO: 3646 - RNA, 23 nt, synthetic construct
  source 1..23: mol_type = other RNA
tttctctggaaatacaaggcaac

SEQ ID NO: 3647 - RNA, 23 nt, synthetic construct
  source 1..23: mol_type = other RNA
ttttgcaactgccatagtaactg

SEQ ID NO: 3648 - RNA, 23 nt, synthetic construct
  source 1..23: mol_type = other RNA
tcagctttaaaattcagccatgg

SEQ ID NO: 3649 - RNA, 23 nt, synthetic construct
  source 1..23: mol_type = other RNA
tagaacgatccatgaatggactg

SEQ ID NO: 3650 - RNA, 23 nt, synthetic construct
  source 1..23: mol_type = other RNA
tagcatcataggagttacacagg

SEQ ID NO: 3651 - RNA, 23 nt, synthetic construct
  source 1..23: mol_type = other RNA
tataggagtgggaaactgccagc

SEQ ID NO: 3652 - RNA, 23 nt, synthetic construct
  source 1..23: mol_type = other RNA
ttgaatctcatctgcttgaggta

SEQ ID NO: 3653 - RNA, 23 nt, synthetic construct
  source 1..23: mol_type = other RNA
ttgcttttgagaaaacaacataa

SEQ ID NO: 3654 - RNA, 23 nt, synthetic construct
  source 1..23: mol_type = other RNA
tgcattgagcagaaatccctcag

SEQ ID NO: 3655 - RNA, 23 nt, synthetic construct
  source 1..23: mol_type = other RNA
tcaggtgaggaagaagaaggcac

SEQ ID NO: 3656 - RNA, 23 nt, synthetic construct
  source 1..23: mol_type = other RNA
tgaaatgtgattcaatctcaata

SEQ ID NO: 3657 - RNA, 23 nt, synthetic construct
  source 1..23: mol_type = other RNA
tgggagaatagcactgaacagtg

SEQ ID NO: 3658 - RNA, 23 nt, synthetic construct
  source 1..23: mol_type = other RNA
ttggatctgctgtaagccaggaa

SEQ ID NO: 3659 - RNA, 23 nt, synthetic construct
  source 1..23: mol_type = other RNA
ttgaaataattttctgctgtctt

SEQ ID NO: 3660 - RNA, 23 nt, synthetic construct
  source 1..23: mol_type = other RNA
tcataaactaaagaaacccaata

SEQ ID NO: 3661 - RNA, 23 nt, synthetic construct
  source 1..23: mol_type = other RNA
tcttctgagacctacatggtgag

SEQ ID NO: 3662 - RNA, 23 nt, synthetic construct
  source 1..23: mol_type = other RNA
tttcatttcctgttccacaacca

SEQ ID NO: 3663 - RNA, 23 nt, synthetic construct
  source 1..23: mol_type = other RNA
tcaaaatatgatatgttctccaa

SEQ ID NO: 3664 - RNA, 23 nt, synthetic construct
  source 1..23: mol_type = other RNA
tttttgccatcattttggctgct

SEQ ID NO: 3665 - RNA, 23 nt, synthetic construct
  source 1..23: mol_type = other RNA
ttctacaagttcaaaaattggaa

SEQ ID NO: 3666 - RNA, 23 nt, synthetic construct
  source 1..23: mol_type = other RNA
tagttggcaaactattcctattt

SEQ ID NO: 3667 - RNA, 23 nt, synthetic construct
  source 1..23: mol_type = other RNA
tttttctccaaaacattcaaaga

SEQ ID NO: 3668 - RNA, 23 nt, synthetic construct
  source 1..23: mol_type = other RNA
tgtgattcattaaatattgacac

SEQ ID NO: 3669 - RNA, 23 nt, synthetic construct
  source 1..23: mol_type = other RNA
tgtgcatttaatatattctcaca

SEQ ID NO: 3670 - RNA, 23 nt, synthetic construct
  source 1..23: mol_type = other RNA
ttcctatttagtcccttgttaag

SEQ ID NO: 3671 - RNA, 23 nt, synthetic construct
  source 1..23: mol_type = other RNA
tcagaggtggaagaagaagccgc

SEQ ID NO: 3672 - RNA, 23 nt, synthetic construct
  source 1..23: mol_type = other RNA
taagataaccacatgttccaatt

SEQ ID NO: 3673 - RNA, 23 nt, synthetic construct
  source 1..23: mol_type = other RNA
taaagaatcatctgttctctgga

SEQ ID NO: 3674 - RNA, 23 nt, synthetic construct
  source 1..23: mol_type = other RNA
taaaacccaataaaataacagac

SEQ ID NO: 3675 - RNA, 23 nt, synthetic construct
  source 1..23: mol_type = other RNA
taccaagatttgcttcttcatct

SEQ ID NO: 3676 - RNA, 23 nt, synthetic construct
  source 1..23: mol_type = other RNA
tcaaaattgcatgattccaaaat

SEQ ID NO: 3677 - RNA, 23 nt, synthetic construct
  source 1..23: mol_type = other RNA
tagcaagtttacaaaacattgta

SEQ ID NO: 3678 - RNA, 23 nt, synthetic construct
  source 1..23: mol_type = other RNA
tttttgccattattacgatccca

SEQ ID NO: 3679 - RNA, 23 nt, synthetic construct
  source 1..23: mol_type = other RNA
tacaggaacctgagaaagcaccc

SEQ ID NO: 3680 - RNA, 23 nt, synthetic construct
  source 1..23: mol_type = other RNA
tatcaccactttcagtatcatta

SEQ ID NO: 3681 - RNA, 23 nt, synthetic construct
  source 1..23: mol_type = other RNA
tactaaaatcaggtccagtgata

SEQ ID NO: 3682 - RNA, 23 nt, synthetic construct
  source 1..23: mol_type = other RNA
tttcataaaagcaaaaagttcct

SEQ ID NO: 3683 - RNA, 23 nt, synthetic construct
  source 1..23: mol_type = other RNA
taacaaatctgtgctgtgttcat

SEQ ID NO: 3684 - RNA, 23 nt, synthetic construct
  source 1..23: mol_type = other RNA
ttctacgatttccttccatatct

SEQ ID NO: 3685 - RNA, 23 nt, synthetic construct
  source 1..23: mol_type = other RNA
taaaaggcccatttagatagcat

SEQ ID NO: 3686 - RNA, 23 nt, synthetic construct
  source 1..23: mol_type = other RNA
ttttccttcttggtggttttgga

SEQ ID NO: 3687 - RNA, 23 nt, synthetic construct
  source 1..23: mol_type = other RNA
ttgcatgtagcacatctgtggca

SEQ ID NO: 3688 - RNA, 23 nt, synthetic construct
  source 1..23: mol_type = other RNA
tgcttgtacatgtatgactttat

SEQ ID NO: 3689 - RNA, 23 nt, synthetic construct
  source 1..23: mol_type = other RNA
tattatcctcttctgcttctaac

SEQ ID NO: 3690 - RNA, 23 nt, synthetic construct
  source 1..23: mol_type = other RNA
ttcaagctgtgcgaacacacgct

SEQ ID NO: 3691 - RNA, 23 nt, synthetic construct
  source 1..23: mol_type = other RNA
tagactggacaaaacaccagctc

SEQ ID NO: 3692 - RNA, 23 nt, synthetic construct
  source 1..23: mol_type = other RNA
tggatttagattgttttccattt

SEQ ID NO: 3693 - RNA, 23 nt, synthetic construct
  source 1..23: mol_type = other RNA
ttcgatagccattttctaatgca

SEQ ID NO: 3694 - RNA, 23 nt, synthetic construct
  source 1..23: mol_type = other RNA
ttgacaatgccttctgtccattt

SEQ ID NO: 3695 - RNA, 23 nt, synthetic construct
  source 1..23: mol_type = other RNA
tttttccactgcagcaatctgta

SEQ ID NO: 3696 - RNA, 23 nt, synthetic construct
  source 1..23: mol_type = other RNA
tgatcaactccatttccacctcc

SEQ ID NO: 3697 - RNA, 23 nt, synthetic construct
  source 1..23: mol_type = other RNA
tgtattaggtgcattgcccagag

SEQ ID NO: 3698 - RNA, 23 nt, synthetic construct
  source 1..23: mol_type = other RNA
tgtctttaggcagagggaaatta

SEQ ID NO: 3699 - RNA, 23 nt, synthetic construct
  source 1..23: mol_type = other RNA
tagctccacgttgcagaagcggc

SEQ ID NO: 3700 - RNA, 23 nt, synthetic construct
  source 1..23: mol_type = other RNA
tgggaaatacaatatgaatctat

SEQ ID NO: 3701 - RNA, 23 nt, synthetic construct
  source 1..23: mol_type = other RNA
tactagaaatgcatttgtcctcc

SEQ ID NO: 3702 - RNA, 23 nt, synthetic construct
  source 1..23: mol_type = other RNA
tcactcactcaacacgtctaata

SEQ ID NO: 3703 - RNA, 23 nt, synthetic construct
  source 1..23: mol_type = other RNA
ttcagcatttgatgtccacagct

SEQ ID NO: 3704 - RNA, 23 nt, synthetic construct
  source 1..23: mol_type = other RNA
tctctcacagtattaaggcctgt

SEQ ID NO: 3705 - RNA, 23 nt, synthetic construct
  source 1..23: mol_type = other RNA
taacactaggcaatgatttctgc

SEQ ID NO: 3706 - RNA, 23 nt, synthetic construct
  source 1..23: mol_type = other RNA
tagcaaggaactcagcactcact

SEQ ID NO: 3707 - RNA, 23 nt, synthetic construct
  source 1..23: mol_type = other RNA
ttgatcataatcatgcatggcag

SEQ ID NO: 3708 - RNA, 23 nt, synthetic construct
  source 1..23: mol_type = other RNA
tctggtagcaaaccagcagcatc

SEQ ID NO: 3709 - RNA, 23 nt, synthetic construct
  source 1..23: mol_type = other RNA
ttcgctattcctcttcatctgcc

SEQ ID NO: 3710 - RNA, 23 nt, synthetic construct
  source 1..23: mol_type = other RNA
tagaaattgatgcacctggattt

SEQ ID NO: 3711 - RNA, 23 nt, synthetic construct
  source 1..23: mol_type = other RNA
taagataacgcttggcttattaa

SEQ ID NO: 3712 - RNA, 23 nt, synthetic construct
  source 1..23: mol_type = other RNA
tagcagagcaaggatcctctcac

SEQ ID NO: 3713 - RNA, 23 nt, synthetic construct
  source 1..23: mol_type = other RNA
tttcttcaccgtcttcatcatca

SEQ ID NO: 3714 - RNA, 23 nt, synthetic construct
  source 1..23: mol_type = other RNA
tattctttcttacacttacgaat

SEQ ID NO: 3715 - RNA, 23 nt, synthetic construct
  source 1..23: mol_type = other RNA
ttccacagctgttacacagattg

SEQ ID NO: 3716 - RNA, 23 nt, synthetic construct
  source 1..23: mol_type = other RNA
tgttgagtgggaattttaaatat

SEQ ID NO: 3717 - RNA, 23 nt, synthetic construct
  source 1..23: mol_type = other RNA
tagagccagtagacactggtcca

SEQ ID NO: 3718 - RNA, 23 nt, synthetic construct
  source 1..23: mol_type = other RNA
tatgactaaaaaacgaaagcgct

SEQ ID NO: 3719 - RNA, 23 nt, synthetic construct
  source 1..23: mol_type = other RNA
tgcaacatgggtcaacacggatg

SEQ ID NO: 3720 - RNA, 23 nt, synthetic construct
  source 1..23: mol_type = other RNA
tcatttcttcatcttctgtatct

SEQ ID NO: 3721 - RNA, 23 nt, synthetic construct
  source 1..23: mol_type = other RNA
tttaagtttcagctcgggagaga

SEQ ID NO: 3722 - RNA, 23 nt, synthetic construct
  source 1..23: mol_type = other RNA
tatatctgccagtttgatgcaca

SEQ ID NO: 3723 - RNA, 23 nt, synthetic construct
  source 1..23: mol_type = other RNA
tgtctcctgaatattttgcaact

SEQ ID NO: 3724 - RNA, 23 nt, synthetic construct
  source 1..23: mol_type = other RNA
ttgtggcatgtatacgattgtga

SEQ ID NO: 3725 - RNA, 23 nt, synthetic construct
  source 1..23: mol_type = other RNA
tagttgctcatcttttctattaa

SEQ ID NO: 3726 - RNA, 23 nt, synthetic construct
  source 1..23: mol_type = other RNA
tcagccatggaacataagataag

SEQ ID NO: 3727 - RNA, 23 nt, synthetic construct
  source 1..23: mol_type = other RNA
ttcacgcagctcttcacgtagcc

SEQ ID NO: 3728 - RNA, 23 nt, synthetic construct
  source 1..23: mol_type = other RNA
tacgtatagagccatcaattcta

SEQ ID NO: 3729 - RNA, 23 nt, synthetic construct
  source 1..23: mol_type = other RNA
ttgcctcttcaattacctgaatc

SEQ ID NO: 3730 - RNA, 23 nt, synthetic construct
  source 1..23: mol_type = other RNA
tacaaaggtcactcagtccttca

SEQ ID NO: 3731 - RNA, 23 nt, synthetic construct
  source 1..23: mol_type = other RNA
tagccgttcctcagactctcggg

SEQ ID NO: 3732 - RNA, 23 nt, synthetic construct
  source 1..23: mol_type = other RNA
taagtcccaatcccaaagaatca

SEQ ID NO: 3733 - RNA, 23 nt, synthetic construct
  source 1..23: mol_type = other RNA
tttctaaccactgacctggtagc

SEQ ID NO: 3734 - RNA, 23 nt, synthetic construct
  source 1..23: mol_type = other RNA
ttgtccatggcaaacctgaatac

SEQ ID NO: 3735 - RNA, 23 nt, synthetic construct
  source 1..23: mol_type = other RNA
ttccaggaccagtttagctgccg

SEQ ID NO: 3736 - RNA, 23 nt, synthetic construct
  source 1..23: mol_type = other RNA
tctccattctatgccattactat

SEQ ID NO: 3737 - RNA, 23 nt, synthetic construct
  source 1..23: mol_type = other RNA
ttggtccattttcttgcaattat

SEQ ID NO: 3738 - RNA, 23 nt, synthetic construct
  source 1..23: mol_type = other RNA
tagcaccagaacgcagtgccgga

SEQ ID NO: 3739 - RNA, 23 nt, synthetic construct
  source 1..23: mol_type = other RNA
ttgggcttcttcaatatgacttt

SEQ ID NO: 3740 - RNA, 23 nt, synthetic construct
  source 1..23: mol_type = other RNA
taagctgacgcagcatgatgatt

SEQ ID NO: 3741 - RNA, 23 nt, synthetic construct
  source 1..23: mol_type = other RNA
tataccaagaggcgatcattttc

SEQ ID NO: 3742 - RNA, 23 nt, synthetic construct
  source 1..23: mol_type = other RNA
ttgctctttatatcttcaaatgt

SEQ ID NO: 3743 - RNA, 23 nt, synthetic construct
  source 1..23: mol_type = other RNA
tcgaggctggtgaaggagaccca

SEQ ID NO: 3744 - RNA, 23 nt, synthetic construct
  source 1..23: mol_type = other RNA
tctgtctttcttctctgtttcct

SEQ ID NO: 3745 - RNA, 23 nt, synthetic construct
  source 1..23: mol_type = other RNA
tggcatttgtagccactagaaat

SEQ ID NO: 3746 - RNA, 23 nt, synthetic construct
  source 1..23: mol_type = other RNA
tatccttcctgatttctctccca

SEQ ID NO: 3747 - RNA, 23 nt, synthetic construct
  source 1..23: mol_type = other RNA
ttcctttagggctcactatattt

SEQ ID NO: 3748 - RNA, 23 nt, synthetic construct
  source 1..23: mol_type = other RNA
tagggcgaggacaaaggcagcca

SEQ ID NO: 3749 - RNA, 23 nt, synthetic construct
  source 1..23: mol_type = other RNA
ttcttggtgaggtcttttgccat

SEQ ID NO: 3750 - RNA, 23 nt, synthetic construct
  source 1..23: mol_type = other RNA
taaggcacaggcgatgctgaaga

SEQ ID NO: 3751 - RNA, 23 nt, synthetic construct
  source 1..23: mol_type = other RNA
ttattgcgagcctcatttagcac

SEQ ID NO: 3752 - RNA, 23 nt, synthetic construct
  source 1..23: mol_type = other RNA
tagacccaccagacgaagctggc

SEQ ID NO: 3753 - RNA, 23 nt, synthetic construct
  source 1..23: mol_type = other RNA
tactgcatgccaataccatattc

SEQ ID NO: 3754 - RNA, 23 nt, synthetic construct
  source 1..23: mol_type = other RNA
tgaattctccacctgcagtttat

SEQ ID NO: 3755 - RNA, 23 nt, synthetic construct
  source 1..23: mol_type = other RNA
ttttgaagacaggcagccataac

SEQ ID NO: 3756 - RNA, 23 nt, synthetic construct
  source 1..23: mol_type = other RNA
tggtcctctatttcagaacaggg

SEQ ID NO: 3757 - RNA, 23 nt, synthetic construct
  source 1..23: mol_type = other RNA
tccagcggctttaaaaatagaaa

SEQ ID NO: 3758 - RNA, 23 nt, synthetic construct
  source 1..23: mol_type = other RNA
tttcctgagcttctcctcagctg

SEQ ID NO: 3759 - RNA, 23 nt, synthetic construct
  source 1..23: mol_type = other RNA
tgacttgtggtggaaggcttgga

SEQ ID NO: 3760 - RNA, 23 nt, synthetic construct
  source 1..23: mol_type = other RNA
ttggccactttggtaactgaaat

SEQ ID NO: 3761 - RNA, 23 nt, synthetic construct
  source 1..23: mol_type = other RNA
ttccgggtgaggaagcaggtgag

SEQ ID NO: 3762 - RNA, 23 nt, synthetic construct
  source 1..23: mol_type = other RNA
tccactatgtgggtgataaaaga

SEQ ID NO: 3763 - RNA, 23 nt, synthetic construct
  source 1..23: mol_type = other RNA
tcaaggcaacgacggtctcctga

SEQ ID NO: 3764 - RNA, 23 nt, synthetic construct
  source 1..23: mol_type = other RNA
ttcgaacttttgctgggccattt

SEQ ID NO: 3765 - RNA, 23 nt, synthetic construct
  source 1..23: mol_type = other RNA
taccgcatggctttggcgtctcg

SEQ ID NO: 3766 - RNA, 23 nt, synthetic construct
  source 1..23: mol_type = other RNA
tgtgaggtggtgcattagctgac

SEQ ID NO: 3767 - RNA, 23 nt, synthetic construct
  source 1..23: mol_type = other RNA
ttattcgccgtctgcttttcctt

SEQ ID NO: 3768 - RNA, 23 nt, synthetic construct
  source 1..23: mol_type = other RNA
tagctcactacccagcaaagcag

SEQ ID NO: 3769 - RNA, 21 nt, synthetic construct
  source 1..21: mol_type = other RNA
  modified_base 1: mod_base = OTHER; note = 2'-O-methyluridine-3'-phosphorothioate
  modified_base 2: mod_base = OTHER; note = 2'-O-methyluridine-3'-phosphorothioate
  modified_base 3: mod_base = OTHER; note = 2'-O-methylcytidine-3'-phosphate
  modified_base 4: mod_base = OTHER; note = 2'-O-methylcytidine-3'-phosphate
  modified_base 5: mod_base = OTHER; note = 2'-O-methyluridine-3'-phosphate
  modified_base 6: mod_base = OTHER; note 1-((2R,3R,4R,5R)-3-(docosyloxy)-4-hydroxy-5-(hydroxymethyl) tetrahydrofuran-2-yl)pyrimidine-2,4(1H,3H)-dione
  modified_base 7: mod_base = OTHER; note = 2'-fluorocytidine-3'-phosphate
  modified_base 8: mod_base = OTHER; note = 2'-O-methyluridine-3'-phosphate
  modified_base 9: mod_base = OTHER; note = 2'-fluorouridine-3'-phosphate
  modified_base 10: mod_base = OTHER; note = 2'-fluorocytidine-3'-phosphate
  modified_base 11: mod_base = OTHER; note = 2'-fluoroadenosine-3'-phosphate
  modified_base 12: mod_base = OTHER; note = 2'-O-methyluridine-3'-phosphate
  modified_base 13: mod_base = OTHER; note = 2'-O-methylcytidine-3'-phosphate
  modified_base 14: mod_base = OTHER; note = 2'-O-methyluridine-3'-phosphate
  modified_base 15: mod_base = OTHER; note = 2'-O-methyluridine-3'-phosphate
  modified_base 16: mod_base = OTHER; note = 2'-O-methylguanosine-3'-phosphate
  modified_base 17: mod_base = OTHER; note = 2'-O-methyladenosine-3'-phosphate
  modified_base 18: mod_base = OTHER; note = 2'-O-methyluridine-3'-phosphate
  modified_base 19: mod_base = OTHER; note = 2'-O-methylcytidine-3'-phosphorothioate
  modified_base 20: mod_base = OTHER; note = 2'-O-methyladenosine-3'-phosphorothioate
  modified_base 21: mod_base = OTHER; note = 2'-O-methyladenosine-3'-phosphate
ttccttcttcatcttgatcaa

SEQ ID NO: 3770 - RNA, 21 nt, synthetic construct
  source 1..21: mol_type = other RNA
  modified_base 1: mod_base = OTHER; note = 2'-O-methylcytidine-3'-phosphorothioate
  modified_base 2: mod_base = OTHER; note = 2'-O-methyladenosine-3'-phosphorothioate
  modified_base 3: mod_base = OTHER; note = 2'-O-methylcytidine-3'-phosphate
  modified_base 4: mod_base = OTHER; note = 2'-O-methyluridine-3'-phosphate
  modified_base 5: mod_base = OTHER; note = 2'-O-methylcytidine-3'-phosphate
  modified_base 6: mod_base = OTHER; note 1-((2R,3R,4R,5R)-3-(docosyloxy)-4-hydroxy-5-(hydroxymethyl) tetrahydrofuran-2-yl)pyrimidine-2,4(1H,3H)-dione
  modified_base 7: mod_base = OTHER; note = 2'-fluoroadenosine-3'-phosphate
  modified_base 8: mod_base = OTHER; note = 2'-O-methyladenosine-3'-phosphate
  modified_base 9: mod_base = OTHER; note = 2'-fluoroadenosine-3'-phosphate
  modified_base 10: mod_base = OTHER; note = 2'-fluoroadenosine-3'-phosphate
  modified_base 11: mod_base = OTHER; note = 2'-fluorocytidine-3'-phosphate
  modified_base 12: mod_base = OTHER; note = 2'-O-methyluridine-3'-phosphate
  modified_base 13: mod_base = OTHER; note = 2'-O-methylguanosine-3'-phosphate
  modified_base 14: mod_base = OTHER; note = 2'-O-methyladenosine-3'-phosphate
  modified_base 15: mod_base = OTHER; note = 2'-O-methyluridine-3'-phosphate
  modified_base 16: mod_base = OTHER; note = 2'-O-methylguanosine-3'-phosphate
  modified_base 17: mod_base = OTHER; note = 2'-O-methyluridine-3'-phosphate
  modified_base 18: mod_base = OTHER; note = 2'-O-methyluridine-3'-phosphate
  modified_base 19: mod_base = OTHER; note = 2'-O-methylcytidine-3'-phosphorothioate
  modified_base 20: mod_base = OTHER; note = 2'-O-methyladenosine-3'-phosphorothioate
  modified_base 21: mod_base = OTHER; note = 2'-O-methyladenosine-3'-phosphate
cactctaaaactgatgttcaa

SEQ ID NO: 3771 - RNA, 21 nt, synthetic construct
  source 1..21: mol_type = other RNA
  modified_base 1: mod_base = OTHER; note = 2'-O-methyluridine-3'-phosphorothioate
  modified_base 2: mod_base = OTHER; note = 2'-O-methylcytidine-3'-phosphorothioate
  modified_base 3: mod_base = OTHER; note = 2'-O-methyluridine-3'-phosphate
  modified_base 4: mod_base = OTHER; note = 2'-O-methyluridine-3'-phosphate
  modified_base 5: mod_base = OTHER; note = 2'-O-methylcytidine-3'-phosphate
  modified_base 6: mod_base = OTHER; note 1-((2R,3R,4R,5R)-3-(docosyloxy)-4-hydroxy-5-(hydroxymethyl) tetrahydrofuran-2-yl)pyrimidine-2,4(1H,3H)-dione
  modified_base 7: mod_base = OTHER; note = 2'-fluoroguanosine-3'-phosphate
  modified_base 8: mod_base = OTHER; note = 2'-O-methyluridine-3'-phosphate
  modified_base 9: mod_base = OTHER; note = 2'-fluoroadenosine-3'-phosphate
  modified_base 10: mod_base = OTHER; note = 2'-fluorouridine-3'-phosphate
  modified_base 11: mod_base = OTHER; note = 2'-fluorocytidine-3'-phosphate
  modified_base 12: mod_base = OTHER; note = 2'-O-methyladenosine-3'-phosphate
  modified_base 13: mod_base = OTHER; note = 2'-O-methylcytidine-3'-phosphate
  modified_base 14: mod_base = OTHER; note = 2'-O-methyluridine-3'-phosphate
  modified_base 15: mod_base = OTHER; note = 2'-O-methylguanosine-3'-phosphate
  modified_base 16: mod_base = OTHER; note = 2'-O-methyladenosine-3'-phosphate
  modified_base 17: mod_base = OTHER; note = 2'-O-methylcytidine-3'-phosphate
  modified_base 18: mod_base = OTHER; note = 2'-O-methyluridine-3'-phosphate
  modified_base 19: mod_base = OTHER; note = 2'-O-methylcytidine-3'-phosphorothioate
  modified_base 20: mod_base = OTHER; note = 2'-O-methyladenosine-3'-phosphorothioate
  modified_base 21: mod_base = OTHER; note = 2'-O-methyladenosine-3'-phosphate
tcttctgtatcactgactcaa

SEQ ID NO: 3772 - RNA, 21 nt, synthetic construct
  source 1..21: mol_type = other RNA
  modified_base 1: mod_base = OTHER; note = 2'-O-methylcytidine-3'-phosphorothioate
  modified_base 2: mod_base = OTHER; note = 2'-O-methyladenosine-3'-phosphorothioate
  modified_base 3: mod_base = OTHER; note = 2'-O-methylguanosine-3'-phosphate
  modified_base 4: mod_base = OTHER; note = 2'-O-methyladenosine-3'-phosphate
  modified_base 5: mod_base = OTHER; note = 2'-O-methyluridine-3'-phosphate
  modified_base 6: mod_base = OTHER; note 4-amino-1-((2R,3R,4R,5R)-3-(docosyloxy)-4-hydroxy-5-(hydrox ymethyl)tetrahydrofuran-2-yl)pyrimidin-2(1H)-one
  modified_base 7: mod_base = OTHER; note = 2'-fluorouridine-3'-phosphate
  modified_base 8: mod_base = OTHER; note = 2'-O-methyluridine-3'-phosphate
  modified_base 9: mod_base = OTHER; note = 2'-fluorocytidine-3'-phosphate
  modified_base 10: mod_base = OTHER; note = 2'-fluorouridine-3'-phosphate
  modified_base 11: mod_base = OTHER; note = 2'-fluoroguanosine-3'-phosphate
  modified_base 12: mod_base = OTHER; note = 2'-O-methyladenosine-3'-phosphate
  modified_base 13: mod_base = OTHER; note = 2'-O-methylcytidine-3'-phosphate
  modified_base 14: mod_base = OTHER; note = 2'-O-methyluridine-3'-phosphate
  modified_base 15: mod_base = OTHER; note = 2'-O-methylguanosine-3'-phosphate
  modified_base 16: mod_base = OTHER; note = 2'-O-methyladenosine-3'-phosphate
  modified_base 17: mod_base = OTHER; note = 2'-O-methyluridine-3'-phosphate
  modified_base 18: mod_base = OTHER; note = 2'-O-methylcytidine-3'-phosphate
  modified_base 19: mod_base = OTHER; note = 2'-O-methylcytidine-3'-phosphorothioate
  modified_base 20: mod_base = OTHER; note = 2'-O-methyladenosine-3'-phosphorothioate
  modified_base 21: mod_base = OTHER; note = 2'-O-methyladenosine-3'-phosphate
cagatcttctgactgatccaa

SEQ ID NO: 3773 - RNA, 21 nt, synthetic construct
  source 1..21: mol_type = other RNA
  modified_base 1: mod_base = OTHER; note = 2'-O-methyluridine-3'-phosphorothioate
  modified_base 2: mod_base = OTHER; note = 2'-O-methylguanosine-3'-phosphorothioate
  modified_base 3: mod_base = OTHER; note = 2'-O-methyladenosine-3'-phosphate
  modified_base 4: mod_base = OTHER; note = 2'-O-methylcytidine-3'-phosphate
  modified_base 5: mod_base = OTHER; note = 2'-O-methyladenosine-3'-phosphate
  modified_base 6: mod_base = OTHER; note 4-amino-1-((2R,3R,4R,5R)-3-(docosyloxy)-4-hydroxy-5-(hydrox ymethyl)tetrahydrofuran-2-yl)pyrimidin-2(1H)-one
  modified_base 7: mod_base = OTHER; note = 2'-fluoroadenosine-3'-phosphate
  modified_base 8: mod_base = OTHER; note = 2'-O-methyluridine-3'-phosphate
  modified_base 9: mod_base = OTHER; note = 2'-fluorouridine-3'-phosphate
  modified_base 10: mod_base = OTHER; note = 2'-fluorouridine-3'-phosphate
  modified_base 11: mod_base = OTHER; note = 2'-fluorouridine-3'-phosphate
  modified_base 12: mod_base = OTHER; note = 2'-O-methyluridine-3'-phosphate
  modified_base 13: mod_base = OTHER; note = 2'-O-methylcytidine-3'-phosphate
  modified_base 14: mod_base = OTHER; note = 2'-O-methyluridine-3'-phosphate
  modified_base 15: mod_base = OTHER; note = 2'-O-methylcytidine-3'-phosphate
  modified_base 16: mod_base = OTHER; note = 2'-O-methylcytidine-3'-phosphate
  modified_base 17: mod_base = OTHER; note = 2'-O-methyladenosine-3'-phosphate
  modified_base 18: mod_base = OTHER; note = 2'-O-methyluridine-3'-phosphate
  modified_base 19: mod_base = OTHER; note = 2'-O-methyladenosine-3'-phosphorothioate
  modified_base 20: mod_base = OTHER; note = 2'-O-methyladenosine-3'-phosphorothioate
  modified_base 21: mod_base = OTHER; note = 2'-O-methyladenosine-3'-phosphate
tgacacatttttctccataaa

SEQ ID NO: 3774 - RNA, 21 nt, synthetic construct
  source 1..21: mol_type = other RNA
  modified_base 1: mod_base = OTHER; note = 2'-O-methylguanosine-3'-phosphorothioate
  modified_base 2: mod_base = OTHER; note = 2'-O-methylguanosine-3'-phosphorothioate
  modified_base 3: mod_base = OTHER; note = 2'-O-methyladenosine-3'-phosphate
  modified_base 4: mod_base = OTHER; note = 2'-O-methyladenosine-3'-phosphate
  modified_base 5: mod_base = OTHER; note = 2'-O-methyladenosine-3'-phosphate
  modified_base 6: mod_base = OTHER; note 4-amino-1-((2R,3R,4R,5R)-3-(docosyloxy)-4-hydroxy-5-(hydrox ymethyl)tetrahydrofuran-2-yl)pyrimidin-2(1H)-one
  modified_base 7: mod_base = OTHER; note = 2'-fluorouridine-3'-phosphate
  modified_base 8: mod_base = OTHER; note = 2'-O-methylcytidine-3'-phosphate
  modified_base 9: mod_base = OTHER; note = 2'-fluoroadenosine-3'-phosphate
  modified_base 10: mod_base = OTHER; note = 2'-fluorouridine-3'-phosphate
  modified_base 11: mod_base = OTHER; note = 2'-fluorouridine-3'-phosphate
  modified_base 12: mod_base = OTHER; note = 2'-O-methyluridine-3'-phosphate
  modified_base 13: mod_base = OTHER; note = 2'-O-methyluridine-3'-phosphate
  modified_base 14: mod_base = OTHER; note = 2'-O-methyluridine-3'-phosphate
  modified_base 15: mod_base = OTHER; note = 2'-O-methyladenosine-3'-phosphate
  modified_base 16: mod_base = OTHER; note = 2'-O-methylcytidine-3'-phosphate
  modified_base 17: mod_base = OTHER; note = 2'-O-methyladenosine-3'-phosphate
  modified_base 18: mod_base = OTHER; note = 2'-O-methyluridine-3'-phosphate
  modified_base 19: mod_base = OTHER; note = 2'-O-methyladenosine-3'-phosphorothioate
  modified_base 20: mod_base = OTHER; note = 2'-O-methyladenosine-3'-phosphorothioate
  modified_base 21: mod_base = OTHER; note = 2'-O-methyladenosine-3'-phosphate
ggaaactcatttttacataaa

SEQ ID NO: 3775 - RNA, 21 nt, synthetic construct
  source 1..21: mol_type = other RNA
  modified_base 1: mod_base = OTHER; note = 2'-O-methyladenosine-3'-phosphorothioate
  modified_base 2: mod_base = OTHER; note = 2'-O-methyluridine-3'-phosphorothioate
  modified_base 3: mod_base = OTHER; note = 2'-O-methylcytidine-3'-phosphate
  modified_base 4: mod_base = OTHER; note = 2'-O-methyladenosine-3'-phosphate
  modified_base 5: mod_base = OTHER; note = 2'-O-methylguanosine-3'-phosphate
  modified_base 6: mod_base = OTHER; note 4-amino-1-((2R,3R,4R,5R)-3-(docosyloxy)-4-hydroxy-5-(hydrox ymethyl)tetrahydrofuran-2-yl)pyrimidin-2(1H)-one
  modified_base 7: mod_base = OTHER; note = 2'-fluoroadenosine-3'-phosphate
  modified_base 8: mod_base = OTHER; note = 2'-O-methyladenosine-3'-phosphate
  modified_base 9: mod_base = OTHER; note = 2'-fluorocytidine-3'-phosphate
  modified_base 10: mod_base = OTHER; note = 2'-fluorouridine-3'-phosphate
  modified_base 11: mod_base = OTHER; note = 2'-fluorouridine-3'-phosphate
  modified_base 12: mod_base = OTHER; note = 2'-O-methyladenosine-3'-phosphate
  modified_base 13: mod_base = OTHER; note = 2'-O-methylguanosine-3'-phosphate
  modified_base 14: mod_base = OTHER; note = 2'-O-methyladenosine-3'-phosphate
  modified_base 15: mod_base = OTHER; note = 2'-O-methyladenosine-3'-phosphate
  modified_base 16: mod_base = OTHER; note = 2'-O-methyladenosine-3'-phosphate
  modified_base 17: mod_base = OTHER; note = 2'-O-methyluridine-3'-phosphate
  modified_base 18: mod_base = OTHER; note = 2'-O-methyluridine-3'-phosphate
  modified_base 19: mod_base = OTHER; note = 2'-O-methylcytidine-3'-phosphorothioate
  modified_base 20: mod_base = OTHER; note = 2'-O-methyluridine-3'-phosphorothioate
  modified_base 21: mod_base = OTHER; note = 2'-O-methyladenosine-3'-phosphate
atcagcaacttagaaattcta

SEQ ID NO: 3776 - RNA, 21 nt, synthetic construct
  source 1..21: mol_type = other RNA
  modified_base 1: mod_base = OTHER; note = 2'-O-methylcytidine-3'-phosphorothioate
  modified_base 2: mod_base = OTHER; note = 2'-O-methyluridine-3'-phosphorothioate
  modified_base 3: mod_base = OTHER; note = 2'-O-methyluridine-3'-phosphate
  modified_base 4: mod_base = OTHER; note = 2'-O-methyladenosine-3'-phosphate
  modified_base 5: mod_base = OTHER; note = 2'-O-methyluridine-3'-phosphate
  modified_base 6: mod_base = OTHER; note (2R,3S,4S,5R)-5-(6-amino-9H-purin-9-yl)-4-(docosyloxy)-2-(h ydroxymethyl)tetrahydrofuran-3-ol
  modified_base 7: mod_base = OTHER; note = 2'-fluorouridine-3'-phosphate
  modified_base 8: mod_base = OTHER; note = 2'-O-methyluridine-3'-phosphate
  modified_base 9: mod_base = OTHER; note = 2'-fluorouridine-3'-phosphate
  modified_base 10: mod_base = OTHER; note = 2'-fluorocytidine-3'-phosphate
  modified_base 11: mod_base = OTHER; note = 2'-fluorouridine-3'-phosphate
  modified_base 12: mod_base = OTHER; note = 2'-O-methylcytidine-3'-phosphate
  modified_base 13: mod_base = OTHER; note = 2'-O-methyluridine-3'-phosphate
  modified_base 14: mod_base = OTHER; note = 2'-O-methyladenosine-3'-phosphate
  modified_base 15: mod_base = OTHER; note = 2'-O-methylguanosine-3'-phosphate
  modified_base 16: mod_base = OTHER; note = 2'-O-methyladenosine-3'-phosphate
  modified_base 17: mod_base = OTHER; note = 2'-O-methylguanosine-3'-phosphate
  modified_base 18: mod_base = OTHER; note = 2'-O-methyluridine-3'-phosphate
  modified_base 19: mod_base = OTHER; note = 2'-O-methyladenosine-3'-phosphorothioate
  modified_base 20: mod_base = OTHER; note = 2'-O-methylcytidine-3'-phosphorothioate
  modified_base 21: mod_base = OTHER; note = 2'-O-methyladenosine-3'-phosphate
cttatatttctctagagtaca

SEQ ID NO: 3777 - RNA, 21 nt, synthetic construct
  source 1..21: mol_type = other RNA
  modified_base 1: mod_base = OTHER; note = 2'-O-methyladenosine-3'-phosphorothioate
  modified_base 2: mod_base = OTHER; note = 2'-O-methyladenosine-3'-phosphorothioate
  modified_base 3: mod_base = OTHER; note = 2'-O-methylcytidine-3'-phosphate
  modified_base 4: mod_base = OTHER; note = 2'-O-methyluridine-3'-phosphate
  modified_base 5: mod_base = OTHER; note = 2'-O-methylcytidine-3'-phosphate
  modified_base 6: mod_base = OTHER; note 4-amino-1-((2R,3R,4R,5R)-3-(docosyloxy)-4-hydroxy-5-(hydrox ymethyl)tetrahydrofuran-2-yl)pyrimidin-2(1H)-one
  modified_base 7: mod_base = OTHER; note = 2'-fluoroadenosine-3'-phosphate
  modified_base 8: mod_base = OTHER; note = 2'-O-methyladenosine-3'-phosphate
  modified_base 9: mod_base = OTHER; note = 2'-fluoroguanosine-3'-phosphate
  modified_base 10: mod_base = OTHER; note = 2'-fluoroadenosine-3'-phosphate
  modified_base 11: mod_base = OTHER; note = 2'-fluoroadenosine-3'-phosphate
  modified_base 12: mod_base = OTHER; note = 2'-O-methyluridine-3'-phosphate
  modified_base 13: mod_base = OTHER; note = 2'-O-methylcytidine-3'-phosphate
  modified_base 14: mod_base = OTHER; note = 2'-O-methyluridine-3'-phosphate
  modified_base 15: mod_base = OTHER; note = 2'-O-methyluridine-3'-phosphate
  modified_base 16: mod_base = OTHER; note = 2'-O-methyluridine-3'-phosphate
  modified_base 17: mod_base = OTHER; note = 2'-O-methyluridine-3'-phosphate
  modified_base 18: mod_base = OTHER; note = 2'-O-methyladenosine-3'-phosphate
  modified_base 19: mod_base = OTHER; note = 2'-O-methyluridine-3'-phosphorothioate
  modified_base 20: mod_base = OTHER; note = 2'-O-methylcytidine-3'-phosphorothioate
  modified_base 21: mod_base = OTHER; note = 2'-O-methyladenosine-3'-phosphate
aactccaagaatcttttatca

SEQ ID NO: 3778 - RNA, 21 nt, synthetic construct
  source 1..21: mol_type = other RNA
  modified_base 1: mod_base = OTHER; note = 2'-O-methylcytidine-3'-phosphorothioate
  modified_base 2: mod_base = OTHER; note = 2'-O-methyluridine-3'-phosphorothioate
  modified_base 3: mod_base = OTHER; note = 2'-O-methyluridine-3'-phosphate
  modified_base 4: mod_base = OTHER; note = 2'-O-methylcytidine-3'-phosphate
  modified_base 5: mod_base = OTHER; note = 2'-O-methyladenosine-3'-phosphate
  modified_base 6: mod_base = OTHER; note (2R,3S,4S,5R)-5-(6-amino-9H-purin-9-yl)-4-(docosyloxy)-2-(h ydroxymethyl)tetrahydrofuran-3-ol
  modified_base 7: mod_base = OTHER; note = 2'-fluoroadenosine-3'-phosphate
  modified_base 8: mod_base = OTHER; note = 2'-O-methylcytidine-3'-phosphate
  modified_base 9: mod_base = OTHER; note = 2'-fluoroadenosine-3'-phosphate
  modified_base 10: mod_base = OTHER; note = 2'-fluorouridine-3'-phosphate
  modified_base 11: mod_base = OTHER; note = 2'-fluorouridine-3'-phosphate
  modified_base 12: mod_base = OTHER; note = 2'-O-methylcytidine-3'-phosphate
  modified_base 13: mod_base = OTHER; note = 2'-O-methylcytidine-3'-phosphate
  modified_base 14: mod_base = OTHER; note = 2'-O-methyluridine-3'-phosphate
  modified_base 15: mod_base = OTHER; note = 2'-O-methylguanosine-3'-phosphate
  modified_base 16: mod_base = OTHER; note = 2'-O-methylcytidine-3'-phosphate
  modified_base 17: mod_base = OTHER; note = 2'-O-methyladenosine-3'-phosphate
  modified_base 18: mod_base = OTHER; note = 2'-O-methyluridine-3'-phosphate
  modified_base 19: mod_base = OTHER; note = 2'-O-methyluridine-3'-phosphorothioate
  modified_base 20: mod_base = OTHER; note = 2'-O-methyladenosine-3'-phosphorothioate
  modified_base 21: mod_base = OTHER; note = 2'-O-methyladenosine-3'-phosphate
cttcaaacattcctgcattaa

SEQ ID NO: 3779 - RNA, 21 nt, synthetic construct
  source 1..21: mol_type = other RNA
  modified_base 1: mod_base = OTHER; note = 2'-O-methyluridine-3'-phosphorothioate
  modified_base 2: mod_base = OTHER; note = 2'-O-methylcytidine-3'-phosphorothioate
  modified_base 3: mod_base = OTHER; note = 2'-O-methylguanosine-3'-phosphate
  modified_base 4: mod_base = OTHER; note = 2'-O-methyluridine-3'-phosphate
  modified_base 5: mod_base = OTHER; note = 2'-O-methyluridine-3'-phosphate
  modified_base 6: mod_base = OTHER; note 4-amino-1-((2R,3R,4R,5R)-3-(docosyloxy)-4-hydroxy-5-(hydrox ymethyl)tetrahydrofuran-2-yl)pyrimidin-2(1H)-one
  modified_base 7: mod_base = OTHER; note = 2'-fluorouridine-3'-phosphate
  modified_base 8: mod_base = OTHER; note = 2'-O-methyluridine-3'-phosphate
  modified_base 9: mod_base = OTHER; note = 2'-fluorocytidine-3'-phosphate
  modified_base 10: mod_base = OTHER; note = 2'-fluorouridine-3'-phosphate
  modified_base 11: mod_base = OTHER; note = 2'-fluorocytidine-3'-phosphate
  modified_base 12: mod_base = OTHER; note = 2'-O-methylcytidine-3'-phosphate
  modified_base 13: mod_base = OTHER; note = 2'-O-methyluridine-3'-phosphate
  modified_base 14: mod_base = OTHER; note = 2'-O-methylcytidine-3'-phosphate
  modified_base 15: mod_base = OTHER; note = 2'-O-methyladenosine-3'-phosphate
  modified_base 16: mod_base = OTHER; note = 2'-O-methyladenosine-3'-phosphate
  modified_base 17: mod_base = OTHER; note = 2'-O-methylcytidine-3'-phosphate
  modified_base 18: mod_base = OTHER; note = 2'-O-methyluridine-3'-phosphate
  modified_base 19: mod_base = OTHER; note = 2'-O-methyladenosine-3'-phosphorothioate
  modified_base 20: mod_base = OTHER; note = 2'-O-methylguanosine-3'-phosphorothioate
  modified_base 21: mod_base = OTHER; note = 2'-O-methyladenosine-3'-phosphate
tcgttcttctcctcaactaga

SEQ ID NO: 3780 - RNA, 21 nt, synthetic construct
  source 1..21: mol_type = other RNA
  modified_base 1: mod_base = OTHER; note = 2'-O-methyladenosine-3'-phosphorothioate
  modified_base 2: mod_base = OTHER; note = 2'-O-methyladenosine-3'-phosphorothioate
  modified_base 3: mod_base = OTHER; note = 2'-O-methyladenosine-3'-phosphate
  modified_base 4: mod_base = OTHER; note = 2'-O-methylguanosine-3'-phosphate
  modified_base 5: mod_base = OTHER; note = 2'-O-methyladenosine-3'-phosphate
  modified_base 6: mod_base = OTHER; note 1-((2R,3R,4R,5R)-3-(docosyloxy)-4-hydroxy-5-(hydroxymethyl) tetrahydrofuran-2-yl)pyrimidine-2,4(1H,3H)-dione
  modified_base 7: mod_base = OTHER; note = 2'-fluorouridine-3'-phosphate
  modified_base 8: mod_base = OTHER; note = 2'-O-methyladenosine-3'-phosphate
  modified_base 9: mod_base = OTHER; note = 2'-fluoroadenosine-3'-phosphate
  modified_base 10: mod_base = OTHER; note = 2'-fluorouridine-3'-phosphate
  modified_base 11: mod_base = OTHER; note = 2'-fluorocytidine-3'-phosphate
  modified_base 12: mod_base = OTHER; note = 2'-O-methylcytidine-3'-phosphate
  modified_base 13: mod_base = OTHER; note = 2'-O-methyluridine-3'-phosphate
  modified_base 14: mod_base = OTHER; note = 2'-O-methylcytidine-3'-phosphate
  modified_base 15: mod_base = OTHER; note = 2'-O-methyluridine-3'-phosphate
  modified_base 16: mod_base = OTHER; note = 2'-O-methylcytidine-3'-phosphate
  modified_base 17: mod_base = OTHER; note = 2'-O-methyladenosine-3'-phosphate
  modified_base 18: mod_base = OTHER; note = 2'-O-methylcytidine-3'-phosphate
  modified_base 19: mod_base = OTHER; note = 2'-O-methyladenosine-3'-phosphorothioate
  modified_base 20: mod_base = OTHER; note = 2'-O-methylcytidine-3'-phosphorothioate
  modified_base 21: mod_base = OTHER; note = 2'-O-methyladenosine-3'-phosphate
aaagattaatcctctcacaca

SEQ ID NO: 3781 - RNA, 21 nt, synthetic construct
  source 1..21: mol_type = other RNA
  modified_base 1: mod_base = OTHER; note = 2'-O-methyladenosine-3'-phosphorothioate
  modified_base 2: mod_base = OTHER; note = 2'-O-methylcytidine-3'-phosphorothioate
  modified_base 3: mod_base = OTHER; note = 2'-O-methyluridine-3'-phosphate
  modified_base 4: mod_base = OTHER; note = 2'-O-methyladenosine-3'-phosphate
  modified_base 5: mod_base = OTHER; note = 2'-O-methyladenosine-3'-phosphate
  modified_base 6: mod_base = OTHER; note 4-amino-1-((2R,3R,4R,5R)-3-(docosyloxy)-4-hydroxy-5-(hydrox ymethyl)tetrahydrofuran-2-yl)pyrimidin-2(1H)-one
  modified_base 7: mod_base = OTHER; note = 2'-fluorocytidine-3'-phosphate
  modified_base 8: mod_base = OTHER; note = 2'-O-methyluridine-3'-phosphate
  modified_base 9: mod_base = OTHER; note = 2'-fluorocytidine-3'-phosphate
  modified_base 10: mod_base = OTHER; note = 2'-fluoroadenosine-3'-phosphate
  modified_base 11: mod_base = OTHER; note = 2'-fluorouridine-3'-phosphate
  modified_base 12: mod_base = OTHER; note = 2'-O-methylcytidine-3'-phosphate
  modified_base 13: mod_base = OTHER; note = 2'-O-methyladenosine-3'-phosphate
  modified_base 14: mod_base = OTHER; note = 2'-O-methyladenosine-3'-phosphate
  modified_base 15: mod_base = OTHER; note = 2'-O-methyladenosine-3'-phosphate
  modified_base 16: mod_base = OTHER; note = 2'-O-methylguanosine-3'-phosphate
  modified_base 17: mod_base = OTHER; note = 2'-O-methyladenosine-3'-phosphate
  modified_base 18: mod_base = OTHER; note = 2'-O-methyluridine-3'-phosphate
  modified_base 19: mod_base = OTHER; note = 2'-O-methyladenosine-3'-phosphorothioate
  modified_base 20: mod_base = OTHER; note = 2'-O-methylcytidine-3'-phosphorothioate
  modified_base 21: mod_base = OTHER; note = 2'-O-methyladenosine-3'-phosphate
actaacctcatcaaagataca

SEQ ID NO: 3782 - RNA, 21 nt, synthetic construct
  source 1..21: mol_type = other RNA
  modified_base 1: mod_base = OTHER; note = 2'-O-methylcytidine-3'-phosphorothioate
  modified_base 2: mod_base = OTHER; note = 2'-O-methyladenosine-3'-phosphorothioate
  modified_base 3: mod_base = OTHER; note = 2'-O-methylcytidine-3'-phosphate
  modified_base 4: mod_base = OTHER; note = 2'-O-methylcytidine-3'-phosphate
  modified_base 5: mod_base = OTHER; note = 2'-O-methyladenosine-3'-phosphate
  modified_base 6: mod_base = OTHER; note 4-amino-1-((2R,3R,4R,5R)-3-(docosyloxy)-4-hydroxy-5-(hydrox ymethyl)tetrahydrofuran-2-yl)pyrimidin-2(1H)-one
  modified_base 7: mod_base = OTHER; note = 2'-fluorouridine-3'-phosphate
  modified_base 8: mod_base = OTHER; note = 2'-O-methyluridine-3'-phosphate
  modified_base 9: mod_base = OTHER; note = 2'-fluoroadenosine-3'-phosphate
  modified_base 10: mod_base = OTHER; note = 2'-fluorouridine-3'-phosphate
  modified_base 11: mod_base = OTHER; note = 2'-fluorouridine-3'-phosphate
  modified_base 12: mod_base = OTHER; note = 2'-O-methyladenosine-3'-phosphate
  modified_base 13: mod_base = OTHER; note = 2'-O-methylcytidine-3'-phosphate
  modified_base 14: mod_base = OTHER; note = 2'-O-methyluridine-3'-phosphate
  modified_base 15: mod_base = OTHER; note = 2'-O-methyladenosine-3'-phosphate
  modified_base 16: mod_base = OTHER; note = 2'-O-methyladenosine-3'-phosphate
  modified_base 17: mod_base = OTHER; note = 2'-O-methyluridine-3'-phosphate
  modified_base 18: mod_base = OTHER; note = 2'-O-methyladenosine-3'-phosphate
  modified_base 19: mod_base = OTHER; note = 2'-O-methyladenosine-3'-phosphorothioate
  modified_base 20: mod_base = OTHER; note = 2'-O-methyladenosine-3'-phosphorothioate
  modified_base 21: mod_base = OTHER; note = 2'-O-methyladenosine-3'-phosphate
caccacttattactaataaaa

SEQ ID NO: 3783 - RNA, 21 nt, synthetic construct
  source 1..21: mol_type = other RNA
  modified_base 1: mod_base = OTHER; note = 2'-O-methyluridine-3'-phosphorothioate
  modified_base 2: mod_base = OTHER; note = 2'-O-methylguanosine-3'-phosphorothioate
  modified_base 3: mod_base = OTHER; note = 2'-O-methylguanosine-3'-phosphate
  modified_base 4: mod_base = OTHER; note = 2'-O-methyluridine-3'-phosphate
  modified_base 5: mod_base = OTHER; note = 2'-O-methyladenosine-3'-phosphate
  modified_base 6: mod_base = OTHER; note 4-amino-1-((2R,3R,4R,5R)-3-(docosyloxy)-4-hydroxy-5-(hydrox ymethyl)tetrahydrofuran-2-yl)pyrimidin-2(1H)-one
  modified_base 7: mod_base = OTHER; note = 2'-fluorouridine-3'-phosphate
  modified_base 8: mod_base = OTHER; note = 2'-O-methyladenosine-3'-phosphate
  modified_base 9: mod_base = OTHER; note = 2'-fluoroguanosine-3'-phosphate
  modified_base 10: mod_base = OTHER; note = 2'-fluoroadenosine-3'-phosphate
  modified_base 11: mod_base = OTHER; note = 2'-fluoroadenosine-3'-phosphate
  modified_base 12: mod_base = OTHER; note = 2'-O-methyladenosine-3'-phosphate
  modified_base 13: mod_base = OTHER; note = 2'-O-methyluridine-3'-phosphate
  modified_base 14: mod_base = OTHER; note = 2'-O-methyladenosine-3'-phosphate
  modified_base 15: mod_base = OTHER; note = 2'-O-methyluridine-3'-phosphate
  modified_base 16: mod_base = OTHER; note = 2'-O-methyluridine-3'-phosphate
  modified_base 17: mod_base = OTHER; note = 2'-O-methylcytidine-3'-phosphate
  modified_base 18: mod_base = OTHER; note = 2'-O-methyluridine-3'-phosphate
  modified_base 19: mod_base = OTHER; note = 2'-O-methyluridine-3'-phosphorothioate
  modified_base 20: mod_base = OTHER; note = 2'-O-methyluridine-3'-phosphorothioate
  modified_base 21: mod_base = OTHER; note = 2'-O-methyladenosine-3'-phosphate
tggtactagaaatattcttta

SEQ ID NO: 3784 - RNA, 21 nt, synthetic construct
  source 1..21: mol_type = other RNA
  modified_base 1: mod_base = OTHER; note = 2'-O-methylguanosine-3'-phosphorothioate
  modified_base 2: mod_base = OTHER; note = 2'-O-methylcytidine-3'-phosphorothioate
  modified_base 3: mod_base = OTHER; note = 2'-O-methyluridine-3'-phosphate
  modified_base 4: mod_base = OTHER; note = 2'-O-methylguanosine-3'-phosphate
  modified_base 5: mod_base = OTHER; note = 2'-O-methyluridine-3'-phosphate
  modified_base 6: mod_base = OTHER; note 4-amino-1-((2R,3R,4R,5R)-3-(docosyloxy)-4-hydroxy-5-(hydrox ymethyl)tetrahydrofuran-2-yl)pyrimidin-2(1H)-one
  modified_base 7: mod_base = OTHER; note = 2'-fluoroadenosine-3'-phosphate
  modified_base 8: mod_base = OTHER; note = 2'-O-methyluridine-3'-phosphate
  modified_base 9: mod_base = OTHER; note = 2'-fluorouridine-3'-phosphate
  modified_base 10: mod_base = OTHER; note = 2'-fluorouridine-3'-phosphate
  modified_base 11: mod_base = OTHER; note = 2'-fluoroguanosine-3'-phosphate
  modified_base 12: mod_base = OTHER; note = 2'-O-methyluridine-3'-phosphate
  modified_base 13: mod_base = OTHER; note = 2'-O-methyluridine-3'-phosphate
  modified_base 14: mod_base = OTHER; note = 2'-O-methylcytidine-3'-phosphate
  modified_base 15: mod_base = OTHER; note = 2'-O-methyladenosine-3'-phosphate
  modified_base 16: mod_base = OTHER; note = 2'-O-methylcytidine-3'-phosphate
  modified_base 17: mod_base = OTHER; note = 2'-O-methyluridine-3'-phosphate
  modified_base 18: mod_base = OTHER; note = 2'-O-methylcytidine-3'-phosphate
  modified_base 19: mod_base = OTHER; note = 2'-O-methyluridine-3'-phosphorothioate
  modified_base 20: mod_base = OTHER; note = 2'-O-methyladenosine-3'-phosphorothioate
  modified_base 21: mod_base = OTHER; note = 2'-O-methyladenosine-3'-phosphate
gctgtcatttgttcactctaa

SEQ ID NO: 3785 - RNA, 21 nt, synthetic construct
  source 1..21: mol_type = other RNA
  modified_base 1: mod_base = OTHER; note = 2'-O-methyladenosine-3'-phosphorothioate
  modified_base 2: mod_base = OTHER; note = 2'-O-methylcytidine-3'-phosphorothioate
  modified_base 3: mod_base = OTHER; note = 2'-O-methyluridine-3'-phosphate
  modified_base 4: mod_base = OTHER; note = 2'-O-methylcytidine-3'-phosphate
  modified_base 5: mod_base = OTHER; note = 2'-O-methyladenosine-3'-phosphate
  modified_base 6: mod_base = OTHER; note (2R,3S,4S,5R)-5-(6-amino-9H-purin-9-yl)-4-(docosyloxy)-2-(h ydroxymethyl)tetrahydrofuran-3-ol
  modified_base 7: mod_base = OTHER; note = 2'-fluorocytidine-3'-phosphate
  modified_base 8: mod_base = OTHER; note = 2'-O-methyladenosine-3'-phosphate
  modified_base 9: mod_base = OTHER; note = 2'-fluoroadenosine-3'-phosphate
  modified_base 10: mod_base = OTHER; note = 2'-fluorouridine-3'-phosphate
  modified_base 11: mod_base = OTHER; note = 2'-fluorouridine-3'-phosphate
  modified_base 12: mod_base = OTHER; note = 2'-O-methyluridine-3'-phosphate
  modified_base 13: mod_base = OTHER; note = 2'-O-methyladenosine-3'-phosphate
  modified_base 14: mod_base = OTHER; note = 2'-O-methyluridine-3'-phosphate
  modified_base 15: mod_base = OTHER; note = 2'-O-methylguanosine-3'-phosphate
  modified_base 16: mod_base = OTHER; note = 2'-O-methyladenosine-3'-phosphate
  modified_base 17: mod_base = OTHER; note = 2'-O-methyladenosine-3'-phosphate
  modified_base 18: mod_base = OTHER; note = 2'-O-methylcytidine-3'-phosphate
  modified_base 19: mod_base = OTHER; note = 2'-O-methyluridine-3'-phosphorothioate
  modified_base 20: mod_base = OTHER; note = 2'-O-methyladenosine-3'-phosphorothioate
  modified_base 21: mod_base = OTHER; note = 2'-O-methyladenosine-3'-phosphate
actcaacaatttatgaactaa

SEQ ID NO: 3786 - RNA, 21 nt, synthetic construct
  source 1..21: mol_type = other RNA
  modified_base 1: mod_base = OTHER; note = 2'-O-methyladenosine-3'-phosphorothioate
  modified_base 2: mod_base = OTHER; note = 2'-O-methylguanosine-3'-phosphorothioate
  modified_base 3: mod_base = OTHER; note = 2'-O-methyluridine-3'-phosphate
  modified_base 4: mod_base = OTHER; note = 2'-O-methyladenosine-3'-phosphate
  modified_base 5: mod_base = OTHER; note = 2'-O-methyluridine-3'-phosphate
  modified_base 6: mod_base = OTHER; note 2-amino-9-((2R,3S,4S,5R)-3-(docosyloxy)-4-hydroxy-5-(hydrox ymethyl)tetrahydrofuran-2-yl)-1,9-dihydro-6H-purin-6-one
  modified_base 7: mod_base = OTHER; note = 2'-fluoroadenosine-3'-phosphate
  modified_base 8: mod_base = OTHER; note = 2'-O-methylcytidine-3'-phosphate
  modified_base 9: mod_base = OTHER; note = 2'-fluorouridine-3'-phosphate
  modified_base 10: mod_base = OTHER; note = 2'-fluorocytidine-3'-phosphate
  modified_base 11: mod_base = OTHER; note = 2'-fluoroadenosine-3'-phosphate
  modified_base 12: mod_base = OTHER; note = 2'-O-methyluridine-3'-phosphate
  modified_base 13: mod_base = OTHER; note = 2'-O-methyluridine-3'-phosphate
  modified_base 14: mod_base = OTHER; note = 2'-O-methyladenosine-3'-phosphate
  modified_base 15: mod_base = OTHER; note = 2'-O-methyladenosine-3'-phosphate
  modified_base 16: mod_base = OTHER; note = 2'-O-methyluridine-3'-phosphate
  modified_base 17: mod_base = OTHER; note = 2'-O-methyladenosine-3'-phosphate
  modified_base 18: mod_base = OTHER; note = 2'-O-methylguanosine-3'-phosphate
  modified_base 19: mod_base = OTHER; note = 2'-O-methyladenosine-3'-phosphorothioate
  modified_base 20: mod_base = OTHER; note = 2'-O-methyladenosine-3'-phosphorothioate
  modified_base 21: mod_base = OTHER; note = 2'-O-methyladenosine-3'-phosphate
agtatgactcattaatagaaa

SEQ ID NO: 3787 - RNA, 21 nt, synthetic construct
  source 1..21: mol_type = other RNA
  modified_base 1: mod_base = OTHER; note = 2'-O-methylcytidine-3'-phosphorothioate
  modified_base 2: mod_base = OTHER; note = 2'-O-methyluridine-3'-phosphorothioate
  modified_base 3: mod_base = OTHER; note = 2'-O-methylguanosine-3'-phosphate
  modified_base 4: mod_base = OTHER; note = 2'-O-methylcytidine-3'-phosphate
  modified_base 5: mod_base = OTHER; note = 2'-O-methyluridine-3'-phosphate
  modified_base 6: mod_base = OTHER; note 2-amino-9-((2R,3S,4S,5R)-3-(docosyloxy)-4-hydroxy-5-(hydrox ymethyl)tetrahydrofuran-2-yl)-1,9-dihydro-6H-purin-6-one
  modified_base 7: mod_base = OTHER; note = 2'-fluoroadenosine-3'-phosphate
  modified_base 8: mod_base = OTHER; note = 2'-O-methyluridine-3'-phosphate
  modified_base 9: mod_base = OTHER; note = 2'-fluorouridine-3'-phosphate
  modified_base 10: mod_base = OTHER; note = 2'-fluorouridine-3'-phosphate
  modified_base 11: mod_base = OTHER; note = 2'-fluorouridine-3'-phosphate
  modified_base 12: mod_base = OTHER; note = 2'-O-methylcytidine-3'-phosphate
  modified_base 13: mod_base = OTHER; note = 2'-O-methyluridine-3'-phosphate
  modified_base 14: mod_base = OTHER; note = 2'-O-methyluridine-3'-phosphate
  modified_base 15: mod_base = OTHER; note = 2'-O-methyladenosine-3'-phosphate
  modified_base 16: mod_base = OTHER; note = 2'-O-methyladenosine-3'-phosphate
  modified_base 17: mod_base = OTHER; note = 2'-O-methyluridine-3'-phosphate
  modified_base 18: mod_base = OTHER; note = 2'-O-methyladenosine-3'-phosphate
  modified_base 19: mod_base = OTHER; note = 2'-O-methyladenosine-3'-phosphorothioate
  modified_base 20: mod_base = OTHER; note = 2'-O-methylguanosine-3'-phosphorothioate
  modified_base 21: mod_base = OTHER; note = 2'-O-methyladenosine-3'-phosphate
ctgctgattttcttaataaga

SEQ ID NO: 3788 - RNA, 21 nt, synthetic construct
  source 1..21: mol_type = other RNA
  modified_base 1: mod_base = OTHER; note = 2'-O-methyluridine-3'-phosphorothioate
  modified_base 2: mod_base = OTHER; note = 2'-O-methyladenosine-3'-phosphorothioate
  modified_base 3: mod_base = OTHER; note = 2'-O-methyluridine-3'-phosphate
  modified_base 4: mod_base = OTHER; note = 2'-O-methylcytidine-3'-phosphate
  modified_base 5: mod_base = OTHER; note = 2'-O-methyluridine-3'-phosphate
  modified_base 6: mod_base = OTHER; note 1-((2R,3R,4R,5R)-3-(docosyloxy)-4-hydroxy-5-(hydroxymethyl) tetrahydrofuran-2-yl)pyrimidine-2,4(1H,3H)-dione
  modified_base 7: mod_base = OTHER; note = 2'-fluorouridine-3'-phosphate
  modified_base 8: mod_base = OTHER; note = 2'-O-methyladenosine-3'-phosphate
  modified_base 9: mod_base = OTHER; note = 2'-fluoroguanosine-3'-phosphate
  modified_base 10: mod_base = OTHER; note = 2'-fluoroadenosine-3'-phosphate
  modified_base 11: mod_base = OTHER; note = 2'-fluorouridine-3'-phosphate
  modified_base 12: mod_base = OTHER; note = 2'-O-methylcytidine-3'-phosphate
  modified_base 13: mod_base = OTHER; note = 2'-O-methylcytidine-3'-phosphate
  modified_base 14: mod_base = OTHER; note = 2'-O-methyladenosine-3'-phosphate
  modified_base 15: mod_base = OTHER; note = 2'-O-methylcytidine-3'-phosphate
  modified_base 16: mod_base = OTHER; note = 2'-O-methyladenosine-3'-phosphate
  modified_base 17: mod_base = OTHER; note = 2'-O-methyluridine-3'-phosphate
  modified_base 18: mod_base = OTHER; note = 2'-O-methylcytidine-3'-phosphate
  modified_base 19: mod_base = OTHER; note = 2'-O-methyluridine-3'-phosphorothioate
  modified_base 20: mod_base = OTHER; note = 2'-O-methyluridine-3'-phosphorothioate
  modified_base 21: mod_base = OTHER; note = 2'-O-methyladenosine-3'-phosphate
tatctttagatccacatctta

SEQ ID NO: 3789 - RNA, 21 nt, synthetic construct
  source 1..21: mol_type = other RNA
  modified_base 1: mod_base = OTHER; note = 2'-O-methylcytidine-3'-phosphorothioate
  modified_base 2: mod_base = OTHER; note = 2'-O-methylguanosine-3'-phosphorothioate
  modified_base 3: mod_base = OTHER; note = 2'-O-methyladenosine-3'-phosphate
  modified_base 4: mod_base = OTHER; note = 2'-O-methylguanosine-3'-phosphate
  modified_base 5: mod_base = OTHER; note = 2'-O-methyladenosine-3'-phosphate
  modified_base 6: mod_base = OTHER; note 4-amino-1-((2R,3R,4R,5R)-3-(docosyloxy)-4-hydroxy-5-(hydrox ymethyl)tetrahydrofuran-2-yl)pyrimidin-2(1H)-one
  modified_base 7: mod_base = OTHER; note = 2'-fluoroadenosine-3'-phosphate
  modified_base 8: mod_base = OTHER; note = 2'-O-methyluridine-3'-phosphate
  modified_base 9: mod_base = OTHER; note = 2'-fluorouridine-3'-phosphate
  modified_base 10: mod_base = OTHER; note = 2'-fluorocytidine-3'-phosphate
  modified_base 11: mod_base = OTHER; note = 2'-fluorocytidine-3'-phosphate
  modified_base 12: mod_base = OTHER; note = 2'-O-methyluridine-3'-phosphate
  modified_base 13: mod_base = OTHER; note = 2'-O-methyluridine-3'-phosphate
  modified_base 14: mod_base = OTHER; note = 2'-O-methyladenosine-3'-phosphate
  modified_base 15: mod_base = OTHER; note = 2'-O-methyluridine-3'-phosphate
  modified_base 16: mod_base = OTHER; note = 2'-O-methylcytidine-3'-phosphate
  modified_base 17: mod_base = OTHER; note = 2'-O-methyladenosine-3'-phosphate
  modified_base 18: mod_base = OTHER; note = 2'-O-methylcytidine-3'-phosphate
  modified_base 19: mod_base = OTHER; note = 2'-O-methyladenosine-3'-phosphorothioate
  modified_base 20: mod_base = OTHER; note = 2'-O-methyladenosine-3'-phosphorothioate
  modified_base 21: mod_base = OTHER; note = 2'-O-methyladenosine-3'-phosphate
cgagacattccttatcacaaa

SEQ ID NO: 3790 - RNA, 21 nt, synthetic construct
  source 1..21: mol_type = other RNA
  modified_base 1: mod_base = OTHER; note = 2'-O-methyluridine-3'-phosphorothioate
  modified_base 2: mod_base = OTHER; note = 2'-O-methyladenosine-3'-phosphorothioate
  modified_base 3: mod_base = OTHER; note = 2'-O-methylcytidine-3'-phosphate
  modified_base 4: mod_base = OTHER; note = 2'-O-methyluridine-3'-phosphate
  modified_base 5: mod_base = OTHER; note = 2'-O-methylguanosine-3'-phosphate
  modified_base 6: mod_base = OTHER; note (2R,3S,4S,5R)-5-(6-amino-9H-purin-9-yl)-4-(docosyloxy)-2-(h ydroxymethyl)tetrahydrofuran-3-ol
  modified_base 7: mod_base = OTHER; note = 2'-fluoroadenosine-3'-phosphate
  modified_base 8: mod_base = OTHER; note = 2'-O-methyluridine-3'-phosphate
  modified_base 9: mod_base = OTHER; note = 2'-fluorocytidine-3'-phosphate
  modified_base 10: mod_base = OTHER; note = 2'-fluoroadenosine-3'-phosphate
  modified_base 11: mod_base = OTHER; note = 2'-fluoroguanosine-3'-phosphate
  modified_base 12: mod_base = OTHER; note = 2'-O-methyladenosine-3'-phosphate
  modified_base 13: mod_base = OTHER; note = 2'-O-methyluridine-3'-phosphate
  modified_base 14: mod_base = OTHER; note = 2'-O-methyluridine-3'-phosphate
  modified_base 15: mod_base = OTHER; note = 2'-O-methyladenosine-3'-phosphate
  modified_base 16: mod_base = OTHER; note = 2'-O-methyladenosine-3'-phosphate
  modified_base 17: mod_base = OTHER; note = 2'-O-methyluridine-3'-phosphate
  modified_base 18: mod_base = OTHER; note = 2'-O-methyluridine-3'-phosphate
  modified_base 19: mod_base = OTHER; note = 2'-O-methyluridine-3'-phosphorothioate
  modified_base 20: mod_base = OTHER; note = 2'-O-methylcytidine-3'-phosphorothioate
  modified_base 21: mod_base = OTHER; note = 2'-O-methyladenosine-3'-phosphate
tactgaatcagattaatttca

SEQ ID NO: 3791 - RNA, 21 nt, synthetic construct
  source 1..21: mol_type = other RNA
  modified_base 1: mod_base = OTHER; note = 2'-O-methylcytidine-3'-phosphorothioate
  modified_base 2: mod_base = OTHER; note = 2'-O-methyluridine-3'-phosphorothioate
  modified_base 3: mod_base = OTHER; note = 2'-O-methyluridine-3'-phosphate
  modified_base 4: mod_base = OTHER; note = 2'-O-methyladenosine-3'-phosphate
  modified_base 5: mod_base = OTHER; note = 2'-O-methylcytidine-3'-phosphate
  modified_base 6: mod_base = OTHER; note 1-((2R,3R,4R,5R)-3-(docosyloxy)-4-hydroxy-5-(hydroxymethyl) tetrahydrofuran-2-yl)pyrimidine-2,4(1H,3H)-dione
  modified_base 7: mod_base = OTHER; note = 2'-fluorouridine-3'-phosphate
  modified_base 8: mod_base = OTHER; note = 2'-O-methyladenosine-3'-phosphate
  modified_base 9: mod_base = OTHER; note = 2'-fluoroadenosine-3'-phosphate
  modified_base 10: mod_base = OTHER; note = 2'-fluoroadenosine-3'-phosphate
  modified_base 11: mod_base = OTHER; note = 2'-fluorouridine-3'-phosphate
  modified_base 12: mod_base = OTHER; note = 2'-O-methylcytidine-3'-phosphate
  modified_base 13: mod_base = OTHER; note = 2'-O-methylcytidine-3'-phosphate
  modified_base 14: mod_base = OTHER; note = 2'-O-methyluridine-3'-phosphate
  modified_base 15: mod_base = OTHER; note = 2'-O-methyluridine-3'-phosphate
  modified_base 16: mod_base = OTHER; note = 2'-O-methylcytidine-3'-phosphate
  modified_base 17: mod_base = OTHER; note = 2'-O-methyladenosine-3'-phosphate
  modified_base 18: mod_base = OTHER; note = 2'-O-methylcytidine-3'-phosphate
  modified_base 19: mod_base = OTHER; note = 2'-O-methyluridine-3'-phosphorothioate
  modified_base 20: mod_base = OTHER; note = 2'-O-methylguanosine-3'-phosphorothioate
  modified_base 21: mod_base = OTHER; note = 2'-O-methyladenosine-3'-phosphate
cttacttaaatccttcactga

SEQ ID NO: 3792 - RNA, 21 nt, synthetic construct
  source 1..21: mol_type = other RNA
  modified_base 1: mod_base = OTHER; note = 2'-O-methyluridine-3'-phosphorothioate
  modified_base 2: mod_base = OTHER; note = 2'-O-methylcytidine-3'-phosphorothioate
  modified_base 3: mod_base = OTHER; note = 2'-O-methylguanosine-3'-phosphate
  modified_base 4: mod_base = OTHER; note = 2'-O-methyladenosine-3'-phosphate
  modified_base 5: mod_base = OTHER; note = 2'-O-methyladenosine-3'-phosphate
  modified_base 6: mod_base = OTHER; note (2R,3S,4S,5R)-5-(6-amino-9H-purin-9-yl)-4-(docosyloxy)-2-(h ydroxymethyl)tetrahydrofuran-3-ol
  modified_base 7: mod_base = OTHER; note = 2'-fluoroguanosine-3'-phosphate
  modified_base 8: mod_base = OTHER; note = 2'-O-methyladenosine-3'-phosphate
  modified_base 9: mod_base = OTHER; note = 2'-fluoroadenosine-3'-phosphate
  modified_base 10: mod_base = OTHER; note = 2'-fluorouridine-3'-phosphate
  modified_base 11: mod_base = OTHER; note = 2'-fluorocytidine-3'-phosphate
  modified_base 12: mod_base = OTHER; note = 2'-O-methyladenosine-3'-phosphate
  modified_base 13: mod_base = OTHER; note = 2'-O-methyluridine-3'-phosphate
  modified_base 14: mod_base = OTHER; note = 2'-O-methyluridine-3'-phosphate
  modified_base 15: mod_base = OTHER; note = 2'-O-methylcytidine-3'-phosphate
  modified_base 16: mod_base = OTHER; note = 2'-O-methyladenosine-3'-phosphate
  modified_base 17: mod_base = OTHER; note = 2'-O-methyladenosine-3'-phosphate
  modified_base 18: mod_base = OTHER; note = 2'-O-methyladenosine-3'-phosphate
  modified_base 19: mod_base = OTHER; note = 2'-O-methylcytidine-3'-phosphorothioate
  modified_base 20: mod_base = OTHER; note = 2'-O-methyluridine-3'-phosphorothioate
  modified_base 21: mod_base = OTHER; note = 2'-O-methyladenosine-3'-phosphate
tcgaaagaatcattcaaacta

SEQ ID NO: 3793 - RNA, 21 nt, synthetic construct
  source 1..21: mol_type = other RNA
  modified_base 1: mod_base = OTHER; note = 2'-O-methyladenosine-3'-phosphorothioate
  modified_base 2: mod_base = OTHER; note = 2'-O-methyladenosine-3'-phosphorothioate
  modified_base 3: mod_base = OTHER; note = 2'-O-methyladenosine-3'-phosphate
  modified_base 4: mod_base = OTHER; note = 2'-O-methyluridine-3'-phosphate
  modified_base 5: mod_base = OTHER; note = 2'-O-methylguanosine-3'-phosphate
  modified_base 6: mod_base = OTHER; note (2R,3S,4S,5R)-5-(6-amino-9H-purin-9-yl)-4-(docosyloxy)-2-(h ydroxymethyl)tetrahydrofuran-3-ol
  modified_base 7: mod_base = OTHER; note = 2'-fluorocytidine-3'-phosphate
  modified_base 8: mod_base = OTHER; note = 2'-O-methylcytidine-3'-phosphate
  modified_base 9: mod_base = OTHER; note = 2'-fluorouridine-3'-phosphate
  modified_base 10: mod_base = OTHER; note = 2'-fluoroadenosine-3'-phosphate
  modified_base 11: mod_base = OTHER; note = 2'-fluorouridine-3'-phosphate
  modified_base 12: mod_base = OTHER; note = 2'-O-methylcytidine-3'-phosphate
  modified_base 13: mod_base = OTHER; note = 2'-O-methyladenosine-3'-phosphate
  modified_base 14: mod_base = OTHER; note = 2'-O-methylcytidine-3'-phosphate
  modified_base 15: mod_base = OTHER; note = 2'-O-methyluridine-3'-phosphate
  modified_base 16: mod_base = OTHER; note = 2'-O-methyladenosine-3'-phosphate
  modified_base 17: mod_base = OTHER; note = 2'-O-methylcytidine-3'-phosphate
  modified_base 18: mod_base = OTHER; note = 2'-O-methyluridine-3'-phosphate
  modified_base 19: mod_base = OTHER; note = 2'-O-methyluridine-3'-phosphorothioate
  modified_base 20: mod_base = OTHER; note = 2'-O-methyladenosine-3'-phosphorothioate
  modified_base 21: mod_base = OTHER; note = 2'-O-methyladenosine-3'-phosphate
aaatgacctatcactacttaa

SEQ ID NO: 3794 - RNA, 21 nt, synthetic construct
  source 1..21: mol_type = other RNA
  modified_base 1: mod_base = OTHER; note = 2'-O-methylcytidine-3'-phosphorothioate
  modified_base 2: mod_base = OTHER; note = 2'-O-methyladenosine-3'-phosphorothioate
  modified_base 3: mod_base = OTHER; note = 2'-O-methyladenosine-3'-phosphate
  modified_base 4: mod_base = OTHER; note = 2'-O-methylguanosine-3'-phosphate
  modified_base 5: mod_base = OTHER; note = 2'-O-methyluridine-3'-phosphate
  modified_base 6: mod_base = OTHER; note 4-amino-1-((2R,3R,4R,5R)-3-(docosyloxy)-4-hydroxy-5-(hydrox ymethyl)tetrahydrofuran-2-yl)pyrimidin-2(1H)-one
  modified_base 7: mod_base = OTHER; note = 2'-fluoroadenosine-3'-phosphate
  modified_base 8: mod_base = OTHER; note = 2'-O-methyluridine-3'-phosphate
  modified_base 9: mod_base = OTHER; note = 2'-fluorouridine-3'-phosphate
  modified_base 10: mod_base = OTHER; note = 2'-fluorouridine-3'-phosphate
  modified_base 11: mod_base = OTHER; note = 2'-fluorocytidine-3'-phosphate
  modified_base 12: mod_base = OTHER; note = 2'-O-methylcytidine-3'-phosphate
  modified_base 13: mod_base = OTHER; note = 2'-O-methyluridine-3'-phosphate
  modified_base 14: mod_base = OTHER; note = 2'-O-methylcytidine-3'-phosphate
  modified_base 15: mod_base = OTHER; note = 2'-O-methyluridine-3'-phosphate
  modified_base 16: mod_base = OTHER; note = 2'-O-methylcytidine-3'-phosphate
  modified_base 17: mod_base = OTHER; note = 2'-O-methyluridine-3'-phosphate
  modified_base 18: mod_base = OTHER; note = 2'-O-methyladenosine-3'-phosphate
  modified_base 19: mod_base = OTHER; note = 2'-O-methylcytidine-3'-phosphorothioate
  modified_base 20: mod_base = OTHER; note = 2'-O-methylguanosine-3'-phosphorothioate
  modified_base 21: mod_base = OTHER; note = 2'-O-methyladenosine-3'-phosphate
caagtcatttcctctctacga

SEQ ID NO: 3795 - RNA, 21 nt, synthetic construct
  source 1..21: mol_type = other RNA
  modified_base 1: mod_base = OTHER; note = 2'-O-methyladenosine-3'-phosphorothioate
  modified_base 2: mod_base = OTHER; note = 2'-O-methyluridine-3'-phosphorothioate
  modified_base 3: mod_base = OTHER; note = 2'-O-methylguanosine-3'-phosphate
  modified_base 4: mod_base = OTHER; note = 2'-O-methylcytidine-3'-phosphate
  modified_base 5: mod_base = OTHER; note = 2'-O-methyladenosine-3'-phosphate
  modified_base 6: mod_base = OTHER; note 2-amino-9-((2R,3S,4S,5R)-3-(docosyloxy)-4-hydroxy-5-(hydrox ymethyl)tetrahydrofuran-2-yl)-1,9-dihydro-6H-purin-6-one
  modified_base 7: mod_base = OTHER; note = 2'-fluorouridine-3'-phosphate
  modified_base 8: mod_base = OTHER; note = 2'-O-methyluridine-3'-phosphate
  modified_base 9: mod_base = OTHER; note = 2'-fluorouridine-3'-phosphate
  modified_base 10: mod_base = OTHER; note = 2'-fluorocytidine-3'-phosphate
  modified_base 11: mod_base = OTHER; note = 2'-fluorouridine-3'-phosphate
  modified_base 12: mod_base = OTHER; note = 2'-O-methyluridine-3'-phosphate
  modified_base 13: mod_base = OTHER; note = 2'-O-methyladenosine-3'-phosphate
  modified_base 14: mod_base = OTHER; note = 2'-O-methylcytidine-3'-phosphate
  modified_base 15: mod_base = OTHER; note = 2'-O-methyluridine-3'-phosphate
  modified_base 16: mod_base = OTHER; note = 2'-O-methyluridine-3'-phosphate
  modified_base 17: mod_base = OTHER; note = 2'-O-methyladenosine-3'-phosphate
  modified_base 18: mod_base = OTHER; note = 2'-O-methyluridine-3'-phosphate
  modified_base 19: mod_base = OTHER; note = 2'-O-methylcytidine-3'-phosphorothioate
  modified_base 20: mod_base = OTHER; note = 2'-O-methyluridine-3'-phosphorothioate
  modified_base 21: mod_base = OTHER; note = 2'-O-methyladenosine-3'-phosphate
atgcagtttcttacttatcta

SEQ ID NO: 3796 - RNA, 21 nt, synthetic construct
  source 1..21: mol_type = other RNA
  modified_base 1: mod_base = OTHER; note = 2'-O-methyluridine-3'-phosphorothioate
  modified_base 2: mod_base = OTHER; note = 2'-O-methylcytidine-3'-phosphorothioate
  modified_base 3: mod_base = OTHER; note = 2'-O-methyladenosine-3'-phosphate
  modified_base 4: mod_base = OTHER; note = 2'-O-methyladenosine-3'-phosphate
  modified_base 5: mod_base = OTHER; note = 2'-O-methyluridine-3'-phosphate
  modified_base 6: mod_base = OTHER; note 2-amino-9-((2R,3S,4S,5R)-3-(docosyloxy)-4-hydroxy-5-(hydrox ymethyl)tetrahydrofuran-2-yl)-1,9-dihydro-6H-purin-6-one
  modified_base 7: mod_base = OTHER; note = 2'-fluorocytidine-3'-phosphate
  modified_base 8: mod_base = OTHER; note = 2'-O-methyladenosine-3'-phosphate
  modified_base 9: mod_base = OTHER; note = 2'-fluoroadenosine-3'-phosphate
  modified_base 10: mod_base = OTHER; note = 2'-fluorouridine-3'-phosphate
  modified_base 11: mod_base = OTHER; note = 2'-fluoroadenosine-3'-phosphate
  modified_base 12: mod_base = OTHER; note = 2'-O-methylcytidine-3'-phosphate
  modified_base 13: mod_base = OTHER; note = 2'-O-methyladenosine-3'-phosphate
  modified_base 14: mod_base = OTHER; note = 2'-O-methylcytidine-3'-phosphate
  modified_base 15: mod_base = OTHER; note = 2'-O-methyluridine-3'-phosphate
  modified_base 16: mod_base = OTHER; note = 2'-O-methylguanosine-3'-phosphate
  modified_base 17: mod_base = OTHER; note = 2'-O-methyluridine-3'-phosphate
  modified_base 18: mod_base = OTHER; note = 2'-O-methyluridine-3'-phosphate
  modified_base 19: mod_base = OTHER; note = 2'-O-methylcytidine-3'-phosphorothioate
  modified_base 20: mod_base = OTHER; note = 2'-O-methyladenosine-3'-phosphorothioate
  modified_base 21: mod_base = OTHER; note = 2'-O-methyladenosine-3'-phosphate
tcaatgcaatacactgttcaa

SEQ ID NO: 3797 - RNA, 21 nt, synthetic construct
  source 1..21: mol_type = other RNA
  modified_base 1: mod_base = OTHER; note = 2'-O-methyluridine-3'-phosphorothioate
  modified_base 2: mod_base = OTHER; note = 2'-O-methylcytidine-3'-phosphorothioate
  modified_base 3: mod_base = OTHER; note = 2'-O-methyluridine-3'-phosphate
  modified_base 4: mod_base = OTHER; note = 2'-O-methyladenosine-3'-phosphate
  modified_base 5: mod_base = OTHER; note = 2'-O-methyluridine-3'-phosphate
  modified_base 6: mod_base = OTHER; note 2-amino-9-((2R,3S,4S,5R)-3-(docosyloxy)-4-hydroxy-5-(hydrox ymethyl)tetrahydrofuran-2-yl)-1,9-dihydro-6H-purin-6-one
  modified_base 7: mod_base = OTHER; note = 2'-fluorouridine-3'-phosphate
  modified_base 8: mod_base = OTHER; note = 2'-O-methyladenosine-3'-phosphate
  modified_base 9: mod_base = OTHER; note = 2'-fluorocytidine-3'-phosphate
  modified_base 10: mod_base = OTHER; note = 2'-fluorocytidine-3'-phosphate
  modified_base 11: mod_base = OTHER; note = 2'-fluorouridine-3'-phosphate
  modified_base 12: mod_base = OTHER; note = 2'-O-methyladenosine-3'-phosphate
  modified_base 13: mod_base = OTHER; note = 2'-O-methylcytidine-3'-phosphate
  modified_base 14: mod_base = OTHER; note = 2'-O-methyluridine-3'-phosphate
  modified_base 15: mod_base = OTHER; note = 2'-O-methylguanosine-3'-phosphate
  modified_base 16: mod_base = OTHER; note = 2'-O-methyladenosine-3'-phosphate
  modified_base 17: mod_base = OTHER; note = 2'-O-methylcytidine-3'-phosphate
  modified_base 18: mod_base = OTHER; note = 2'-O-methyladenosine-3'-phosphate
  modified_base 19: mod_base = OTHER; note = 2'-O-methylcytidine-3'-phosphorothioate
  modified_base 20: mod_base = OTHER; note = 2'-O-methyladenosine-3'-phosphorothioate
  modified_base 21: mod_base = OTHER; note = 2'-O-methyladenosine-3'-phosphate
tctatgtacctactgacacaa

SEQ ID NO: 3798 - RNA, 21 nt, synthetic construct
  source 1..21: mol_type = other RNA
  modified_base 1: mod_base = OTHER; note = 2'-O-methyluridine-3'-phosphorothioate
  modified_base 2: mod_base = OTHER; note = 2'-O-methylguanosine-3'-phosphorothioate
  modified_base 3: mod_base = OTHER; note = 2'-O-methyladenosine-3'-phosphate
  modified_base 4: mod_base = OTHER; note = 2'-O-methyladenosine-3'-phosphate
  modified_base 5: mod_base = OTHER; note = 2'-O-methyluridine-3'-phosphate
  modified_base 6: mod_base = OTHER; note 1-((2R,3R,4R,5R)-3-(docosyloxy)-4-hydroxy-5-(hydroxymethyl) tetrahydrofuran-2-yl)pyrimidine-2,4(1H,3H)-dione
  modified_base 7: mod_base = OTHER; note = 2'-fluorocytidine-3'-phosphate
  modified_base 8: mod_base = OTHER; note = 2'-O-methylcytidine-3'-phosphate
  modified_base 9: mod_base = OTHER; note = 2'-fluoroadenosine-3'-phosphate
  modified_base 10: mod_base = OTHER; note = 2'-fluoroguanosine-3'-phosphate
  modified_base 11: mod_base = OTHER; note = 2'-fluorouridine-3'-phosphate
  modified_base 12: mod_base = OTHER; note = 2'-O-methylcytidine-3'-phosphate
  modified_base 13: mod_base = OTHER; note = 2'-O-methyluridine-3'-phosphate
  modified_base 14: mod_base = OTHER; note = 2'-O-methyluridine-3'-phosphate
  modified_base 15: mod_base = OTHER; note = 2'-O-methyladenosine-3'-phosphate
  modified_base 16: mod_base = OTHER; note = 2'-O-methyluridine-3'-phosphate
  modified_base 17: mod_base = OTHER; note = 2'-O-methylcytidine-3'-phosphate
  modified_base 18: mod_base = OTHER; note = 2'-O-methyluridine-3'-phosphate
  modified_base 19: mod_base = OTHER; note = 2'-O-methyluridine-3'-phosphorothioate
  modified_base 20: mod_base = OTHER; note = 2'-O-methyladenosine-3'-phosphorothioate
  modified_base 21: mod_base = OTHER; note = 2'-O-methyladenosine-3'-phosphate
tgaattccagtcttatcttaa

SEQ ID NO: 3799 - RNA, 21 nt, synthetic construct
  source 1..21: mol_type = other RNA
  modified_base 1: mod_base = OTHER; note = 2'-O-methyluridine-3'-phosphorothioate
  modified_base 2: mod_base = OTHER; note = 2'-O-methyluridine-3'-phosphorothioate
  modified_base 3: mod_base = OTHER; note = 2'-O-methylguanosine-3'-phosphate
  modified_base 4: mod_base = OTHER; note = 2'-O-methylcytidine-3'-phosphate
  modified_base 5: mod_base = OTHER; note = 2'-O-methyluridine-3'-phosphate
  modified_base 6: mod_base = OTHER; note 2-amino-9-((2R,3S,4S,5R)-3-(docosyloxy)-4-hydroxy-5-(hydrox ymethyl)tetrahydrofuran-2-yl)-1,9-dihydro-6H-purin-6-one
  modified_base 7: mod_base = OTHER; note = 2'-fluorouridine-3'-phosphate
  modified_base 8: mod_base = OTHER; note = 2'-O-methyladenosine-3'-phosphate
  modified_base 9: mod_base = OTHER; note = 2'-fluoroadenosine-3'-phosphate
  modified_base 10: mod_base = OTHER; note = 2'-fluorouridine-3'-phosphate
  modified_base 11: mod_base = OTHER; note = 2'-fluoroadenosine-3'-phosphate
  modified_base 12: mod_base = OTHER; note = 2'-O-methylcytidine-3'-phosphate
  modified_base 13: mod_base = OTHER; note = 2'-O-methylcytidine-3'-phosphate
  modified_base 14: mod_base = OTHER; note = 2'-O-methyladenosine-3'-phosphate
  modified_base 15: mod_base = OTHER; note = 2'-O-methyladenosine-3'-phosphate
  modified_base 16: mod_base = OTHER; note = 2'-O-methyladenosine-3'-phosphate
  modified_base 17: mod_base = OTHER; note = 2'-O-methyladenosine-3'-phosphate
  modified_base 18: mod_base = OTHER; note = 2'-O-methylcytidine-3'-phosphate
  modified_base 19: mod_base = OTHER; note = 2'-O-methyluridine-3'-phosphorothioate
  modified_base 20: mod_base = OTHER; note = 2'-O-methyladenosine-3'-phosphorothioate
  modified_base 21: mod_base = OTHER; note = 2'-O-methyladenosine-3'-phosphate
ttgctgtaataccaaaactaa

SEQ ID NO: 3800 - RNA, 21 nt, synthetic construct
  source 1..21: mol_type = other RNA
  modified_base 1: mod_base = OTHER; note = 2'-O-methylguanosine-3'-phosphorothioate
  modified_base 2: mod_base = OTHER; note = 2'-O-methylguanosine-3'-phosphorothioate
  modified_base 3: mod_base = OTHER; note = 2'-O-methyladenosine-3'-phosphate
  modified_base 4: mod_base = OTHER; note = 2'-O-methyluridine-3'-phosphate
  modified_base 5: mod_base = OTHER; note = 2'-O-methylcytidine-3'-phosphate
  modified_base 6: mod_base = OTHER; note (2R,3S,4S,5R)-5-(6-amino-9H-purin-9-yl)-4-(docosyloxy)-2-(h ydroxymethyl)tetrahydrofuran-3-ol
  modified_base 7: mod_base = OTHER; note = 2'-fluorocytidine-3'-phosphate
  modified_base 8: mod_base = OTHER; note = 2'-O-methyluridine-3'-phosphate
  modified_base 9: mod_base = OTHER; note = 2'-fluorouridine-3'-phosphate
  modified_base 10: mod_base = OTHER; note = 2'-fluorocytidine-3'-phosphate
  modified_base 11: mod_base = OTHER; note = 2'-fluorouridine-3'-phosphate
  modified_base 12: mod_base = OTHER; note = 2'-O-methyluridine-3'-phosphate
  modified_base 13: mod_base = OTHER; note = 2'-O-methyluridine-3'-phosphate
  modified_base 14: mod_base = OTHER; note = 2'-O-methylcytidine-3'-phosphate
  modified_base 15: mod_base = OTHER; note = 2'-O-methyladenosine-3'-phosphate
  modified_base 16: mod_base = OTHER; note = 2'-O-methyladenosine-3'-phosphate
  modified_base 17: mod_base = OTHER; note = 2'-O-methyladenosine-3'-phosphate
  modified_base 18: mod_base = OTHER; note = 2'-O-methyluridine-3'-phosphate
  modified_base 19: mod_base = OTHER; note = 2'-O-methylcytidine-3'-phosphorothioate
  modified_base 20: mod_base = OTHER; note = 2'-O-methyladenosine-3'-phosphorothioate
  modified_base 21: mod_base = OTHER; note = 2'-O-methyladenosine-3'-phosphate
ggatcacttctttcaaatcaa

SEQ ID NO: 3801 - RNA, 21 nt, synthetic construct
  source 1..21: mol_type = other RNA
  modified_base 1: mod_base = OTHER; note = 2'-O-methylguanosine-3'-phosphorothioate
  modified_base 2: mod_base = OTHER; note = 2'-O-methyladenosine-3'-phosphorothioate
  modified_base 3: mod_base = OTHER; note = 2'-O-methyladenosine-3'-phosphate
  modified_base 4: mod_base = OTHER; note = 2'-O-methylcytidine-3'-phosphate
  modified_base 5: mod_base = OTHER; note = 2'-O-methyluridine-3'-phosphate
  modified_base 6: mod_base = OTHER; note (2R,3S,4S,5R)-5-(6-amino-9H-purin-9-yl)-4-(docosyloxy)-2-(h ydroxymethyl)tetrahydrofuran-3-ol
  modified_base 7: mod_base = OTHER; note = 2'-fluoroguanosine-3'-phosphate
  modified_base 8: mod_base = OTHER; note = 2'-O-methyladenosine-3'-phosphate
  modified_base 9: mod_base = OTHER; note = 2'-fluoroadenosine-3'-phosphate
  modified_base 10: mod_base = OTHER; note = 2'-fluoroadenosine-3'-phosphate
  modified_base 11: mod_base = OTHER; note = 2'-fluoroadenosine-3'-phosphate
  modified_base 12: mod_base = OTHER; note = 2'-O-methylcytidine-3'-phosphate
  modified_base 13: mod_base = OTHER; note = 2'-O-methyluridine-3'-phosphate
  modified_base 14: mod_base = OTHER; note = 2'-O-methyladenosine-3'-phosphate
  modified_base 15: mod_base = OTHER; note = 2'-O-methyluridine-3'-phosphate
  modified_base 16: mod_base = OTHER; note = 2'-O-methyluridine-3'-phosphate
  modified_base 17: mod_base = OTHER; note = 2'-O-methylcytidine-3'-phosphate
  modified_base 18: mod_base = OTHER; note = 2'-O-methyluridine-3'-phosphate
  modified_base 19: mod_base = OTHER; note = 2'-O-methyluridine-3'-phosphorothioate
  modified_base 20: mod_base = OTHER; note = 2'-O-methyladenosine-3'-phosphorothioate
  modified_base 21: mod_base = OTHER; note = 2'-O-methyladenosine-3'-phosphate
gaactagaaaactattcttaa

SEQ ID NO: 3802 - RNA, 21 nt, synthetic construct
  source 1..21: mol_type = other RNA
  modified_base 1: mod_base = OTHER; note = 2'-O-methyladenosine-3'-phosphorothioate
  modified_base 2: mod_base = OTHER; note = 2'-O-methylcytidine-3'-phosphorothioate
  modified_base 3: mod_base = OTHER; note = 2'-O-methyladenosine-3'-phosphate
  modified_base 4: mod_base = OTHER; note = 2'-O-methyluridine-3'-phosphate
  modified_base 5: mod_base = OTHER; note = 2'-O-methyluridine-3'-phosphate
  modified_base 6: mod_base = OTHER; note 1-((2R,3R,4R,5R)-3-(docosyloxy)-4-hydroxy-5-(hydroxymethyl) tetrahydrofuran-2-yl)pyrimidine-2,4(1H,3H)-dione
  modified_base 7: mod_base = OTHER; note = 2'-fluorocytidine-3'-phosphate
  modified_base 8: mod_base = OTHER; note = 2'-O-methylcytidine-3'-phosphate
  modified_base 9: mod_base = OTHER; note = 2'-fluoroadenosine-3'-phosphate
  modified_base 10: mod_base = OTHER; note = 2'-fluorouridine-3'-phosphate
  modified_base 11: mod_base = OTHER; note = 2'-fluoroadenosine-3'-phosphate
  modified_base 12: mod_base = OTHER; note = 2'-O-methylcytidine-3'-phosphate
  modified_base 13: mod_base = OTHER; note = 2'-O-methyluridine-3'-phosphate
  modified_base 14: mod_base = OTHER; note = 2'-O-methylguanosine-3'-phosphate
  modified_base 15: mod_base = OTHER; note = 2'-O-methyluridine-3'-phosphate
  modified_base 16: mod_base = OTHER; note = 2'-O-methylcytidine-3'-phosphate
  modified_base 17: mod_base = OTHER; note = 2'-O-methyluridine-3'-phosphate
  modified_base 18: mod_base = OTHER; note = 2'-O-methylguanosine-3'-phosphate
  modified_base 19: mod_base = OTHER; note = 2'-O-methyluridine-3'-phosphorothioate
  modified_base 20: mod_base = OTHER; note = 2'-O-methyluridine-3'-phosphorothioate
  modified_base 21: mod_base = OTHER; note = 2'-O-methyladenosine-3'-phosphate
acatttccatactgtctgtta

SEQ ID NO: 3803 - RNA, 21 nt, synthetic construct
  source 1..21: mol_type = other RNA
  modified_base 1: mod_base = OTHER; note = 2'-O-methyluridine-3'-phosphorothioate
  modified_base 2: mod_base = OTHER; note = 2'-O-methylguanosine-3'-phosphorothioate
  modified_base 3: mod_base = OTHER; note = 2'-O-methyladenosine-3'-phosphate
  modified_base 4: mod_base = OTHER; note = 2'-O-methyluridine-3'-phosphate
  modified_base 5: mod_base = OTHER; note = 2'-O-methylcytidine-3'-phosphate
  modified_base 6: mod_base = OTHER; note 4-amino-1-((2R,3R,4R,5R)-3-(docosyloxy)-4-hydroxy-5-(hydrox ymethyl)tetrahydrofuran-2-yl)pyrimidin-2(1H)-one
  modified_base 7: mod_base = OTHER; note = 2'-fluorouridine-3'-phosphate
  modified_base 8: mod_base = OTHER; note = 2'-O-methyluridine-3'-phosphate
  modified_base 9: mod_base = OTHER; note = 2'-fluorocytidine-3'-phosphate
  modified_base 10: mod_base = OTHER; note = 2'-fluoroadenosine-3'-phosphate
  modified_base 11: mod_base = OTHER; note = 2'-fluorocytidine-3'-phosphate
  modified_base 12: mod_base = OTHER; note = 2'-O-methyladenosine-3'-phosphate
  modified_base 13: mod_base = OTHER; note = 2'-O-methylguanosine-3'-phosphate
  modified_base 14: mod_base = OTHER; note = 2'-O-methyluridine-3'-phosphate
  modified_base 15: mod_base = OTHER; note = 2'-O-methylguanosine-3'-phosphate
  modified_base 16: mod_base = OTHER; note = 2'-O-methyluridine-3'-phosphate
  modified_base 17: mod_base = OTHER; note = 2'-O-methylcytidine-3'-phosphate
  modified_base 18: mod_base = OTHER; note = 2'-O-methyladenosine-3'-phosphate
  modified_base 19: mod_base = OTHER; note = 2'-O-methyladenosine-3'-phosphorothioate
  modified_base 20: mod_base = OTHER; note = 2'-O-methyluridine-3'-phosphorothioate
  modified_base 21: mod_base = OTHER; note = 2'-O-methyladenosine-3'-phosphate
tgatccttcacagtgtcaata

SEQ ID NO: 3804 - RNA, 21 nt, synthetic construct
  source 1..21: mol_type = other RNA
  modified_base 1: mod_base = OTHER; note = 2'-O-methylguanosine-3'-phosphorothioate
  modified_base 2: mod_base = OTHER; note = 2'-O-methyladenosine-3'-phosphorothioate
  modified_base 3: mod_base = OTHER; note = 2'-O-methyluridine-3'-phosphate
  modified_base 4: mod_base = OTHER; note = 2'-O-methyluridine-3'-phosphate
  modified_base 5: mod_base = OTHER; note = 2'-O-methyluridine-3'-phosphate
  modified_base 6: mod_base = OTHER; note 4-amino-1-((2R,3R,4R,5R)-3-(docosyloxy)-4-hydroxy-5-(hydrox ymethyl)tetrahydrofuran-2-yl)pyrimidin-2(1H)-one
  modified_base 7: mod_base = OTHER; note = 2'-fluorouridine-3'-phosphate
  modified_base 8: mod_base = OTHER; note = 2'-O-methylguanosine-3'-phosphate
  modified_base 9: mod_base = OTHER; note = 2'-fluoroadenosine-3'-phosphate
  modified_base 10: mod_base = OTHER; note = 2'-fluoroguanosine-3'-phosphate
  modified_base 11: mod_base = OTHER; note = 2'-fluoroadenosine-3'-phosphate
  modified_base 12: mod_base = OTHER; note = 2'-O-methyladenosine-3'-phosphate
  modified_base 13: mod_base = OTHER; note = 2'-O-methylcytidine-3'-phosphate
  modified_base 14: mod_base = OTHER; note = 2'-O-methyladenosine-3'-phosphate
  modified_base 15: mod_base = OTHER; note = 2'-O-methyladenosine-3'-phosphate
  modified_base 16: mod_base = OTHER; note = 2'-O-methylguanosine-3'-phosphate
  modified_base 17: mod_base = OTHER; note = 2'-O-methyluridine-3'-phosphate
  modified_base 18: mod_base = OTHER; note = 2'-O-methyladenosine-3'-phosphate
  modified_base 19: mod_base = OTHER; note = 2'-O-methyladenosine-3'-phosphorothioate
  modified_base 20: mod_base = OTHER; note = 2'-O-methyladenosine-3'-phosphorothioate
  modified_base 21: mod_base = OTHER; note = 2'-O-methyladenosine-3'-phosphate
gatttctgagaacaagtaaaa

SEQ ID NO: 3805 - RNA, 21 nt, synthetic construct
  source 1..21: mol_type = other RNA
  modified_base 1: mod_base = OTHER; note = 2'-O-methylcytidine-3'-phosphorothioate
  modified_base 2: mod_base = OTHER; note = 2'-O-methylcytidine-3'-phosphorothioate
  modified_base 3: mod_base = OTHER; note = 2'-O-methyluridine-3'-phosphate
  modified_base 4: mod_base = OTHER; note = 2'-O-methyladenosine-3'-phosphate
  modified_base 5: mod_base = OTHER; note = 2'-O-methylcytidine-3'-phosphate
  modified_base 6: mod_base = OTHER; note 1-((2R,3R,4R,5R)-3-(docosyloxy)-4-hydroxy-5-(hydroxymethyl) tetrahydrofuran-2-yl)pyrimidine-2,4(1H,3H)-dione
  modified_base 7: mod_base = OTHER; note = 2'-fluorouridine-3'-phosphate
  modified_base 8: mod_base = OTHER; note = 2'-O-methylguanosine-3'-phosphate
  modified_base 9: mod_base = OTHER; note = 2'-fluorouridine-3'-phosphate
  modified_base 10: mod_base = OTHER; note = 2'-fluoroguanosine-3'-phosphate
  modified_base 11: mod_base = OTHER; note = 2'-fluoroadenosine-3'-phosphate
  modified_base 12: mod_base = OTHER; note = 2'-O-methyladenosine-3'-phosphate
  modified_base 13: mod_base = OTHER; note = 2'-O-methyladenosine-3'-phosphate
  modified_base 14: mod_base = OTHER; note = 2'-O-methyluridine-3'-phosphate
  modified_base 15: mod_base = OTHER; note = 2'-O-methyladenosine-3'-phosphate
  modified_base 16: mod_base = OTHER; note = 2'-O-methylcytidine-3'-phosphate
  modified_base 17: mod_base = OTHER; note = 2'-O-methyladenosine-3'-phosphate
  modified_base 18: mod_base = OTHER; note = 2'-O-methyluridine-3'-phosphate
  modified_base 19: mod_base = OTHER; note = 2'-O-methyluridine-3'-phosphorothioate
  modified_base 20: mod_base = OTHER; note = 2'-O-methyluridine-3'-phosphorothioate
  modified_base 21: mod_base = OTHER; note = 2'-O-methyladenosine-3'-phosphate
cctacttgtgaaatacattta

SEQ ID NO: 3806 - RNA, 21 nt, synthetic construct
  source 1..21: mol_type = other RNA
  modified_base 1: mod_base = OTHER; note = 2'-O-methylcytidine-3'-phosphorothioate
  modified_base 2: mod_base = OTHER; note = 2'-O-methyladenosine-3'-phosphorothioate
  modified_base 3: mod_base = OTHER; note = 2'-O-methyladenosine-3'-phosphate
  modified_base 4: mod_base = OTHER; note = 2'-O-methylcytidine-3'-phosphate
  modified_base 5: mod_base = OTHER; note = 2'-O-methyluridine-3'-phosphate
  modified_base 6: mod_base = OTHER; note 2-amino-9-((2R,3S,4S,5R)-3-(docosyloxy)-4-hydroxy-5-(hydrox ymethyl)tetrahydrofuran-2-yl)-1,9-dihydro-6H-purin-6-one
  modified_base 7: mod_base = OTHER; note = 2'-fluoroguanosine-3'-phosphate
  modified_base 8: mod_base = OTHER; note = 2'-O-methyladenosine-3'-phosphate
  modified_base 9: mod_base = OTHER; note = 2'-fluoroadenosine-3'-phosphate
  modified_base 10: mod_base = OTHER; note = 2'-fluorouridine-3'-phosphate
  modified_base 11: mod_base = OTHER; note = 2'-fluorouridine-3'-phosphate
  modified_base 12: mod_base = OTHER; note = 2'-O-methyluridine-3'-phosphate
  modified_base 13: mod_base = OTHER; note = 2'-O-methyluridine-3'-phosphate
  modified_base 14: mod_base = OTHER; note = 2'-O-methylcytidine-3'-phosphate
  modified_base 15: mod_base = OTHER; note = 2'-O-methylcytidine-3'-phosphate
  modified_base 16: mod_base = OTHER; note = 2'-O-methyladenosine-3'-phosphate
  modified_base 17: mod_base = OTHER; note = 2'-O-methyladenosine-3'-phosphate
  modified_base 18: mod_base = OTHER; note = 2'-O-methyluridine-3'-phosphate
  modified_base 19: mod_base = OTHER; note = 2'-O-methyluridine-3'-phosphorothioate
  modified_base 20: mod_base = OTHER; note = 2'-O-methyluridine-3'-phosphorothioate
  modified_base 21: mod_base = OTHER; note = 2'-O-methyladenosine-3'-phosphate
caactggaattttccaattta

SEQ ID NO: 3807 - RNA, 21 nt, synthetic construct
  source 1..21: mol_type = other RNA
  modified_base 1: mod_base = OTHER; note = 2'-O-methyluridine-3'-phosphorothioate
  modified_base 2: mod_base = OTHER; note = 2'-O-methylcytidine-3'-phosphorothioate
  modified_base 3: mod_base = OTHER; note = 2'-O-methyluridine-3'-phosphate
  modified_base 4: mod_base = OTHER; note = 2'-O-methyladenosine-3'-phosphate
  modified_base 5: mod_base = OTHER; note = 2'-O-methyladenosine-3'-phosphate
  modified_base 6: mod_base = OTHER; note 1-((2R,3R,4R,5R)-3-(docosyloxy)-4-hydroxy-5-(hydroxymethyl) tetrahydrofuran-2-yl)pyrimidine-2,4(1H,3H)-dione
  modified_base 7: mod_base = OTHER; note = 2'-fluorocytidine-3'-phosphate
  modified_base 8: mod_base = OTHER; note = 2'-O-methylcytidine-3'-phosphate
  modified_base 9: mod_base = OTHER; note = 2'-fluorouridine-3'-phosphate
  modified_base 10: mod_base = OTHER; note = 2'-fluoroguanosine-3'-phosphate
  modified_base 11: mod_base = OTHER; note = 2'-fluoroadenosine-3'-phosphate
  modified_base 12: mod_base = OTHER; note = 2'-O-methyluridine-3'-phosphate
  modified_base 13: mod_base = OTHER; note = 2'-O-methylguanosine-3'-phosphate
  modified_base 14: mod_base = OTHER; note = 2'-O-methyladenosine-3'-phosphate
  modified_base 15: mod_base = OTHER; note = 2'-O-methylguanosine-3'-phosphate
  modified_base 16: mod_base = OTHER; note = 2'-O-methyladenosine-3'-phosphate
  modified_base 17: mod_base = OTHER; note = 2'-O-methylguanosine-3'-phosphate
  modified_base 18: mod_base = OTHER; note = 2'-O-methyluridine-3'-phosphate
  modified_base 19: mod_base = OTHER; note = 2'-O-methyluridine-3'-phosphorothioate
  modified_base 20: mod_base = OTHER; note = 2'-O-methyladenosine-3'-phosphorothioate
  modified_base 21: mod_base = OTHER; note = 2'-O-methyladenosine-3'-phosphate
tctaatcctgatgagagttaa

SEQ ID NO: 3808 - RNA, 21 nt, synthetic construct
  source 1..21: mol_type = other RNA
  modified_base 1: mod_base = OTHER; note = 2'-O-methyladenosine-3'-phosphorothioate
  modified_base 2: mod_base = OTHER; note = 2'-O-methylguanosine-3'-phosphorothioate
  modified_base 3: mod_base = OTHER; note = 2'-O-methylcytidine-3'-phosphate
  modified_base 4: mod_base = OTHER; note = 2'-O-methylcytidine-3'-phosphate
  modified_base 5: mod_base = OTHER; note = 2'-O-methyluridine-3'-phosphate
  modified_base 6: mod_base = OTHER; note 4-amino-1-((2R,3R,4R,5R)-3-(docosyloxy)-4-hydroxy-5-(hydrox ymethyl)tetrahydrofuran-2-yl)pyrimidin-2(1H)-one
  modified_base 7: mod_base = OTHER; note = 2'-fluoroadenosine-3'-phosphate
  modified_base 8: mod_base = OTHER; note = 2'-O-methyluridine-3'-phosphate
  modified_base 9: mod_base = OTHER; note = 2'-fluorouridine-3'-phosphate
  modified_base 10: mod_base = OTHER; note = 2'-fluoroadenosine-3'-phosphate
  modified_base 11: mod_base = OTHER; note = 2'-fluorouridine-3'-phosphate
  modified_base 12: mod_base = OTHER; note = 2'-O-methylcytidine-3'-phosphate
  modified_base 13: mod_base = OTHER; note = 2'-O-methyladenosine-3'-phosphate
  modified_base 14: mod_base = OTHER; note = 2'-O-methyladenosine-3'-phosphate
  modified_base 15: mod_base = OTHER; note = 2'-O-methyladenosine-3'-phosphate
  modified_base 16: mod_base = OTHER; note = 2'-O-methyladenosine-3'-phosphate
  modified_base 17: mod_base = OTHER; note = 2'-O-methyluridine-3'-phosphate
  modified_base 18: mod_base = OTHER; note = 2'-O-methyluridine-3'-phosphate
  modified_base 19: mod_base = OTHER; note = 2'-O-methylcytidine-3'-phosphorothioate
  modified_base 20: mod_base = OTHER; note = 2'-O-methyluridine-3'-phosphorothioate
  modified_base 21: mod_base = OTHER; note = 2'-O-methyladenosine-3'-phosphate
agcctcattatcaaaattcta

SEQ ID NO: 3809 - RNA, 21 nt, synthetic construct
  source 1..21: mol_type = other RNA
  modified_base 1: mod_base = OTHER; note = 2'-O-methyladenosine-3'-phosphorothioate
  modified_base 2: mod_base = OTHER; note = 2'-O-methyladenosine-3'-phosphorothioate
  modified_base 3: mod_base = OTHER; note = 2'-O-methyluridine-3'-phosphate
  modified_base 4: mod_base = OTHER; note = 2'-O-methyluridine-3'-phosphate
  modified_base 5: mod_base = OTHER; note = 2'-O-methyluridine-3'-phosphate
  modified_base 6: mod_base = OTHER; note 4-amino-1-((2R,3R,4R,5R)-3-(docosyloxy)-4-hydroxy-5-(hydrox ymethyl)tetrahydrofuran-2-yl)pyrimidin-2(1H)-one
  modified_base 7: mod_base = OTHER; note = 2'-fluorouridine-3'-phosphate
  modified_base 8: mod_base = OTHER; note = 2'-O-methylguanosine-3'-phosphate
  modified_base 9: mod_base = OTHER; note = 2'-fluoroadenosine-3'-phosphate
  modified_base 10: mod_base = OTHER; note = 2'-fluorouridine-3'-phosphate
  modified_base 11: mod_base = OTHER; note = 2'-fluoroguanosine-3'-phosphate
  modified_base 12: mod_base = OTHER; note = 2'-O-methylcytidine-3'-phosphate
  modified_base 13: mod_base = OTHER; note = 2'-O-methyluridine-3'-phosphate
  modified_base 14: mod_base = OTHER; note = 2'-O-methyluridine-3'-phosphate
  modified_base 15: mod_base = OTHER; note = 2'-O-methyluridine-3'-phosphate
  modified_base 16: mod_base = OTHER; note = 2'-O-methyluridine-3'-phosphate
  modified_base 17: mod_base = OTHER; note = 2'-O-methyluridine-3'-phosphate
  modified_base 18: mod_base = OTHER; note = 2'-O-methyladenosine-3'-phosphate
  modified_base 19: mod_base = OTHER; note = 2'-O-methylcytidine-3'-phosphorothioate
  modified_base 20: mod_base = OTHER; note = 2'-O-methyluridine-3'-phosphorothioate
  modified_base 21: mod_base = OTHER; note = 2'-O-methyladenosine-3'-phosphate
aatttctgatgctttttacta

SEQ ID NO: 3810 - RNA, 21 nt, synthetic construct
  source 1..21: mol_type = other RNA
  modified_base 1: mod_base = OTHER; note = 2'-O-methyluridine-3'-phosphorothioate
  modified_base 2: mod_base = OTHER; note = 2'-O-methyladenosine-3'-phosphorothioate
  modified_base 3: mod_base = OTHER; note = 2'-O-methylcytidine-3'-phosphate
  modified_base 4: mod_base = OTHER; note = 2'-O-methylcytidine-3'-phosphate
  modified_base 5: mod_base = OTHER; note = 2'-O-methyladenosine-3'-phosphate
  modified_base 6: mod_base = OTHER; note 1-((2R,3R,4R,5R)-3-(docosyloxy)-4-hydroxy-5-(hydroxymethyl) tetrahydrofuran-2-yl)pyrimidine-2,4(1H,3H)-dione
  modified_base 7: mod_base = OTHER; note = 2'-fluorouridine-3'-phosphate
  modified_base 8: mod_base = OTHER; note = 2'-O-methyladenosine-3'-phosphate
  modified_base 9: mod_base = OTHER; note = 2'-fluoroguanosine-3'-phosphate
  modified_base 10: mod_base = OTHER; note = 2'-fluoroadenosine-3'-phosphate
  modified_base 11: mod_base = OTHER; note = 2'-fluorouridine-3'-phosphate
  modified_base 12: mod_base = OTHER; note = 2'-O-methylguanosine-3'-phosphate
  modified_base 13: mod_base = OTHER; note = 2'-O-methyladenosine-3'-phosphate
  modified_base 14: mod_base = OTHER; note = 2'-O-methyladenosine-3'-phosphate
  modified_base 15: mod_base = OTHER; note = 2'-O-methyladenosine-3'-phosphate
  modified_base 16: mod_base = OTHER; note = 2'-O-methyluridine-3'-phosphate
  modified_base 17: mod_base = OTHER; note = 2'-O-methylcytidine-3'-phosphate
  modified_base 18: mod_base = OTHER; note = 2'-O-methyluridine-3'-phosphate
  modified_base 19: mod_base = OTHER; note = 2'-O-methyluridine-3'-phosphorothioate
  modified_base 20: mod_base = OTHER; note = 2'-O-methyladenosine-3'-phosphorothioate
  modified_base 21: mod_base = OTHER; note = 2'-O-methyladenosine-3'-phosphate
taccattagatgaaatcttaa

SEQ ID NO: 3811 - RNA, 21 nt, synthetic construct
  source 1..21: mol_type = other RNA
  modified_base 1: mod_base = OTHER; note = 2'-O-methylcytidine-3'-phosphorothioate
  modified_base 2: mod_base = OTHER; note = 2'-O-methyluridine-3'-phosphorothioate
  modified_base 3: mod_base = OTHER; note = 2'-O-methylguanosine-3'-phosphate
  modified_base 4: mod_base = OTHER; note = 2'-O-methyluridine-3'-phosphate
  modified_base 5: mod_base = OTHER; note = 2'-O-methylguanosine-3'-phosphate
  modified_base 6: mod_base = OTHER; note (2R,3S,4S,5R)-5-(6-amino-9H-purin-9-yl)-4-(docosyloxy)-2-(h ydroxymethyl)tetrahydrofuran-3-ol
  modified_base 7: mod_base = OTHER; note = 2'-fluoroadenosine-3'-phosphate
  modified_base 8: mod_base = OTHER; note = 2'-O-methyluridine-3'-phosphate
  modified_base 9: mod_base = OTHER; note = 2'-fluorouridine-3'-phosphate
  modified_base 10: mod_base = OTHER; note = 2'-fluorocytidine-3'-phosphate
  modified_base 11: mod_base = OTHER; note = 2'-fluorouridine-3'-phosphate
  modified_base 12: mod_base = OTHER; note = 2'-O-methyluridine-3'-phosphate
  modified_base 13: mod_base = OTHER; note = 2'-O-methylcytidine-3'-phosphate
  modified_base 14: mod_base = OTHER; note = 2'-O-methylcytidine-3'-phosphate
  modified_base 15: mod_base = OTHER; note = 2'-O-methyladenosine-3'-phosphate
  modified_base 16: mod_base = OTHER; note = 2'-O-methyladenosine-3'-phosphate
  modified_base 17: mod_base = OTHER; note = 2'-O-methylcytidine-3'-phosphate
  modified_base 18: mod_base = OTHER; note = 2'-O-methylcytidine-3'-phosphate
  modified_base 19: mod_base = OTHER; note = 2'-O-methyladenosine-3'-phosphorothioate
  modified_base 20: mod_base = OTHER; note = 2'-O-methyluridine-3'-phosphorothioate
  modified_base 21: mod_base = OTHER; note = 2'-O-methyladenosine-3'-phosphate
ctgtgaattcttccaaccata

SEQ ID NO: 3812 - RNA, 21 nt, synthetic construct
  source 1..21: mol_type = other RNA
  modified_base 1: mod_base = OTHER; note = 2'-O-methylcytidine-3'-phosphorothioate
  modified_base 2: mod_base = OTHER; note = 2'-O-methyluridine-3'-phosphorothioate
  modified_base 3: mod_base = OTHER; note = 2'-O-methyladenosine-3'-phosphate
  modified_base 4: mod_base = OTHER; note = 2'-O-methyladenosine-3'-phosphate
  modified_base 5: mod_base = OTHER; note = 2'-O-methyluridine-3'-phosphate
  modified_base 6: mod_base = OTHER; note (2R,3S,4S,5R)-5-(6-amino-9H-purin-9-yl)-4-(docosyloxy)-2-(h ydroxymethyl)tetrahydrofuran-3-ol
  modified_base 7: mod_base = OTHER; note = 2'-fluorocytidine-3'-phosphate
  modified_base 8: mod_base = OTHER; note = 2'-O-methyluridine-3'-phosphate
  modified_base 9: mod_base = OTHER; note = 2'-fluorocytidine-3'-phosphate
  modified_base 10: mod_base = OTHER; note = 2'-fluorocytidine-3'-phosphate
  modified_base 11: mod_base = OTHER; note = 2'-fluoroadenosine-3'-phosphate
  modified_base 12: mod_base = OTHER; note = 2'-O-methylguanosine-3'-phosphate
  modified_base 13: mod_base = OTHER; note = 2'-O-methyladenosine-3'-phosphate
  modified_base 14: mod_base = OTHER; note = 2'-O-methyluridine-3'-phosphate
  modified_base 15: mod_base = OTHER; note = 2'-O-methyluridine-3'-phosphate
  modified_base 16: mod_base = OTHER; note = 2'-O-methyluridine-3'-phosphate
  modified_base 17: mod_base = OTHER; note = 2'-O-methyluridine-3'-phosphate
  modified_base 18: mod_base = OTHER; note = 2'-O-methyluridine-3'-phosphate
  modified_base 19: mod_base = OTHER; note = 2'-O-methyladenosine-3'-phosphorothioate
  modified_base 20: mod_base = OTHER; note = 2'-O-methyluridine-3'-phosphorothioate
  modified_base 21: mod_base = OTHER; note = 2'-O-methyladenosine-3'-phosphate
ctaatactccagatttttata

SEQ ID NO: 3813 - RNA, 21 nt, synthetic construct
  source 1..21: mol_type = other RNA
  modified_base 1: mod_base = OTHER; note = 2'-O-methylguanosine-3'-phosphorothioate
  modified_base 2: mod_base = OTHER; note = 2'-O-methylguanosine-3'-phosphorothioate
  modified_base 3: mod_base = OTHER; note = 2'-O-methyladenosine-3'-phosphate
  modified_base 4: mod_base = OTHER; note = 2'-O-methylcytidine-3'-phosphate
  modified_base 5: mod_base = OTHER; note = 2'-O-methyladenosine-3'-phosphate
  modified_base 6: mod_base = OTHER; note 4-amino-1-((2R,3R,4R,5R)-3-(docosyloxy)-4-hydroxy-5-(hydrox ymethyl)tetrahydrofuran-2-yl)pyrimidin-2(1H)-one
  modified_base 7: mod_base = OTHER; note = 2'-fluoroadenosine-3'-phosphate
  modified_base 8: mod_base = OTHER; note = 2'-O-methyluridine-3'-phosphate
  modified_base 9: mod_base = OTHER; note = 2'-fluoroadenosine-3'-phosphate
  modified_base 10: mod_base = OTHER; note = 2'-fluorocytidine-3'-phosphate
  modified_base 11: mod_base = OTHER; note = 2'-fluoroadenosine-3'-phosphate
  modified_base 12: mod_base = OTHER; note = 2'-O-methyluridine-3'-phosphate
  modified_base 13: mod_base = OTHER; note = 2'-O-methyluridine-3'-phosphate
  modified_base 14: mod_base = OTHER; note = 2'-O-methylguanosine-3'-phosphate
  modified_base 15: mod_base = OTHER; note = 2'-O-methyladenosine-3'-phosphate
  modified_base 16: mod_base = OTHER; note = 2'-O-methyladenosine-3'-phosphate
  modified_base 17: mod_base = OTHER; note = 2'-O-methyluridine-3'-phosphate
  modified_base 18: mod_base = OTHER; note = 2'-O-methyladenosine-3'-phosphate
  modified_base 19: mod_base = OTHER; note = 2'-O-methyladenosine-3'-phosphorothioate
  modified_base 20: mod_base = OTHER; note = 2'-O-methyladenosine-3'-phosphorothioate
  modified_base 21: mod_base = OTHER; note = 2'-O-methyladenosine-3'-phosphate
ggacacatacattgaataaaa

SEQ ID NO: 3814 - RNA, 21 nt, synthetic construct
  source 1..21: mol_type = other RNA
  modified_base 1: mod_base = OTHER; note = 2'-O-methyluridine-3'-phosphorothioate
  modified_base 2: mod_base = OTHER; note = 2'-O-methyluridine-3'-phosphorothioate
  modified_base 3: mod_base = OTHER; note = 2'-O-methyluridine-3'-phosphate
  modified_base 4: mod_base = OTHER; note = 2'-O-methylguanosine-3'-phosphate
  modified_base 5: mod_base = OTHER; note = 2'-O-methyluridine-3'-phosphate
  modified_base 6: mod_base = OTHER; note 4-amino-1-((2R,3R,4R,5R)-3-(docosyloxy)-4-hydroxy-5-(hydrox ymethyl)tetrahydrofuran-2-yl)pyrimidin-2(1H)-one
  modified_base 7: mod_base = OTHER; note = 2'-fluoroadenosine-3'-phosphate
  modified_base 8: mod_base = OTHER; note = 2'-O-methyluridine-3'-phosphate
  modified_base 9: mod_base = OTHER; note = 2'-fluoroadenosine-3'-phosphate
  modified_base 10: mod_base = OTHER; note = 2'-fluoroadenosine-3'-phosphate
  modified_base 11: mod_base = OTHER; note = 2'-fluorouridine-3'-phosphate
  modified_base 12: mod_base = OTHER; note = 2'-O-methylguanosine-3'-phosphate
  modified_base 13: mod_base = OTHER; note = 2'-O-methylcytidine-3'-phosphate
  modified_base 14: mod_base = OTHER; note = 2'-O-methyluridine-3'-phosphate
  modified_base 15: mod_base = OTHER; note = 2'-O-methylguanosine-3'-phosphate
  modified_base 16: mod_base = OTHER; note = 2'-O-methylcytidine-3'-phosphate
  modified_base 17: mod_base = OTHER; note = 2'-O-methyluridine-3'-phosphate
  modified_base 18: mod_base = OTHER; note = 2'-O-methyluridine-3'-phosphate
  modified_base 19: mod_base = OTHER; note = 2'-O-methyluridine-3'-phosphorothioate
  modified_base 20: mod_base = OTHER; note = 2'-O-methylguanosine-3'-phosphorothioate
  modified_base 21: mod_base = OTHER; note = 2'-O-methyladenosine-3'-phosphate
tttgtcataatgctgctttga

SEQ ID NO: 3815 - RNA, 21 nt, synthetic construct
  source 1..21: mol_type = other RNA
  modified_base 1: mod_base = OTHER; note = 2'-O-methyluridine-3'-phosphorothioate
  modified_base 2: mod_base = OTHER; note = 2'-O-methyluridine-3'-phosphorothioate
  modified_base 3: mod_base = OTHER; note = 2'-O-methylcytidine-3'-phosphate
  modified_base 4: mod_base = OTHER; note = 2'-O-methyladenosine-3'-phosphate
  modified_base 5: mod_base = OTHER; note = 2'-O-methyluridine-3'-phosphate
  modified_base 6: mod_base = OTHER; note 4-amino-1-((2R,3R,4R,5R)-3-(docosyloxy)-4-hydroxy-5-(hydrox ymethyl)tetrahydrofuran-2-yl)pyrimidin-2(1H)-one
  modified_base 7: mod_base = OTHER; note = 2'-fluorouridine-3'-phosphate
  modified_base 8: mod_base = OTHER; note = 2'-O-methyluridine-3'-phosphate
  modified_base 9: mod_base = OTHER; note = 2'-fluorouridine-3'-phosphate
  modified_base 10: mod_base = OTHER; note = 2'-fluorocytidine-3'-phosphate
  modified_base 11: mod_base = OTHER; note = 2'-fluorouridine-3'-phosphate
  modified_base 12: mod_base = OTHER; note = 2'-O-methylguanosine-3'-phosphate
  modified_base 13: mod_base = OTHER; note = 2'-O-methyluridine-3'-phosphate
  modified_base 14: mod_base = OTHER; note = 2'-O-methyluridine-3'-phosphate
  modified_base 15: mod_base = OTHER; note = 2'-O-methyladenosine-3'-phosphate
  modified_base 16: mod_base = OTHER; note = 2'-O-methyladenosine-3'-phosphate
  modified_base 17: mod_base = OTHER; note = 2'-O-methyluridine-3'-phosphate
  modified_base 18: mod_base = OTHER; note = 2'-O-methyluridine-3'-phosphate
  modified_base 19: mod_base = OTHER; note = 2'-O-methyluridine-3'-phosphorothioate
  modified_base 20: mod_base = OTHER; note = 2'-O-methylcytidine-3'-phosphorothioate
  modified_base 21: mod_base = OTHER; note = 2'-O-methyladenosine-3'-phosphate
ttcatctttctgttaatttca

SEQ ID NO: 3816 - RNA, 21 nt, synthetic construct
  source 1..21: mol_type = other RNA
  modified_base 1: mod_base = OTHER; note = 2'-O-methylcytidine-3'-phosphorothioate
  modified_base 2: mod_base = OTHER; note = 2'-O-methyladenosine-3'-phosphorothioate
  modified_base 3: mod_base = OTHER; note = 2'-O-methylguanosine-3'-phosphate
  modified_base 4: mod_base = OTHER; note = 2'-O-methyluridine-3'-phosphate
  modified_base 5: mod_base = OTHER; note = 2'-O-methylguanosine-3'-phosphate
  modified_base 6: mod_base = OTHER; note (2R,3S,4S,5R)-5-(6-amino-9H-purin-9-yl)-4-(docosyloxy)-2-(h ydroxymethyl)tetrahydrofuran-3-ol
  modified_base 7: mod_base = OTHER; note = 2'-fluoroadenosine-3'-phosphate
  modified_base 8: mod_base = OTHER; note = 2'-O-methyladenosine-3'-phosphate
  modified_base 9: mod_base = OTHER; note = 2'-fluorocytidine-3'-phosphate
  modified_base 10: mod_base = OTHER; note = 2'-fluorocytidine-3'-phosphate
  modified_base 11: mod_base = OTHER; note = 2'-fluoroadenosine-3'-phosphate
  modified_base 12: mod_base = OTHER; note = 2'-O-methyluridine-3'-phosphate
  modified_base 13: mod_base = OTHER; note = 2'-O-methyluridine-3'-phosphate
  modified_base 14: mod_base = OTHER; note = 2'-O-methyladenosine-3'-phosphate
  modified_base 15: mod_base = OTHER; note = 2'-O-methyladenosine-3'-phosphate
  modified_base 16: mod_base = OTHER; note = 2'-O-methyluridine-3'-phosphate
  modified_base 17: mod_base = OTHER; note = 2'-O-methyluridine-3'-phosphate
  modified_base 18: mod_base = OTHER; note = 2'-O-methyluridine-3'-phosphate
  modified_base 19: mod_base = OTHER; note = 2'-O-methyluridine-3'-phosphorothioate
  modified_base 20: mod_base = OTHER; note = 2'-O-methylcytidine-3'-phosphorothioate
  modified_base 21: mod_base = OTHER; note = 2'-O-methyladenosine-3'-phosphate
cagtgaaaccattaattttca

SEQ ID NO: 3817 - RNA, 21 nt, synthetic construct
  source 1..21: mol_type = other RNA
  modified_base 1: mod_base = OTHER; note = 2'-O-methyluridine-3'-phosphorothioate
  modified_base 2: mod_base = OTHER; note = 2'-O-methyladenosine-3'-phosphorothioate
  modified_base 3: mod_base = OTHER; note = 2'-O-methyladenosine-3'-phosphate
  modified_base 4: mod_base = OTHER; note = 2'-O-methylcytidine-3'-phosphate
  modified_base 5: mod_base = OTHER; note = 2'-O-methyluridine-3'-phosphate
  modified_base 6: mod_base = OTHER; note 2-amino-9-((2R,3S,4S,5R)-3-(docosyloxy)-4-hydroxy-5-(hydrox ymethyl)tetrahydrofuran-2-yl)-1,9-dihydro-6H-purin-6-one
  modified_base 7: mod_base = OTHER; note = 2'-fluorocytidine-3'-phosphate
  modified_base 8: mod_base = OTHER; note = 2'-O-methyladenosine-3'-phosphate
  modified_base 9: mod_base = OTHER; note = 2'-fluoroadenosine-3'-phosphate
  modified_base 10: mod_base = OTHER; note = 2'-fluoroguanosine-3'-phosphate
  modified_base 11: mod_base = OTHER; note = 2'-fluoroadenosine-3'-phosphate
  modified_base 12: mod_base = OTHER; note = 2'-O-methylcytidine-3'-phosphate
  modified_base 13: mod_base = OTHER; note = 2'-O-methyluridine-3'-phosphate
  modified_base 14: mod_base = OTHER; note = 2'-O-methylguanosine-3'-phosphate
  modified_base 15: mod_base = OTHER; note = 2'-O-methyladenosine-3'-phosphate
  modified_base 16: mod_base = OTHER; note = 2'-O-methyluridine-3'-phosphate
  modified_base 17: mod_base = OTHER; note = 2'-O-methyluridine-3'-phosphate
  modified_base 18: mod_base = OTHER; note = 2'-O-methyluridine-3'-phosphate
  modified_base 19: mod_base = OTHER; note = 2'-O-methylcytidine-3'-phosphorothioate
  modified_base 20: mod_base = OTHER; note = 2'-O-methyluridine-3'-phosphorothioate
  modified_base 21: mod_base = OTHER; note = 2'-O-methyladenosine-3'-phosphate
taactgcaagactgatttcta

SEQ ID NO: 3818 - RNA, 21 nt, synthetic construct
  source 1..21: mol_type = other RNA
  modified_base 1: mod_base = OTHER; note = 2'-O-methyladenosine-3'-phosphorothioate
  modified_base 2: mod_base = OTHER; note = 2'-O-methylguanosine-3'-phosphorothioate
  modified_base 3: mod_base = OTHER; note = 2'-O-methyladenosine-3'-phosphate
  modified_base 4: mod_base = OTHER; note = 2'-O-methyladenosine-3'-phosphate
  modified_base 5: mod_base = OTHER; note = 2'-O-methyluridine-3'-phosphate
  modified_base 6: mod_base = OTHER; note 1-((2R,3R,4R,5R)-3-(docosyloxy)-4-hydroxy-5-(hydroxymethyl) tetrahydrofuran-2-yl)pyrimidine-2,4(1H,3H)-dione
  modified_base 7: mod_base = OTHER; note = 2'-fluorocytidine-3'-phosphate
  modified_base 8: mod_base = OTHER; note = 2'-O-methylcytidine-3'-phosphate
  modified_base 9: mod_base = OTHER; note = 2'-fluorouridine-3'-phosphate
  modified_base 10: mod_base = OTHER; note = 2'-fluorocytidine-3'-phosphate
  modified_base 11: mod_base = OTHER; note = 2'-fluorocytidine-3'-phosphate
  modified_base 12: mod_base = OTHER; note = 2'-O-methyluridine-3'-phosphate
  modified_base 13: mod_base = OTHER; note = 2'-O-methyluridine-3'-phosphate
  modified_base 14: mod_base = OTHER; note = 2'-O-methyladenosine-3'-phosphate
  modified_base 15: mod_base = OTHER; note = 2'-O-methylcytidine-3'-phosphate
  modified_base 16: mod_base = OTHER; note = 2'-O-methylcytidine-3'-phosphate
  modified_base 17: mod_base = OTHER; note = 2'-O-methyluridine-3'-phosphate
  modified_base 18: mod_base = OTHER; note = 2'-O-methylcytidine-3'-phosphate
  modified_base 19: mod_base = OTHER; note = 2'-O-methyladenosine-3'-phosphorothioate
  modified_base 20: mod_base = OTHER; note = 2'-O-methyladenosine-3'-phosphorothioate
  modified_base 21: mod_base = OTHER; note = 2'-O-methyladenosine-3'-phosphate
agaattcctccttacctcaaa

SEQ ID NO: 3819 - RNA, 21 nt, synthetic construct
  source 1..21: mol_type = other RNA
  modified_base 1: mod_base = OTHER; note = 2'-O-methyluridine-3'-phosphorothioate
  modified_base 2: mod_base = OTHER; note = 2'-O-methyladenosine-3'-phosphorothioate
  modified_base 3: mod_base = OTHER; note = 2'-O-methyluridine-3'-phosphate
  modified_base 4: mod_base = OTHER; note = 2'-O-methyluridine-3'-phosphate
  modified_base 5: mod_base = OTHER; note = 2'-O-methyladenosine-3'-phosphate
  modified_base 6: mod_base = OTHER; note 4-amino-1-((2R,3R,4R,5R)-3-(docosyloxy)-4-hydroxy-5-(hydrox ymethyl)tetrahydrofuran-2-yl)pyrimidin-2(1H)-one
  modified_base 7: mod_base = OTHER; note = 2'-fluoroadenosine-3'-phosphate
  modified_base 8: mod_base = OTHER; note = 2'-O-methylguanosine-3'-phosphate
  modified_base 9: mod_base = OTHER; note = 2'-fluoroadenosine-3'-phosphate
  modified_base 10: mod_base = OTHER; note = 2'-fluorouridine-3'-phosphate
  modified_base 11: mod_base = OTHER; note = 2'-fluorocytidine-3'-phosphate
  modified_base 12: mod_base = OTHER; note = 2'-O-methyluridine-3'-phosphate
  modified_base 13: mod_base = OTHER; note = 2'-O-methyluridine-3'-phosphate
  modified_base 14: mod_base = OTHER; note = 2'-O-methyladenosine-3'-phosphate
  modified_base 15: mod_base = OTHER; note = 2'-O-methylcytidine-3'-phosphate
  modified_base 16: mod_base = OTHER; note = 2'-O-methyluridine-3'-phosphate
  modified_base 17: mod_base = OTHER; note = 2'-O-methyluridine-3'-phosphate
  modified_base 18: mod_base = OTHER; note = 2'-O-methyluridine-3'-phosphate
  modified_base 19: mod_base = OTHER; note = 2'-O-methylguanosine-3'-phosphorothioate
  modified_base 20: mod_base = OTHER; note = 2'-O-methyluridine-3'-phosphorothioate
  modified_base 21: mod_base = OTHER; note = 2'-O-methyladenosine-3'-phosphate
tattacagatcttactttgta

SEQ ID NO: 3820 - RNA, 21 nt, synthetic construct
  source 1..21: mol_type = other RNA
  modified_base 1: mod_base = OTHER; note = 2'-O-methyluridine-3'-phosphorothioate
  modified_base 2: mod_base = OTHER; note = 2'-O-methyluridine-3'-phosphorothioate
  modified_base 3: mod_base = OTHER; note = 2'-O-methyladenosine-3'-phosphate
  modified_base 4: mod_base = OTHER; note = 2'-O-methyluridine-3'-phosphate
  modified_base 5: mod_base = OTHER; note = 2'-O-methylcytidine-3'-phosphate
  modified_base 6: mod_base = OTHER; note 1-((2R,3R,4R,5R)-3-(docosyloxy)-4-hydroxy-5-(hydroxymethyl) tetrahydrofuran-2-yl)pyrimidine-2,4(1H,3H)-dione
  modified_base 7: mod_base = OTHER; note = 2'-fluoroguanosine-3'-phosphate
  modified_base 8: mod_base = OTHER; note = 2'-O-methyladenosine-3'-phosphate
  modified_base 9: mod_base = OTHER; note = 2'-fluoroadenosine-3'-phosphate
  modified_base 10: mod_base = OTHER; note = 2'-fluoroadenosine-3'-phosphate
  modified_base 11: mod_base = OTHER; note = 2'-fluoroguanosine-3'-phosphate
  modified_base 12: mod_base = OTHER; note = 2'-O-methyladenosine-3'-phosphate
  modified_base 13: mod_base = OTHER; note = 2'-O-methyluridine-3'-phosphate
  modified_base 14: mod_base = OTHER; note = 2'-O-methyladenosine-3'-phosphate
  modified_base 15: mod_base = OTHER; note = 2'-O-methyluridine-3'-phosphate
  modified_base 16: mod_base = OTHER; note = 2'-O-methylcytidine-3'-phosphate
  modified_base 17: mod_base = OTHER; note = 2'-O-methyladenosine-3'-phosphate
  modified_base 18: mod_base = OTHER; note = 2'-O-methyladenosine-3'-phosphate
  modified_base 19: mod_base = OTHER; note = 2'-O-methyluridine-3'-phosphorothioate
  modified_base 20: mod_base = OTHER; note = 2'-O-methyluridine-3'-phosphorothioate
  modified_base 21: mod_base = OTHER; note = 2'-O-methyladenosine-3'-phosphate
ttatctgaaagatatcaatta

SEQ ID NO: 3821 - RNA, 21 nt, synthetic construct
  source 1..21: mol_type = other RNA
  modified_base 1: mod_base = OTHER; note = 2'-O-methyladenosine-3'-phosphorothioate
  modified_base 2: mod_base = OTHER; note = 2'-O-methylguanosine-3'-phosphorothioate
  modified_base 3: mod_base = OTHER; note = 2'-O-methyladenosine-3'-phosphate
  modified_base 4: mod_base = OTHER; note = 2'-O-methyluridine-3'-phosphate
  modified_base 5: mod_base = OTHER; note = 2'-O-methylcytidine-3'-phosphate
  modified_base 6: mod_base = OTHER; note 1-((2R,3R,4R,5R)-3-(docosyloxy)-4-hydroxy-5-(hydroxymethyl) tetrahydrofuran-2-yl)pyrimidine-2,4(1H,3H)-dione
  modified_base 7: mod_base = OTHER; note = 2'-fluoroguanosine-3'-phosphate
  modified_base 8: mod_base = OTHER; note = 2'-O-methyluridine-3'-phosphate
  modified_base 9: mod_base = OTHER; note = 2'-fluorouridine-3'-phosphate
  modified_base 10: mod_base = OTHER; note = 2'-fluorocytidine-3'-phosphate
  modified_base 11: mod_base = OTHER; note = 2'-fluorouridine-3'-phosphate
  modified_base 12: mod_base = OTHER; note = 2'-O-methylguanosine-3'-phosphate
  modified_base 13: mod_base = OTHER; note = 2'-O-methylguanosine-3'-phosphate
  modified_base 14: mod_base = OTHER; note = 2'-O-methyladenosine-3'-phosphate
  modified_base 15: mod_base = OTHER; note = 2'-O-methyladenosine-3'-phosphate
  modified_base 16: mod_base = OTHER; note = 2'-O-methyladenosine-3'-phosphate
  modified_base 17: mod_base = OTHER; note = 2'-O-methyladenosine-3'-phosphate
  modified_base 18: mod_base = OTHER; note = 2'-O-methyluridine-3'-phosphate
  modified_base 19: mod_base = OTHER; note = 2'-O-methylcytidine-3'-phosphorothioate
  modified_base 20: mod_base = OTHER; note = 2'-O-methyladenosine-3'-phosphorothioate
  modified_base 21: mod_base = OTHER; note = 2'-O-methyladenosine-3'-phosphate
agatctgttctggaaaatcaa

SEQ ID NO: 3822 - RNA, 21 nt, synthetic construct
  source 1..21: mol_type = other RNA
  modified_base 1: mod_base = OTHER; note = 2'-O-methylcytidine-3'-phosphorothioate
  modified_base 2: mod_base = OTHER; note = 2'-O-methylcytidine-3'-phosphorothioate
  modified_base 3: mod_base = OTHER; note = 2'-O-methylcytidine-3'-phosphate
  modified_base 4: mod_base = OTHER; note = 2'-O-methyladenosine-3'-phosphate
  modified_base 5: mod_base = OTHER; note = 2'-O-methylguanosine-3'-phosphate
  modified_base 6: mod_base = OTHER; note (2R,3S,4S,5R)-5-(6-amino-9H-purin-9-yl)-4-(docosyloxy)-2-(h ydroxymethyl)tetrahydrofuran-3-ol
  modified_base 7: mod_base = OTHER; note = 2'-fluoroadenosine-3'-phosphate
  modified_base 8: mod_base = OTHER; note = 2'-O-methyluridine-3'-phosphate
  modified_base 9: mod_base = OTHER; note = 2'-fluoroadenosine-3'-phosphate
  modified_base 10: mod_base = OTHER; note = 2'-fluorocytidine-3'-phosphate
  modified_base 11: mod_base = OTHER; note = 2'-fluoroadenosine-3'-phosphate
  modified_base 12: mod_base = OTHER; note = 2'-O-methyladenosine-3'-phosphate
  modified_base 13: mod_base = OTHER; note = 2'-O-methylcytidine-3'-phosphate
  modified_base 14: mod_base = OTHER; note = 2'-O-methyluridine-3'-phosphate
  modified_base 15: mod_base = OTHER; note = 2'-O-methyluridine-3'-phosphate
  modified_base 16: mod_base = OTHER; note = 2'-O-methylcytidine-3'-phosphate
  modified_base 17: mod_base = OTHER; note = 2'-O-methylcytidine-3'-phosphate
  modified_base 18: mod_base = OTHER; note = 2'-O-methyluridine-3'-phosphate
  modified_base 19: mod_base = OTHER; note = 2'-O-methyluridine-3'-phosphorothioate
  modified_base 20: mod_base = OTHER; note = 2'-O-methylcytidine-3'-phosphorothioate
  modified_base 21: mod_base = OTHER; note = 2'-O-methyladenosine-3'-phosphate
cccagaatacaacttccttca

SEQ ID NO: 3823 - RNA, 21 nt, synthetic construct
  source 1..21: mol_type = other RNA
  modified_base 1: mod_base = OTHER; note = 2'-O-methylguanosine-3'-phosphorothioate
  modified_base 2: mod_base = OTHER; note = 2'-O-methyluridine-3'-phosphorothioate
  modified_base 3: mod_base = OTHER; note = 2'-O-methyluridine-3'-phosphate
  modified_base 4: mod_base = OTHER; note = 2'-O-methylguanosine-3'-phosphate
  modified_base 5: mod_base = OTHER; note = 2'-O-methyladenosine-3'-phosphate
  modified_base 6: mod_base = OTHER; note 1-((2R,3R,4R,5R)-3-(docosyloxy)-4-hydroxy-5-(hydroxymethyl) tetrahydrofuran-2-yl)pyrimidine-2,4(1H,3H)-dione
  modified_base 7: mod_base = OTHER; note = 2'-fluorocytidine-3'-phosphate
  modified_base 8: mod_base = OTHER; note = 2'-O-methyluridine-3'-phosphate
  modified_base 9: mod_base = OTHER; note = 2'-fluorouridine-3'-phosphate
  modified_base 10: mod_base = OTHER; note = 2'-fluorouridine-3'-phosphate
  modified_base 11: mod_base = OTHER; note = 2'-fluorocytidine-3'-phosphate
  modified_base 12: mod_base = OTHER; note = 2'-O-methyladenosine-3'-phosphate
  modified_base 13: mod_base = OTHER; note = 2'-O-methylguanosine-3'-phosphate
  modified_base 14: mod_base = OTHER; note = 2'-O-methyluridine-3'-phosphate
  modified_base 15: mod_base = OTHER; note = 2'-O-methylguanosine-3'-phosphate
  modified_base 16: mod_base = OTHER; note = 2'-O-methylcytidine-3'-phosphate
  modified_base 17: mod_base = OTHER; note = 2'-O-methyluridine-3'-phosphate
  modified_base 18: mod_base = OTHER; note = 2'-O-methyladenosine-3'-phosphate
  modified_base 19: mod_base = OTHER; note = 2'-O-methyladenosine-3'-phosphorothioate
  modified_base 20: mod_base = OTHER; note = 2'-O-methyladenosine-3'-phosphorothioate
  modified_base 21: mod_base = OTHER; note = 2'-O-methyladenosine-3'-phosphate
gttgatctttcagtgctaaaa

SEQ ID NO: 3824 - RNA, 21 nt, synthetic construct
  source 1..21: mol_type = other RNA
  modified_base 1: mod_base = OTHER; note = 2'-O-methylcytidine-3'-phosphorothioate
  modified_base 2: mod_base = OTHER; note = 2'-O-methyluridine-3'-phosphorothioate
  modified_base 3: mod_base = OTHER; note = 2'-O-methyladenosine-3'-phosphate
  modified_base 4: mod_base = OTHER; note = 2'-O-methyladenosine-3'-phosphate
  modified_base 5: mod_base = OTHER; note = 2'-O-methylguanosine-3'-phosphate
  modified_base 6: mod_base = OTHER; note 4-amino-1-((2R,3R,4R,5R)-3-(docosyloxy)-4-hydroxy-5-(hydrox ymethyl)tetrahydrofuran-2-yl)pyrimidin-2(1H)-one
  modified_base 7: mod_base = OTHER; note = 2'-fluorouridine-3'-phosphate
  modified_base 8: mod_base = OTHER; note = 2'-O-methyluridine-3'-phosphate
  modified_base 9: mod_base = OTHER; note = 2'-fluorouridine-3'-phosphate
  modified_base 10: mod_base = OTHER; note = 2'-fluoroadenosine-3'-phosphate
  modified_base 11: mod_base = OTHER; note = 2'-fluorouridine-3'-phosphate
  modified_base 12: mod_base = OTHER; note = 2'-O-methyluridine-3'-phosphate
  modified_base 13: mod_base = OTHER; note = 2'-O-methyluridine-3'-phosphate
  modified_base 14: mod_base = OTHER; note = 2'-O-methyladenosine-3'-phosphate
  modified_base 15: mod_base = OTHER; note = 2'-O-methyluridine-3'-phosphate
  modified_base 16: mod_base = OTHER; note = 2'-O-methyluridine-3'-phosphate
  modified_base 17: mod_base = OTHER; note = 2'-O-methyladenosine-3'-phosphate
  modified_base 18: mod_base = OTHER; note = 2'-O-methylguanosine-3'-phosphate
  modified_base 19: mod_base = OTHER; note = 2'-O-methyladenosine-3'-phosphorothioate
  modified_base 20: mod_base = OTHER; note = 2'-O-methylcytidine-3'-phosphorothioate
  modified_base 21: mod_base = OTHER; note = 2'-O-methyladenosine-3'-phosphate
ctaagctttatttattagaca

SEQ ID NO: 3825 - RNA, 21 nt, synthetic construct
  source 1..21: mol_type = other RNA
  modified_base 1: mod_base = OTHER; note = 2'-O-methyladenosine-3'-phosphorothioate
  modified_base 2: mod_base = OTHER; note = 2'-O-methylguanosine-3'-phosphorothioate
  modified_base 3: mod_base = OTHER; note = 2'-O-methylcytidine-3'-phosphate
  modified_base 4: mod_base = OTHER; note = 2'-O-methyluridine-3'-phosphate
  modified_base 5: mod_base = OTHER; note = 2'-O-methyluridine-3'-phosphate
  modified_base 6: mod_base = OTHER; note 2-amino-9-((2R,3S,4S,5R)-3-(docosyloxy)-4-hydroxy-5-(hydrox ymethyl)tetrahydrofuran-2-yl)-1,9-dihydro-6H-purin-6-one
  modified_base 7: mod_base = OTHER; note = 2'-fluoroguanosine-3'-phosphate
  modified_base 8: mod_base = OTHER; note = 2'-O-methyladenosine-3'-phosphate
  modified_base 9: mod_base = OTHER; note = 2'-fluoroadenosine-3'-phosphate
  modified_base 10: mod_base = OTHER; note = 2'-fluorouridine-3'-phosphate
  modified_base 11: mod_base = OTHER; note = 2'-fluorocytidine-3'-phosphate
  modified_base 12: mod_base = OTHER; note = 2'-O-methyluridine-3'-phosphate
  modified_base 13: mod_base = OTHER; note = 2'-O-methyladenosine-3'-phosphate
  modified_base 14: mod_base = OTHER; note = 2'-O-methyluridine-3'-phosphate
  modified_base 15: mod_base = OTHER; note = 2'-O-methyladenosine-3'-phosphate
  modified_base 16: mod_base = OTHER; note = 2'-O-methyluridine-3'-phosphate
  modified_base 17: mod_base = OTHER; note = 2'-O-methylcytidine-3'-phosphate
  modified_base 18: mod_base = OTHER; note = 2'-O-methyluridine-3'-phosphate
  modified_base 19: mod_base = OTHER; note = 2'-O-methyluridine-3'-phosphorothioate
  modified_base 20: mod_base = OTHER; note = 2'-O-methyluridine-3'-phosphorothioate
  modified_base 21: mod_base = OTHER; note = 2'-O-methyladenosine-3'-phosphate
agcttggaatctatatcttta

SEQ ID NO: 3826 - RNA, 21 nt, synthetic construct
  source 1..21: mol_type = other RNA
  modified_base 1: mod_base = OTHER; note = 2'-O-methyluridine-3'-phosphorothioate
  modified_base 2: mod_base = OTHER; note = 2'-O-methyluridine-3'-phosphorothioate
  modified_base 3: mod_base = OTHER; note = 2'-O-methyladenosine-3'-phosphate
  modified_base 4: mod_base = OTHER; note = 2'-O-methyluridine-3'-phosphate
  modified_base 5: mod_base = OTHER; note = 2'-O-methyluridine-3'-phosphate
  modified_base 6: mod_base = OTHER; note (2R,3S,4S,5R)-5-(6-amino-9H-purin-9-yl)-4-(docosyloxy)-2-(h ydroxymethyl)tetrahydrofuran-3-ol
  modified_base 7: mod_base = OTHER; note = 2'-fluorouridine-3'-phosphate
  modified_base 8: mod_base = OTHER; note = 2'-O-methyluridine-3'-phosphate
  modified_base 9: mod_base = OTHER; note = 2'-fluorouridine-3'-phosphate
  modified_base 10: mod_base = OTHER; note = 2'-fluorocytidine-3'-phosphate
  modified_base 11: mod_base = OTHER; note = 2'-fluorouridine-3'-phosphate
  modified_base 12: mod_base = OTHER; note = 2'-O-methylguanosine-3'-phosphate
  modified_base 13: mod_base = OTHER; note = 2'-O-methyladenosine-3'-phosphate
  modified_base 14: mod_base = OTHER; note = 2'-O-methyladenosine-3'-phosphate
  modified_base 15: mod_base = OTHER; note = 2'-O-methylguanosine-3'-phosphate
  modified_base 16: mod_base = OTHER; note = 2'-O-methylcytidine-3'-phosphate
  modified_base 17: mod_base = OTHER; note = 2'-O-methylcytidine-3'-phosphate
  modified_base 18: mod_base = OTHER; note = 2'-O-methyluridine-3'-phosphate
  modified_base 19: mod_base = OTHER; note = 2'-O-methyladenosine-3'-phosphorothioate
  modified_base 20: mod_base = OTHER; note = 2'-O-methyladenosine-3'-phosphorothioate
  modified_base 21: mod_base = OTHER; note = 2'-O-methyladenosine-3'-phosphate
ttattatttctgaagcctaaa

SEQ ID NO: 3827 - RNA, 21 nt, synthetic construct
  source 1..21: mol_type = other RNA
  modified_base 1: mod_base = OTHER; note = 2'-O-methylcytidine-3'-phosphorothioate
  modified_base 2: mod_base = OTHER; note = 2'-O-methylcytidine-3'-phosphorothioate
  modified_base 3: mod_base = OTHER; note = 2'-O-methyluridine-3'-phosphate
  modified_base 4: mod_base = OTHER; note = 2'-O-methyluridine-3'-phosphate
  modified_base 5: mod_base = OTHER; note = 2'-O-methyluridine-3'-phosphate
  modified_base 6: mod_base = OTHER; note 2-amino-9-((2R,3S,4S,5R)-3-(docosyloxy)-4-hydroxy-5-(hydrox ymethyl)tetrahydrofuran-2-yl)-1,9-dihydro-6H-purin-6-one
  modified_base 7: mod_base = OTHER; note = 2'-fluorouridine-3'-phosphate
  modified_base 8: mod_base = OTHER; note = 2'-O-methyluridine-3'-phosphate
  modified_base 9: mod_base = OTHER; note = 2'-fluoroguanosine-3'-phosphate
  modified_base 10: mod_base = OTHER; note = 2'-fluorouridine-3'-phosphate
  modified_base 11: mod_base = OTHER; note = 2'-fluoroadenosine-3'-phosphate
  modified_base 12: mod_base = OTHER; note = 2'-O-methyluridine-3'-phosphate
  modified_base 13: mod_base = OTHER; note = 2'-O-methyluridine-3'-phosphate
  modified_base 14: mod_base = OTHER; note = 2'-O-methyluridine-3'-phosphate
  modified_base 15: mod_base = OTHER; note = 2'-O-methyladenosine-3'-phosphate
  modified_base 16: mod_base = OTHER; note = 2'-O-methyladenosine-3'-phosphate
  modified_base 17: mod_base = OTHER; note = 2'-O-methylcytidine-3'-phosphate
  modified_base 18: mod_base = OTHER; note = 2'-O-methyladenosine-3'-phosphate
  modified_base 19: mod_base = OTHER; note = 2'-O-methyladenosine-3'-phosphorothioate
  modified_base 20: mod_base = OTHER; note = 2'-O-methyladenosine-3'-phosphorothioate
  modified_base 21: mod_base = OTHER; note = 2'-O-methyladenosine-3'-phosphate
cctttgttgtatttaacaaaa

SEQ ID NO: 3828 - RNA, 21 nt, synthetic construct
  source 1..21: mol_type = other RNA
  modified_base 1: mod_base = OTHER; note = 2'-O-methylguanosine-3'-phosphorothioate
  modified_base 2: mod_base = OTHER; note = 2'-O-methylcytidine-3'-phosphorothioate
  modified_base 3: mod_base = OTHER; note = 2'-O-methyluridine-3'-phosphate
  modified_base 4: mod_base = OTHER; note = 2'-O-methylcytidine-3'-phosphate
  modified_base 5: mod_base = OTHER; note = 2'-O-methyluridine-3'-phosphate
  modified_base 6: mod_base = OTHER; note 4-amino-1-((2R,3R,4R,5R)-3-(docosyloxy)-4-hydroxy-5-(hydrox ymethyl)tetrahydrofuran-2-yl)pyrimidin-2(1H)-one
  modified_base 7: mod_base = OTHER; note = 2'-fluorouridine-3'-phosphate
  modified_base 8: mod_base = OTHER; note = 2'-O-methyladenosine-3'-phosphate
  modified_base 9: mod_base = OTHER; note = 2'-fluoroadenosine-3'-phosphate
  modified_base 10: mod_base = OTHER; note = 2'-fluorocytidine-3'-phosphate
  modified_base 11: mod_base = OTHER; note = 2'-fluorouridine-3'-phosphate
  modified_base 12: mod_base = OTHER; note = 2'-O-methyladenosine-3'-phosphate
  modified_base 13: mod_base = OTHER; note = 2'-O-methyladenosine-3'-phosphate
  modified_base 14: mod_base = OTHER; note = 2'-O-methyluridine-3'-phosphate
  modified_base 15: mod_base = OTHER; note = 2'-O-methylcytidine-3'-phosphate
  modified_base 16: mod_base = OTHER; note = 2'-O-methylguanosine-3'-phosphate
  modified_base 17: mod_base = OTHER; note = 2'-O-methyladenosine-3'-phosphate
  modified_base 18: mod_base = OTHER; note = 2'-O-methyluridine-3'-phosphate
  modified_base 19: mod_base = OTHER; note = 2'-O-methylcytidine-3'-phosphorothioate
  modified_base 20: mod_base = OTHER; note = 2'-O-methyladenosine-3'-phosphorothioate
  modified_base 21: mod_base = OTHER; note = 2'-O-methyladenosine-3'-phosphate
gctctctaactaatcgatcaa

SEQ ID NO: 3829 - RNA, 21 nt, synthetic construct
  source 1..21: mol_type = other RNA
  modified_base 1: mod_base = OTHER; note = 2'-O-methyladenosine-3'-phosphorothioate
  modified_base 2: mod_base = OTHER; note = 2'-O-methyladenosine-3'-phosphorothioate
  modified_base 3: mod_base = OTHER; note = 2'-O-methyladenosine-3'-phosphate
  modified_base 4: mod_base = OTHER; note = 2'-O-methylguanosine-3'-phosphate
  modified_base 5: mod_base = OTHER; note = 2'-O-methyladenosine-3'-phosphate
  modified_base 6: mod_base = OTHER; note 4-amino-1-((2R,3R,4R,5R)-3-(docosyloxy)-4-hydroxy-5-(hydrox ymethyl)tetrahydrofuran-2-yl)pyrimidin-2(1H)-one
  modified_base 7: mod_base = OTHER; note = 2'-fluorouridine-3'-phosphate
  modified_base 8: mod_base = OTHER; note = 2'-O-methyladenosine-3'-phosphate
  modified_base 9: mod_base = OTHER; note = 2'-fluorocytidine-3'-phosphate
  modified_base 10: mod_base = OTHER; note = 2'-fluoroadenosine-3'-phosphate
  modified_base 11: mod_base = OTHER; note = 2'-fluorouridine-3'-phosphate
  modified_base 12: mod_base = OTHER; note = 2'-O-methylguanosine-3'-phosphate
  modified_base 13: mod_base = OTHER; note = 2'-O-methyladenosine-3'-phosphate
  modified_base 14: mod_base = OTHER; note = 2'-O-methylcytidine-3'-phosphate
  modified_base 15: mod_base = OTHER; note = 2'-O-methyladenosine-3'-phosphate
  modified_base 16: mod_base = OTHER; note = 2'-O-methylguanosine-3'-phosphate
  modified_base 17: mod_base = OTHER; note = 2'-O-methyladenosine-3'-phosphate
  modified_base 18: mod_base = OTHER; note = 2'-O-methyladenosine-3'-phosphate
  modified_base 19: mod_base = OTHER; note = 2'-O-methyladenosine-3'-phosphorothioate
  modified_base 20: mod_base = OTHER; note = 2'-O-methyluridine-3'-phosphorothioate
  modified_base 21: mod_base = OTHER; note = 2'-O-methyladenosine-3'-phosphate
aaagactacatgacagaaata

SEQ ID NO: 3830 - RNA, 21 nt, synthetic construct
  source 1..21: mol_type = other RNA
  modified_base 1: mod_base = OTHER; note = 2'-O-methylcytidine-3'-phosphorothioate
  modified_base 2: mod_base = OTHER; note = 2'-O-methyladenosine-3'-phosphorothioate
  modified_base 3: mod_base = OTHER; note = 2'-O-methylguanosine-3'-phosphate
  modified_base 4: mod_base = OTHER; note = 2'-O-methylguanosine-3'-phosphate
  modified_base 5: mod_base = OTHER; note = 2'-O-methyladenosine-3'-phosphate
  modified_base 6: mod_base = OTHER; note 1-((2R,3R,4R,5R)-3-(docosyloxy)-4-hydroxy-5-(hydroxymethyl) tetrahydrofuran-2-yl)pyrimidine-2,4(1H,3H)-dione
  modified_base 7: mod_base = OTHER; note = 2'-fluorouridine-3'-phosphate
  modified_base 8: mod_base = OTHER; note = 2'-O-methylcytidine-3'-phosphate
  modified_base 9: mod_base = OTHER; note = 2'-fluoroguanosine-3'-phosphate
  modified_base 10: mod_base = OTHER; note = 2'-fluorouridine-3'-phosphate
  modified_base 11: mod_base = OTHER; note = 2'-fluoroadenosine-3'-phosphate
  modified_base 12: mod_base = OTHER; note = 2'-O-methyluridine-3'-phosphate
  modified_base 13: mod_base = OTHER; note = 2'-O-methyluridine-3'-phosphate
  modified_base 14: mod_base = OTHER; note = 2'-O-methyluridine-3'-phosphate
  modified_base 15: mod_base = OTHER; note = 2'-O-methyluridine-3'-phosphate
  modified_base 16: mod_base = OTHER; note = 2'-O-methyluridine-3'-phosphate
  modified_base 17: mod_base = OTHER; note = 2'-O-methyladenosine-3'-phosphate
  modified_base 18: mod_base = OTHER; note = 2'-O-methyladenosine-3'-phosphate
  modified_base 19: mod_base = OTHER; note = 2'-O-methyladenosine-3'-phosphorothioate
  modified_base 20: mod_base = OTHER; note = 2'-O-methylguanosine-3'-phosphorothioate
  modified_base 21: mod_base = OTHER; note = 2'-O-methyladenosine-3'-phosphate
caggattcgtatttttaaaga

SEQ ID NO: 3831 - RNA, 21 nt, synthetic construct
  source 1..21: mol_type = other RNA
  modified_base 1: mod_base = OTHER; note = 2'-O-methylcytidine-3'-phosphorothioate
  modified_base 2: mod_base = OTHER; note = 2'-O-methylcytidine-3'-phosphorothioate
  modified_base 3: mod_base = OTHER; note = 2'-O-methyluridine-3'-phosphate
  modified_base 4: mod_base = OTHER; note = 2'-O-methyluridine-3'-phosphate
  modified_base 5: mod_base = OTHER; note = 2'-O-methylguanosine-3'-phosphate
  modified_base 6: mod_base = OTHER; note 4-amino-1-((2R,3R,4R,5R)-3-(docosyloxy)-4-hydroxy-5-(hydrox ymethyl)tetrahydrofuran-2-yl)pyrimidin-2(1H)-one
  modified_base 7: mod_base = OTHER; note = 2'-fluorouridine-3'-phosphate
  modified_base 8: mod_base = OTHER; note = 2'-O-methyladenosine-3'-phosphate
  modified_base 9: mod_base = OTHER; note = 2'-fluoroadenosine-3'-phosphate
  modified_base 10: mod_base = OTHER; note = 2'-fluoroguanosine-3'-phosphate
  modified_base 11: mod_base = OTHER; note = 2'-fluorouridine-3'-phosphate
  modified_base 12: mod_base = OTHER; note = 2'-O-methyladenosine-3'-phosphate
  modified_base 13: mod_base = OTHER; note = 2'-O-methyladenosine-3'-phosphate
  modified_base 14: mod_base = OTHER; note = 2'-O-methyluridine-3'-phosphate
  modified_base 15: mod_base = OTHER; note = 2'-O-methyluridine-3'-phosphate
  modified_base 16: mod_base = OTHER; note = 2'-O-methylguanosine-3'-phosphate
  modified_base 17: mod_base = OTHER; note = 2'-O-methyladenosine-3'-phosphate
  modified_base 18: mod_base = OTHER; note = 2'-O-methylcytidine-3'-phosphate
  modified_base 19: mod_base = OTHER; note = 2'-O-methyladenosine-3'-phosphorothioate
  modified_base 20: mod_base = OTHER; note = 2'-O-methyluridine-3'-phosphorothioate
  modified_base 21: mod_base = OTHER; note = 2'-O-methyladenosine-3'-phosphate
ccttgctaagtaattgacata

SEQ ID NO: 3832 - RNA, 21 nt, synthetic construct
  source 1..21: mol_type = other RNA
  modified_base 1: mod_base = OTHER; note = 2'-O-methylcytidine-3'-phosphorothioate
  modified_base 2: mod_base = OTHER; note = 2'-O-methylcytidine-3'-phosphorothioate
  modified_base 3: mod_base = OTHER; note = 2'-O-methyluridine-3'-phosphate
  modified_base 4: mod_base = OTHER; note = 2'-O-methyladenosine-3'-phosphate
  modified_base 5: mod_base = OTHER; note = 2'-O-methyluridine-3'-phosphate
  modified_base 6: mod_base = OTHER; note 2-amino-9-((2R,3S,4S,5R)-3-(docosyloxy)-4-hydroxy-5-(hydrox ymethyl)tetrahydrofuran-2-yl)-1,9-dihydro-6H-purin-6-one
  modified_base 7: mod_base = OTHER; note = 2'-fluorocytidine-3'-phosphate
  modified_base 8: mod_base = OTHER; note = 2'-O-methyladenosine-3'-phosphate
  modified_base 9: mod_base = OTHER; note = 2'-fluorocytidine-3'-phosphate
  modified_base 10: mod_base = OTHER; note = 2'-fluorouridine-3'-phosphate
  modified_base 11: mod_base = OTHER; note = 2'-fluorouridine-3'-phosphate
  modified_base 12: mod_base = OTHER; note = 2'-O-methyluridine-3'-phosphate
  modified_base 13: mod_base = OTHER; note = 2'-O-methylcytidine-3'-phosphate
  modified_base 14: mod_base = OTHER; note = 2'-O-methyladenosine-3'-phosphate
  modified_base 15: mod_base = OTHER; note = 2'-O-methylcytidine-3'-phosphate
  modified_base 16: mod_base = OTHER; note = 2'-O-methyladenosine-3'-phosphate
  modified_base 17: mod_base = OTHER; note = 2'-O-methylguanosine-3'-phosphate
  modified_base 18: mod_base = OTHER; note = 2'-O-methylguanosine-3'-phosphate
  modified_base 19: mod_base = OTHER; note = 2'-O-methyladenosine-3'-phosphorothioate
  modified_base 20: mod_base = OTHER; note = 2'-O-methyladenosine-3'-phosphorothioate
  modified_base 21: mod_base = OTHER; note = 2'-O-methyladenosine-3'-phosphate
cctatgcactttcacaggaaa

SEQ ID NO: 3833 - RNA, 21 nt, synthetic construct
  source 1..21: mol_type = other RNA
  modified_base 1: mod_base = OTHER; note = 2'-O-methyladenosine-3'-phosphorothioate
  modified_base 2: mod_base = OTHER; note = 2'-O-methyluridine-3'-phosphorothioate
  modified_base 3: mod_base = OTHER; note = 2'-O-methylguanosine-3'-phosphate
  modified_base 4: mod_base = OTHER; note = 2'-O-methylcytidine-3'-phosphate
  modified_base 5: mod_base = OTHER; note = 2'-O-methyluridine-3'-phosphate
  modified_base 6: mod_base = OTHER; note 2-amino-9-((2R,3S,4S,5R)-3-(docosyloxy)-4-hydroxy-5-(hydrox ymethyl)tetrahydrofuran-2-yl)-1,9-dihydro-6H-purin-6-one
  modified_base 7: mod_base = OTHER; note = 2'-fluoroadenosine-3'-phosphate
  modified_base 8: mod_base = OTHER; note = 2'-O-methyladenosine-3'-phosphate
  modified_base 9: mod_base = OTHER; note = 2'-fluoroadenosine-3'-phosphate
  modified_base 10: mod_base = OTHER; note = 2'-fluorouridine-3'-phosphate
  modified_base 11: mod_base = OTHER; note = 2'-fluoroadenosine-3'-phosphate
  modified_base 12: mod_base = OTHER; note = 2'-O-methyluridine-3'-phosphate
  modified_base 13: mod_base = OTHER; note = 2'-O-methylguanosine-3'-phosphate
  modified_base 14: mod_base = OTHER; note = 2'-O-methyluridine-3'-phosphate
  modified_base 15: mod_base = OTHER; note = 2'-O-methyluridine-3'-phosphate
  modified_base 16: mod_base = OTHER; note = 2'-O-methyluridine-3'-phosphate
  modified_base 17: mod_base = OTHER; note = 2'-O-methylcytidine-3'-phosphate
  modified_base 18: mod_base = OTHER; note = 2'-O-methyladenosine-3'-phosphate
  modified_base 19: mod_base = OTHER; note = 2'-O-methyladenosine-3'-phosphorothioate
  modified_base 20: mod_base = OTHER; note = 2'-O-methylcytidine-3'-phosphorothioate
  modified_base 21: mod_base = OTHER; note = 2'-O-methyladenosine-3'-phosphate
atgctgaaatatgtttcaaca

SEQ ID NO: 3834 - RNA, 21 nt, synthetic construct
  source 1..21: mol_type = other RNA
  modified_base 1: mod_base = OTHER; note = 2'-O-methylcytidine-3'-phosphorothioate
  modified_base 2: mod_base = OTHER; note = 2'-O-methylcytidine-3'-phosphorothioate
  modified_base 3: mod_base = OTHER; note = 2'-O-methyluridine-3'-phosphate
  modified_base 4: mod_base = OTHER; note = 2'-O-methyluridine-3'-phosphate
  modified_base 5: mod_base = OTHER; note = 2'-O-methyluridine-3'-phosphate
  modified_base 6: mod_base = OTHER; note 1-((2R,3R,4R,5R)-3-(docosyloxy)-4-hydroxy-5-(hydroxymethyl) tetrahydrofuran-2-yl)pyrimidine-2,4(1H,3H)-dione
  modified_base 7: mod_base = OTHER; note = 2'-fluoroadenosine-3'-phosphate
  modified_base 8: mod_base = OTHER; note = 2'-O-methyladenosine-3'-phosphate
  modified_base 9: mod_base = OTHER; note = 2'-fluorouridine-3'-phosphate
  modified_base 10: mod_base = OTHER; note = 2'-fluorouridine-3'-phosphate
  modified_base 11: mod_base = OTHER; note = 2'-fluorocytidine-3'-phosphate
  modified_base 12: mod_base = OTHER; note = 2'-O-methyladenosine-3'-phosphate
  modified_base 13: mod_base = OTHER; note = 2'-O-methyladenosine-3'-phosphate
  modified_base 14: mod_base = OTHER; note = 2'-O-methyladenosine-3'-phosphate
  modified_base 15: mod_base = OTHER; note = 2'-O-methyluridine-3'-phosphate
  modified_base 16: mod_base = OTHER; note = 2'-O-methylcytidine-3'-phosphate
  modified_base 17: mod_base = OTHER; note = 2'-O-methyluridine-3'-phosphate
  modified_base 18: mod_base = OTHER; note = 2'-O-methyladenosine-3'-phosphate
  modified_base 19: mod_base = OTHER; note = 2'-O-methylcytidine-3'-phosphorothioate
  modified_base 20: mod_base = OTHER; note = 2'-O-methyluridine-3'-phosphorothioate
  modified_base 21: mod_base = OTHER; note = 2'-O-methyladenosine-3'-phosphate
ccttttaattcaaatctacta

SEQ ID NO: 3835 - RNA, 21 nt, synthetic construct
  source 1..21: mol_type = other RNA
  modified_base 1: mod_base = OTHER; note = 2'-O-methyladenosine-3'-phosphorothioate
  modified_base 2: mod_base = OTHER; note = 2'-O-methylcytidine-3'-phosphorothioate
  modified_base 3: mod_base = OTHER; note = 2'-O-methyluridine-3'-phosphate
  modified_base 4: mod_base = OTHER; note = 2'-O-methylguanosine-3'-phosphate
  modified_base 5: mod_base = OTHER; note = 2'-O-methylguanosine-3'-phosphate
  modified_base 6: mod_base = OTHER; note (2R,3S,4S,5R)-5-(6-amino-9H-purin-9-yl)-4-(docosyloxy)-2-(h ydroxymethyl)tetrahydrofuran-3-ol
  modified_base 7: mod_base = OTHER; note = 2'-fluorocytidine-3'-phosphate
  modified_base 8: mod_base = OTHER; note = 2'-O-methyluridine-3'-phosphate
  modified_base 9: mod_base = OTHER; note = 2'-fluorouridine-3'-phosphate
  modified_base 10: mod_base = OTHER; note = 2'-fluoroadenosine-3'-phosphate
  modified_base 11: mod_base = OTHER; note = 2'-fluorouridine-3'-phosphate
  modified_base 12: mod_base = OTHER; note = 2'-O-methyluridine-3'-phosphate
  modified_base 13: mod_base = OTHER; note = 2'-O-methylguanosine-3'-phosphate
  modified_base 14: mod_base = OTHER; note = 2'-O-methylguanosine-3'-phosphate
  modified_base 15: mod_base = OTHER; note = 2'-O-methyladenosine-3'-phosphate
  modified_base 16: mod_base = OTHER; note = 2'-O-methyluridine-3'-phosphate
  modified_base 17: mod_base = OTHER; note = 2'-O-methyluridine-3'-phosphate
  modified_base 18: mod_base = OTHER; note = 2'-O-methyluridine-3'-phosphate
  modified_base 19: mod_base = OTHER; note = 2'-O-methyladenosine-3'-phosphorothioate
  modified_base 20: mod_base = OTHER; note = 2'-O-methyladenosine-3'-phosphorothioate
  modified_base 21: mod_base = OTHER; note = 2'-O-methyladenosine-3'-phosphate
actggacttattggatttaaa

SEQ ID NO: 3836 - RNA, 21 nt, synthetic construct
  source 1..21: mol_type = other RNA
  modified_base 1: mod_base = OTHER; note = 2'-O-methylcytidine-3'-phosphorothioate
  modified_base 2: mod_base = OTHER; note = 2'-O-methyladenosine-3'-phosphorothioate
  modified_base 3: mod_base = OTHER; note = 2'-O-methyluridine-3'-phosphate
  modified_base 4: mod_base = OTHER; note = 2'-O-methylcytidine-3'-phosphate
  modified_base 5: mod_base = OTHER; note = 2'-O-methyluridine-3'-phosphate
  modified_base 6: mod_base = OTHER; note 2-amino-9-((2R,3S,4S,5R)-3-(docosyloxy)-4-hydroxy-5-(hydrox ymethyl)tetrahydrofuran-2-yl)-1,9-dihydro-6H-purin-6-one
  modified_base 7: mod_base = OTHER; note = 2'-fluoroadenosine-3'-phosphate
  modified_base 8: mod_base = OTHER; note = 2'-O-methyladenosine-3'-phosphate
  modified_base 9: mod_base = OTHER; note = 2'-fluorouridine-3'-phosphate
  modified_base 10: mod_base = OTHER; note = 2'-fluorocytidine-3'-phosphate
  modified_base 11: mod_base = OTHER; note = 2'-fluoroadenosine-3'-phosphate
  modified_base 12: mod_base = OTHER; note = 2'-O-methylguanosine-3'-phosphate
  modified_base 13: mod_base = OTHER; note = 2'-O-methyladenosine-3'-phosphate
  modified_base 14: mod_base = OTHER; note = 2'-O-methyluridine-3'-phosphate
  modified_base 15: mod_base = OTHER; note = 2'-O-methylguanosine-3'-phosphate
  modified_base 16: mod_base = OTHER; note = 2'-O-methylguanosine-3'-phosphate
  modified_base 17: mod_base = OTHER; note = 2'-O-methyluridine-3'-phosphate
  modified_base 18: mod_base = OTHER; note = 2'-O-methyladenosine-3'-phosphate
  modified_base 19: mod_base = OTHER; note = 2'-O-methylcytidine-3'-phosphorothioate
  modified_base 20: mod_base = OTHER; note = 2'-O-methyladenosine-3'-phosphorothioate
  modified_base 21: mod_base = OTHER; note = 2'-O-methyladenosine-3'-phosphate
catctgaatcagatggtacaa

SEQ ID NO: 3837 - RNA, 21 nt, synthetic construct
  source 1..21: mol_type = other RNA
  modified_base 1: mod_base = OTHER; note = 2'-O-methyladenosine-3'-phosphorothioate
  modified_base 2: mod_base = OTHER; note = 2'-O-methyladenosine-3'-phosphorothioate
  modified_base 3: mod_base = OTHER; note = 2'-O-methyluridine-3'-phosphate
  modified_base 4: mod_base = OTHER; note = 2'-O-methyluridine-3'-phosphate
  modified_base 5: mod_base = OTHER; note = 2'-O-methylcytidine-3'-phosphate
  modified_base 6: mod_base = OTHER; note 1-((2R,3R,4R,5R)-3-(docosyloxy)-4-hydroxy-5-(hydroxymethyl) tetrahydrofuran-2-yl)pyrimidine-2,4(1H,3H)-dione
  modified_base 7: mod_base = OTHER; note = 2'-fluoroguanosine-3'-phosphate
  modified_base 8: mod_base = OTHER; note = 2'-O-methyladenosine-3'-phosphate
  modified_base 9: mod_base = OTHER; note = 2'-fluorouridine-3'-phosphate
  modified_base 10: mod_base = OTHER; note = 2'-fluoroadenosine-3'-phosphate
  modified_base 11: mod_base = OTHER; note = 2'-fluoroguanosine-3'-phosphate
  modified_base 12: mod_base = OTHER; note = 2'-O-methylcytidine-3'-phosphate
  modified_base 13: mod_base = OTHER; note = 2'-O-methyladenosine-3'-phosphate
  modified_base 14: mod_base = OTHER; note = 2'-O-methyladenosine-3'-phosphate
  modified_base 15: mod_base = OTHER; note = 2'-O-methyluridine-3'-phosphate
  modified_base 16: mod_base = OTHER; note = 2'-O-methylcytidine-3'-phosphate
  modified_base 17: mod_base = OTHER; note = 2'-O-methyluridine-3'-phosphate
  modified_base 18: mod_base = OTHER; note = 2'-O-methylguanosine-3'-phosphate
  modified_base 19: mod_base = OTHER; note = 2'-O-methyluridine-3'-phosphorothioate
  modified_base 20: mod_base = OTHER; note = 2'-O-methylguanosine-3'-phosphorothioate
  modified_base 21: mod_base = OTHER; note = 2'-O-methyladenosine-3'-phosphate
aattctgatagcaatctgtga

SEQ ID NO: 3838 - RNA, 21 nt, synthetic construct
  source 1..21: mol_type = other RNA
  modified_base 1: mod_base = OTHER; note = 2'-O-methyluridine-3'-phosphorothioate
  modified_base 2: mod_base = OTHER; note = 2'-O-methylcytidine-3'-phosphorothioate
  modified_base 3: mod_base = OTHER; note = 2'-O-methyladenosine-3'-phosphate
  modified_base 4: mod_base = OTHER; note = 2'-O-methyladenosine-3'-phosphate
  modified_base 5: mod_base = OTHER; note = 2'-O-methylguanosine-3'-phosphate
  modified_base 6: mod_base = OTHER; note 1-((2R,3R,4R,5R)-3-(docosyloxy)-4-hydroxy-5-(hydroxymethyl) tetrahydrofuran-2-yl)pyrimidine-2,4(1H,3H)-dione
  modified_base 7: mod_base = OTHER; note = 2'-fluorocytidine-3'-phosphate
  modified_base 8: mod_base = OTHER; note = 2'-O-methyladenosine-3'-phosphate
  modified_base 9: mod_base = OTHER; note = 2'-fluoroadenosine-3'-phosphate
  modified_base 10: mod_base = OTHER; note = 2'-fluoroguanosine-3'-phosphate
  modified_base 11: mod_base = OTHER; note = 2'-fluoroguanosine-3'-phosphate
  modified_base 12: mod_base = OTHER; note = 2'-O-methyladenosine-3'-phosphate
  modified_base 13: mod_base = OTHER; note = 2'-O-methyluridine-3'-phosphate
  modified_base 14: mod_base = OTHER; note = 2'-O-methylguanosine-3'-phosphate
  modified_base 15: mod_base = OTHER; note = 2'-O-methylcytidine-3'-phosphate
  modified_base 16: mod_base = OTHER; note = 2'-O-methyluridine-3'-phosphate
  modified_base 17: mod_base = OTHER; note = 2'-O-methyladenosine-3'-phosphate
  modified_base 18: mod_base = OTHER; note = 2'-O-methyluridine-3'-phosphate
  modified_base 19: mod_base = OTHER; note = 2'-O-methylcytidine-3'-phosphorothioate
  modified_base 20: mod_base = OTHER; note = 2'-O-methyluridine-3'-phosphorothioate
  modified_base 21: mod_base = OTHER; note = 2'-O-methyladenosine-3'-phosphate
tcaagtcaaggatgctatcta

SEQ ID NO: 3839 - RNA, 21 nt, synthetic construct
  source 1..21: mol_type = other RNA
  modified_base 1: mod_base = OTHER; note = 2'-O-methyluridine-3'-phosphorothioate
  modified_base 2: mod_base = OTHER; note = 2'-O-methylcytidine-3'-phosphorothioate
  modified_base 3: mod_base = OTHER; note = 2'-O-methyladenosine-3'-phosphate
  modified_base 4: mod_base = OTHER; note = 2'-O-methylcytidine-3'-phosphate
  modified_base 5: mod_base = OTHER; note = 2'-O-methyluridine-3'-phosphate
  modified_base 6: mod_base = OTHER; note 2-amino-9-((2R,3S,4S,5R)-3-(docosyloxy)-4-hydroxy-5-(hydrox ymethyl)tetrahydrofuran-2-yl)-1,9-dihydro-6H-purin-6-one
  modified_base 7: mod_base = OTHER; note = 2'-fluoroadenosine-3'-phosphate
  modified_base 8: mod_base = OTHER; note = 2'-O-methyladenosine-3'-phosphate
  modified_base 9: mod_base = OTHER; note = 2'-fluoroadenosine-3'-phosphate
  modified_base 10: mod_base = OTHER; note = 2'-fluoroadenosine-3'-phosphate
  modified_base 11: mod_base = OTHER; note = 2'-fluorocytidine-3'-phosphate
  modified_base 12: mod_base = OTHER; note = 2'-O-methylcytidine-3'-phosphate
  modified_base 13: mod_base = OTHER; note = 2'-O-methyladenosine-3'-phosphate
  modified_base 14: mod_base = OTHER; note = 2'-O-methylcytidine-3'-phosphate
  modified_base 15: mod_base = OTHER; note = 2'-O-methyladenosine-3'-phosphate
  modified_base 16: mod_base = OTHER; note = 2'-O-methyladenosine-3'-phosphate
  modified_base 17: mod_base = OTHER; note = 2'-O-methylguanosine-3'-phosphate
  modified_base 18: mod_base = OTHER; note = 2'-O-methyladenosine-3'-phosphate
  modified_base 19: mod_base = OTHER; note = 2'-O-methyluridine-3'-phosphorothioate
  modified_base 20: mod_base = OTHER; note = 2'-O-methyladenosine-3'-phosphorothioate
  modified_base 21: mod_base = OTHER; note = 2'-O-methyladenosine-3'-phosphate
tcactgaaaaccacaagataa

SEQ ID NO: 3840 - RNA, 21 nt, synthetic construct
  source 1..21: mol_type = other RNA
  modified_base 1: mod_base = OTHER; note = 2'-O-methyladenosine-3'-phosphorothioate
  modified_base 2: mod_base = OTHER; note = 2'-O-methylcytidine-3'-phosphorothioate
  modified_base 3: mod_base = OTHER; note = 2'-O-methylcytidine-3'-phosphate
  modified_base 4: mod_base = OTHER; note = 2'-O-methyluridine-3'-phosphate
  modified_base 5: mod_base = OTHER; note = 2'-O-methylguanosine-3'-phosphate
  modified_base 6: mod_base = OTHER; note 1-((2R,3R,4R,5R)-3-(docosyloxy)-4-hydroxy-5-(hydroxymethyl) tetrahydrofuran-2-yl)pyrimidine-2,4(1H,3H)-dione
  modified_base 7: mod_base = OTHER; note = 2'-fluorouridine-3'-phosphate
  modified_base 8: mod_base = OTHER; note = 2'-O-methylguanosine-3'-phosphate
  modified_base 9: mod_base = OTHER; note = 2'-fluoroadenosine-3'-phosphate
  modified_base 10: mod_base = OTHER; note = 2'-fluoroadenosine-3'-phosphate
  modified_base 11: mod_base = OTHER; note = 2'-fluorocytidine-3'-phosphate
  modified_base 12: mod_base = OTHER; note = 2'-O-methyladenosine-3'-phosphate
  modified_base 13: mod_base = OTHER; note = 2'-O-methylguanosine-3'-phosphate
  modified_base 14: mod_base = OTHER; note = 2'-O-methyluridine-3'-phosphate
  modified_base 15: mod_base = OTHER; note = 2'-O-methylcytidine-3'-phosphate
  modified_base 16: mod_base = OTHER; note = 2'-O-methyluridine-3'-phosphate
  modified_base 17: mod_base = OTHER; note = 2'-O-methyluridine-3'-phosphate
  modified_base 18: mod_base = OTHER; note = 2'-O-methylcytidine-3'-phosphate
  modified_base 19: mod_base = OTHER; note = 2'-O-methyladenosine-3'-phosphorothioate
  modified_base 20: mod_base = OTHER; note = 2'-O-methyladenosine-3'-phosphorothioate
  modified_base 21: mod_base = OTHER; note = 2'-O-methyladenosine-3'-phosphate
acctgttgaacagtcttcaaa

SEQ ID NO: 3841 - RNA, 21 nt, synthetic construct
  source 1..21: mol_type = other RNA
  modified_base 1: mod_base = OTHER; note = 2'-O-methyluridine-3'-phosphorothioate
  modified_base 2: mod_base = OTHER; note = 2'-O-methylcytidine-3'-phosphorothioate
  modified_base 3: mod_base = OTHER; note = 2'-O-methyladenosine-3'-phosphate
  modified_base 4: mod_base = OTHER; note = 2'-O-methyladenosine-3'-phosphate
  modified_base 5: mod_base = OTHER; note = 2'-O-methylguanosine-3'-phosphate
  modified_base 6: mod_base = OTHER; note 1-((2R,3R,4R,5R)-3-(docosyloxy)-4-hydroxy-5-(hydroxymethyl) tetrahydrofuran-2-yl)pyrimidine-2,4(1H,3H)-dione
  modified_base 7: mod_base = OTHER; note = 2'-fluoroguanosine-3'-phosphate
  modified_base 8: mod_base = OTHER; note = 2'-O-methyladenosine-3'-phosphate
  modified_base 9: mod_base = OTHER; note = 2'-fluorocytidine-3'-phosphate
  modified_base 10: mod_base = OTHER; note = 2'-fluoroadenosine-3'-phosphate
  modified_base 11: mod_base = OTHER; note = 2'-fluorouridine-3'-phosphate
  modified_base 12: mod_base = OTHER; note = 2'-O-methyladenosine-3'-phosphate
  modified_base 13: mod_base = OTHER; note = 2'-O-methyluridine-3'-phosphate
  modified_base 14: mod_base = OTHER; note = 2'-O-methyluridine-3'-phosphate
  modified_base 15: mod_base = OTHER; note = 2'-O-methyluridine-3'-phosphate
  modified_base 16: mod_base = OTHER; note = 2'-O-methylcytidine-3'-phosphate
  modified_base 17: mod_base = OTHER; note = 2'-O-methyladenosine-3'-phosphate
  modified_base 18: mod_base = OTHER; note = 2'-O-methylguanosine-3'-phosphate
  modified_base 19: mod_base = OTHER; note = 2'-O-methyluridine-3'-phosphorothioate
  modified_base 20: mod_base = OTHER; note = 2'-O-methyluridine-3'-phosphorothioate
  modified_base 21: mod_base = OTHER; note = 2'-O-methyladenosine-3'-phosphate
tcaagtgacatatttcagtta

SEQ ID NO: 3842 - RNA, 21 nt, synthetic construct
  source 1..21: mol_type = other RNA
  modified_base 1: mod_base = OTHER; note = 2'-O-methyluridine-3'-phosphorothioate
  modified_base 2: mod_base = OTHER; note = 2'-O-methylcytidine-3'-phosphorothioate
  modified_base 3: mod_base = OTHER; note = 2'-O-methyladenosine-3'-phosphate
  modified_base 4: mod_base = OTHER; note = 2'-O-methylguanosine-3'-phosphate
  modified_base 5: mod_base = OTHER; note = 2'-O-methylguanosine-3'-phosphate
  modified_base 6: mod_base = OTHER; note (2R,3S,4S,5R)-5-(6-amino-9H-purin-9-yl)-4-(docosyloxy)-2-(h ydroxymethyl)tetrahydrofuran-3-ol
  modified_base 7: mod_base = OTHER; note = 2'-fluoroadenosine-3'-phosphate
  modified_base 8: mod_base = OTHER; note = 2'-O-methylcytidine-3'-phosphate
  modified_base 9: mod_base = OTHER; note = 2'-fluorouridine-3'-phosphate
  modified_base 10: mod_base = OTHER; note = 2'-fluorouridine-3'-phosphate
  modified_base 11: mod_base = OTHER; note = 2'-fluorocytidine-3'-phosphate
  modified_base 12: mod_base = OTHER; note = 2'-O-methyladenosine-3'-phosphate
  modified_base 13: mod_base = OTHER; note = 2'-O-methylguanosine-3'-phosphate
  modified_base 14: mod_base = OTHER; note = 2'-O-methylguanosine-3'-phosphate
  modified_base 15: mod_base = OTHER; note = 2'-O-methyladenosine-3'-phosphate
  modified_base 16: mod_base = OTHER; note = 2'-O-methyluridine-3'-phosphate
  modified_base 17: mod_base = OTHER; note = 2'-O-methyluridine-3'-phosphate
  modified_base 18: mod_base = OTHER; note = 2'-O-methylguanosine-3'-phosphate
  modified_base 19: mod_base = OTHER; note = 2'-O-methylcytidine-3'-phosphorothioate
  modified_base 20: mod_base = OTHER; note = 2'-O-methyluridine-3'-phosphorothioate
  modified_base 21: mod_base = OTHER; note = 2'-O-methyladenosine-3'-phosphate
tcaggaacttcaggattgcta

SEQ ID NO: 3843 - RNA, 21 nt, synthetic construct
  source 1..21: mol_type = other RNA
  modified_base 1: mod_base = OTHER; note = 2'-O-methyladenosine-3'-phosphorothioate
  modified_base 2: mod_base = OTHER; note = 2'-O-methylcytidine-3'-phosphorothioate
  modified_base 3: mod_base = OTHER; note = 2'-O-methylguanosine-3'-phosphate
  modified_base 4: mod_base = OTHER; note = 2'-O-methylguanosine-3'-phosphate
  modified_base 5: mod_base = OTHER; note = 2'-O-methyladenosine-3'-phosphate
  modified_base 6: mod_base = OTHER; note 2-amino-9-((2R,3S,4S,5R)-3-(docosyloxy)-4-hydroxy-5-(hydrox ymethyl)tetrahydrofuran-2-yl)-1,9-dihydro-6H-purin-6-one
  modified_base 7: mod_base = OTHER; note = 2'-fluorouridine-3'-phosphate
  modified_base 8: mod_base = OTHER; note = 2'-O-methyladenosine-3'-phosphate
  modified_base 9: mod_base = OTHER; note = 2'-fluorouridine-3'-phosphate
  modified_base 10: mod_base = OTHER; note = 2'-fluorouridine-3'-phosphate
  modified_base 11: mod_base = OTHER; note = 2'-fluoroadenosine-3'-phosphate
  modified_base 12: mod_base = OTHER; note = 2'-O-methylguanosine-3'-phosphate
  modified_base 13: mod_base = OTHER; note = 2'-O-methyluridine-3'-phosphate
  modified_base 14: mod_base = OTHER; note = 2'-O-methyladenosine-3'-phosphate
  modified_base 15: mod_base = OTHER; note = 2'-O-methylguanosine-3'-phosphate
  modified_base 16: mod_base = OTHER; note = 2'-O-methylcytidine-3'-phosphate
  modified_base 17: mod_base = OTHER; note = 2'-O-methyluridine-3'-phosphate
  modified_base 18: mod_base = OTHER; note = 2'-O-methyluridine-3'-phosphate
  modified_base 19: mod_base = OTHER; note = 2'-O-methyladenosine-3'-phosphorothioate
  modified_base 20: mod_base = OTHER; note = 2'-O-methyladenosine-3'-phosphorothioate
  modified_base 21: mod_base = OTHER; note = 2'-O-methyladenosine-3'-phosphate
acggagtattagtagcttaaa

SEQ ID NO: 3844 - RNA, 21 nt, synthetic construct
  source 1..21: mol_type = other RNA
  modified_base 1: mod_base = OTHER; note = 2'-O-methyladenosine-3'-phosphorothioate
  modified_base 2: mod_base = OTHER; note = 2'-O-methyluridine-3'-phosphorothioate
  modified_base 3: mod_base = OTHER; note = 2'-O-methyluridine-3'-phosphate
  modified_base 4: mod_base = OTHER; note = 2'-O-methylguanosine-3'-phosphate
  modified_base 5: mod_base = OTHER; note = 2'-O-methyluridine-3'-phosphate
  modified_base 6: mod_base = OTHER; note 4-amino-1-((2R,3R,4R,5R)-3-(docosyloxy)-4-hydroxy-5-(hydrox ymethyl)tetrahydrofuran-2-yl)pyrimidin-2(1H)-one
  modified_base 7: mod_base = OTHER; note = 2'-fluoroadenosine-3'-phosphate
  modified_base 8: mod_base = OTHER; note = 2'-O-methyladenosine-3'-phosphate
  modified_base 9: mod_base = OTHER; note = 2'-fluorouridine-3'-phosphate
  modified_base 10: mod_base = OTHER; note = 2'-fluoroguanosine-3'-phosphate
  modified_base 11: mod_base = OTHER; note = 2'-fluoroadenosine-3'-phosphate
  modified_base 12: mod_base = OTHER; note = 2'-O-methyladenosine-3'-phosphate
  modified_base 13: mod_base = OTHER; note = 2'-O-methyluridine-3'-phosphate
  modified_base 14: mod_base = OTHER; note = 2'-O-methyluridine-3'-phosphate
  modified_base 15: mod_base = OTHER; note = 2'-O-methyluridine-3'-phosphate
  modified_base 16: mod_base = OTHER; note = 2'-O-methyluridine-3'-phosphate
  modified_base 17: mod_base = OTHER; note = 2'-O-methyladenosine-3'-phosphate
  modified_base 18: mod_base = OTHER; note = 2'-O-methyluridine-3'-phosphate
  modified_base 19: mod_base = OTHER; note = 2'-O-methylguanosine-3'-phosphorothioate
  modified_base 20: mod_base = OTHER; note = 2'-O-methyladenosine-3'-phosphorothioate
  modified_base 21: mod_base = OTHER; note = 2'-O-methyladenosine-3'-phosphate
attgtcaatgaattttatgaa

SEQ ID NO: 3845 - RNA, 21 nt, synthetic construct
  source 1..21: mol_type = other RNA
  modified_base 1: mod_base = OTHER; note = 2'-O-methylguanosine-3'-phosphorothioate
  modified_base 2: mod_base = OTHER; note = 2'-O-methyladenosine-3'-phosphorothioate
  modified_base 3: mod_base = OTHER; note = 2'-O-methyladenosine-3'-phosphate
  modified_base 4: mod_base = OTHER; note = 2'-O-methylcytidine-3'-phosphate
  modified_base 5: mod_base = OTHER; note = 2'-O-methyladenosine-3'-phosphate
  modified_base 6: mod_base = OTHER; note 2-amino-9-((2R,3S,4S,5R)-3-(docosyloxy)-4-hydroxy-5-(hydrox ymethyl)tetrahydrofuran-2-yl)-1,9-dihydro-6H-purin-6-one
  modified_base 7: mod_base = OTHER; note = 2'-fluorocytidine-3'-phosphate
  modified_base 8: mod_base = OTHER; note = 2'-O-methyladenosine-3'-phosphate
  modified_base 9: mod_base = OTHER; note = 2'-fluoroadenosine-3'-phosphate
  modified_base 10: mod_base = OTHER; note = 2'-fluoroadenosine-3'-phosphate
  modified_base 11: mod_base = OTHER; note = 2'-fluorocytidine-3'-phosphate
  modified_base 12: mod_base = OTHER; note = 2'-O-methyladenosine-3'-phosphate
  modified_base 13: mod_base = OTHER; note = 2'-O-methyladenosine-3'-phosphate
  modified_base 14: mod_base = OTHER; note = 2'-O-methyladenosine-3'-phosphate
  modified_base 15: mod_base = OTHER; note = 2'-O-methyluridine-3'-phosphate
  modified_base 16: mod_base = OTHER; note = 2'-O-methyladenosine-3'-phosphate
  modified_base 17: mod_base = OTHER; note = 2'-O-methyluridine-3'-phosphate
  modified_base 18: mod_base = OTHER; note = 2'-O-methyluridine-3'-phosphate
  modified_base 19: mod_base = OTHER; note = 2'-O-methylguanosine-3'-phosphorothioate
  modified_base 20: mod_base = OTHER; note = 2'-O-methyladenosine-3'-phosphorothioate
  modified_base 21: mod_base = OTHER; note = 2'-O-methyladenosine-3'-phosphate
gaacagcaaacaaatattgaa

SEQ ID NO: 3846 - RNA, 21 nt, synthetic construct
  source 1..21: mol_type = other RNA
  modified_base 1: mod_base = OTHER; note = 2'-O-methyluridine-3'-phosphorothioate
  modified_base 2: mod_base = OTHER; note = 2'-O-methylguanosine-3'-phosphorothioate
  modified_base 3: mod_base = OTHER; note = 2'-O-methyladenosine-3'-phosphate
  modified_base 4: mod_base = OTHER; note = 2'-O-methyladenosine-3'-phosphate
  modified_base 5: mod_base = OTHER; note = 2'-O-methylcytidine-3'-phosphate
  modified_base 6: mod_base = OTHER; note 1-((2R,3R,4R,5R)-3-(docosyloxy)-4-hydroxy-5-(hydroxymethyl) tetrahydrofuran-2-yl)pyrimidine-2,4(1H,3H)-dione
  modified_base 7: mod_base = OTHER; note = 2'-fluoroadenosine-3'-phosphate
  modified_base 8: mod_base = OTHER; note = 2'-O-methyluridine-3'-phosphate
  modified_base 9: mod_base = OTHER; note = 2'-fluorouridine-3'-phosphate
  modified_base 10: mod_base = OTHER; note = 2'-fluorouridine-3'-phosphate
  modified_base 11: mod_base = OTHER; note = 2'-fluorouridine-3'-phosphate
  modified_base 12: mod_base = OTHER; note = 2'-O-methylcytidine-3'-phosphate
  modified_base 13: mod_base = OTHER; note = 2'-O-methylguanosine-3'-phosphate
  modified_base 14: mod_base = OTHER; note = 2'-O-methyluridine-3'-phosphate
  modified_base 15: mod_base = OTHER; note = 2'-O-methylguanosine-3'-phosphate
  modified_base 16: mod_base = OTHER; note = 2'-O-methylcytidine-3'-phosphate
  modified_base 17: mod_base = OTHER; note = 2'-O-methyladenosine-3'-phosphate
  modified_base 18: mod_base = OTHER; note = 2'-O-methyluridine-3'-phosphate
  modified_base 19: mod_base = OTHER; note = 2'-O-methyluridine-3'-phosphorothioate
  modified_base 20: mod_base = OTHER; note = 2'-O-methyladenosine-3'-phosphorothioate
  modified_base 21: mod_base = OTHER; note = 2'-O-methyladenosine-3'-phosphate
tgaactattttcgtgcattaa

SEQ ID NO: 3847 - RNA, 21 nt, synthetic construct
  source 1..21: mol_type = other RNA
  modified_base 1: mod_base = OTHER; note = 2'-O-methyladenosine-3'-phosphorothioate
  modified_base 2: mod_base = OTHER; note = 2'-O-methylcytidine-3'-phosphorothioate
  modified_base 3: mod_base = OTHER; note = 2'-O-methyluridine-3'-phosphate
  modified_base 4: mod_base = OTHER; note = 2'-O-methylguanosine-3'-phosphate
  modified_base 5: mod_base = OTHER; note = 2'-O-methylguanosine-3'-phosphate
  modified_base 6: mod_base = OTHER; note (2R,3S,4S,5R)-5-(6-amino-9H-purin-9-yl)-4-(docosyloxy)-2-(h ydroxymethyl)tetrahydrofuran-3-ol
  modified_base 7: mod_base = OTHER; note = 2'-fluoroadenosine-3'-phosphate
  modified_base 8: mod_base = OTHER; note = 2'-O-methyluridine-3'-phosphate
  modified_base 9: mod_base = OTHER; note = 2'-fluoroadenosine-3'-phosphate
  modified_base 10: mod_base = OTHER; note = 2'-fluorocytidine-3'-phosphate
  modified_base 11: mod_base = OTHER; note = 2'-fluorouridine-3'-phosphate
  modified_base 12: mod_base = OTHER; note = 2'-O-methyluridine-3'-phosphate
  modified_base 13: mod_base = OTHER; note = 2'-O-methyladenosine-3'-phosphate
  modified_base 14: mod_base = OTHER; note = 2'-O-methyluridine-3'-phosphate
  modified_base 15: mod_base = OTHER; note = 2'-O-methyluridine-3'-phosphate
  modified_base 16: mod_base = OTHER; note = 2'-O-methyluridine-3'-phosphate
  modified_base 17: mod_base = OTHER; note = 2'-O-methyluridine-3'-phosphate
  modified_base 18: mod_base = OTHER; note = 2'-O-methyluridine-3'-phosphate
  modified_base 19: mod_base = OTHER; note = 2'-O-methylcytidine-3'-phosphorothioate
  modified_base 20: mod_base = OTHER; note = 2'-O-methyladenosine-3'-phosphorothioate
  modified_base 21: mod_base = OTHER; note = 2'-O-methyladenosine-3'-phosphate
actggaatacttatttttcaa

SEQ ID NO: 3848 - RNA, 21 nt, synthetic construct
  source 1..21: mol_type = other RNA
  modified_base 1: mod_base = OTHER; note = 2'-O-methyluridine-3'-phosphorothioate
  modified_base 2: mod_base = OTHER; note = 2'-O-methyluridine-3'-phosphorothioate
  modified_base 3: mod_base = OTHER; note = 2'-O-methyladenosine-3'-phosphate
  modified_base 4: mod_base = OTHER; note = 2'-O-methyluridine-3'-phosphate
  modified_base 5: mod_base = OTHER; note = 2'-O-methylcytidine-3'-phosphate
  modified_base 6: mod_base = OTHER; note 1-((2R,3R,4R,5R)-3-(docosyloxy)-4-hydroxy-5-(hydroxymethyl) tetrahydrofuran-2-yl)pyrimidine-2,4(1H,3H)-dione
  modified_base 7: mod_base = OTHER; note = 2'-fluorouridine-3'-phosphate
  modified_base 8: mod_base = OTHER; note = 2'-O-methylguanosine-3'-phosphate
  modified_base 9: mod_base = OTHER; note = 2'-fluorocytidine-3'-phosphate
  modified_base 10: mod_base = OTHER; note = 2'-fluoroadenosine-3'-phosphate
  modified_base 11: mod_base = OTHER; note = 2'-fluoroguanosine-3'-phosphate
  modified_base 12: mod_base = OTHER; note = 2'-O-methyladenosine-3'-phosphate
  modified_base 13: mod_base = OTHER; note = 2'-O-methylguanosine-3'-phosphate
  modified_base 14: mod_base = OTHER; note = 2'-O-methyladenosine-3'-phosphate
  modified_base 15: mod_base = OTHER; note = 2'-O-methyluridine-3'-phosphate
  modified_base 16: mod_base = OTHER; note = 2'-O-methylcytidine-3'-phosphate
  modified_base 17: mod_base = OTHER; note = 2'-O-methyluridine-3'-phosphate
  modified_base 18: mod_base = OTHER; note = 2'-O-methylcytidine-3'-phosphate
  modified_base 19: mod_base = OTHER; note = 2'-O-methyluridine-3'-phosphorothioate
  modified_base 20: mod_base = OTHER; note = 2'-O-methylguanosine-3'-phosphorothioate
  modified_base 21: mod_base = OTHER; note = 2'-O-methyladenosine-3'-phosphate
ttatcttgcagagatctctga

SEQ ID NO: 3849 - RNA, 21 nt, synthetic construct
  source 1..21: mol_type = other RNA
  modified_base 1: mod_base = OTHER; note = 2'-O-methylguanosine-3'-phosphorothioate
  modified_base 2: mod_base = OTHER; note = 2'-O-methyladenosine-3'-phosphorothioate
  modified_base 3: mod_base = OTHER; note = 2'-O-methyladenosine-3'-phosphate
  modified_base 4: mod_base = OTHER; note = 2'-O-methylguanosine-3'-phosphate
  modified_base 5: mod_base = OTHER; note = 2'-O-methyluridine-3'-phosphate
  modified_base 6: mod_base = OTHER; note 2-amino-9-((2R,3S,4S,5R)-3-(docosyloxy)-4-hydroxy-5-(hydrox ymethyl)tetrahydrofuran-2-yl)-1,9-dihydro-6H-purin-6-one
  modified_base 7: mod_base = OTHER; note = 2'-fluorouridine-3'-phosphate
  modified_base 8: mod_base = OTHER; note = 2'-O-methyluridine-3'-phosphate
  modified_base 9: mod_base = OTHER; note = 2'-fluoroadenosine-3'-phosphate
  modified_base 10: mod_base = OTHER; note = 2'-fluoroguanosine-3'-phosphate
  modified_base 11: mod_base = OTHER; note = 2'-fluoroadenosine-3'-phosphate
  modified_base 12: mod_base = OTHER; note = 2'-O-methyladenosine-3'-phosphate
  modified_base 13: mod_base = OTHER; note = 2'-O-methyluridine-3'-phosphate
  modified_base 14: mod_base = OTHER; note = 2'-O-methyluridine-3'-phosphate
  modified_base 15: mod_base = OTHER; note = 2'-O-methyluridine-3'-phosphate
  modified_base 16: mod_base = OTHER; note = 2'-O-methyluridine-3'-phosphate
  modified_base 17: mod_base = OTHER; note = 2'-O-methyluridine-3'-phosphate
  modified_base 18: mod_base = OTHER; note = 2'-O-methylguanosine-3'-phosphate
  modified_base 19: mod_base = OTHER; note = 2'-O-methyladenosine-3'-phosphorothioate
  modified_base 20: mod_base = OTHER; note = 2'-O-methyluridine-3'-phosphorothioate
  modified_base 21: mod_base = OTHER; note = 2'-O-methyladenosine-3'-phosphate
gaagtgttagaatttttgata

SEQ ID NO: 3850 - RNA, 21 nt, synthetic construct
  source 1..21: mol_type = other RNA
  modified_base 1: mod_base = OTHER; note = 2'-O-methyluridine-3'-phosphorothioate
  modified_base 2: mod_base = OTHER; note = 2'-O-methylcytidine-3'-phosphorothioate
  modified_base 3: mod_base = OTHER; note = 2'-O-methyladenosine-3'-phosphate
  modified_base 4: mod_base = OTHER; note = 2'-O-methyladenosine-3'-phosphate
  modified_base 5: mod_base = OTHER; note = 2'-O-methyluridine-3'-phosphate
  modified_base 6: mod_base = OTHER; note 1-((2R,3R,4R,5R)-3-(docosyloxy)-4-hydroxy-5-(hydroxymethyl) tetrahydrofuran-2-yl)pyrimidine-2,4(1H,3H)-dione
  modified_base 7: mod_base = OTHER; note = 2'-fluorouridine-3'-phosphate
  modified_base 8: mod_base = OTHER; note = 2'-O-methyladenosine-3'-phosphate
  modified_base 9: mod_base = OTHER; note = 2'-fluoroadenosine-3'-phosphate
  modified_base 10: mod_base = OTHER; note = 2'-fluoroguanosine-3'-phosphate
  modified_base 11: mod_base = OTHER; note = 2'-fluoroadenosine-3'-phosphate
  modified_base 12: mod_base = OTHER; note = 2'-O-methyluridine-3'-phosphate
  modified_base 13: mod_base = OTHER; note = 2'-O-methylcytidine-3'-phosphate
  modified_base 14: mod_base = OTHER; note = 2'-O-methyluridine-3'-phosphate
  modified_base 15: mod_base = OTHER; note = 2'-O-methylcytidine-3'-phosphate
  modified_base 16: mod_base = OTHER; note = 2'-O-methyluridine-3'-phosphate
  modified_base 17: mod_base = OTHER; note = 2'-O-methylguanosine-3'-phosphate
  modified_base 18: mod_base = OTHER; note = 2'-O-methylguanosine-3'-phosphate
  modified_base 19: mod_base = OTHER; note = 2'-O-methyladenosine-3'-phosphorothioate
  modified_base 20: mod_base = OTHER; note = 2'-O-methyladenosine-3'-phosphorothioate
  modified_base 21: mod_base = OTHER; note = 2'-O-methyladenosine-3'-phosphate
tcaatttaagatctctggaaa

SEQ ID NO: 3851 - RNA, 21 nt, synthetic construct
  source 1..21: mol_type = other RNA
  modified_base 1: mod_base = OTHER; note = 2'-O-methyluridine-3'-phosphorothioate
  modified_base 2: mod_base = OTHER; note = 2'-O-methylguanosine-3'-phosphorothioate
  modified_base 3: mod_base = OTHER; note = 2'-O-methylguanosine-3'-phosphate
  modified_base 4: mod_base = OTHER; note = 2'-O-methyladenosine-3'-phosphate
  modified_base 5: mod_base = OTHER; note = 2'-O-methylcytidine-3'-phosphate
  modified_base 6: mod_base = OTHER; note 4-amino-1-((2R,3R,4R,5R)-3-(docosyloxy)-4-hydroxy-5-(hydrox ymethyl)tetrahydrofuran-2-yl)pyrimidin-2(1H)-one
  modified_base 7: mod_base = OTHER; note = 2'-fluoroadenosine-3'-phosphate
  modified_base 8: mod_base = OTHER; note = 2'-O-methyluridine-3'-phosphate
  modified_base 9: mod_base = OTHER; note = 2'-fluoroadenosine-3'-phosphate
  modified_base 10: mod_base = OTHER; note = 2'-fluorouridine-3'-phosphate
  modified_base 11: mod_base = OTHER; note = 2'-fluorouridine-3'-phosphate
  modified_base 12: mod_base = OTHER; note = 2'-O-methyluridine-3'-phosphate
  modified_base 13: mod_base = OTHER; note = 2'-O-methyladenosine-3'-phosphate
  modified_base 14: mod_base = OTHER; note = 2'-O-methylcytidine-3'-phosphate
  modified_base 15: mod_base = OTHER; note = 2'-O-methyladenosine-3'-phosphate
  modified_base 16: mod_base = OTHER; note = 2'-O-methyladenosine-3'-phosphate
  modified_base 17: mod_base = OTHER; note = 2'-O-methyluridine-3'-phosphate
  modified_base 18: mod_base = OTHER; note = 2'-O-methylguanosine-3'-phosphate
  modified_base 19: mod_base = OTHER; note = 2'-O-methyluridine-3'-phosphorothioate
  modified_base 20: mod_base = OTHER; note = 2'-O-methyluridine-3'-phosphorothioate
  modified_base 21: mod_base = OTHER; note = 2'-O-methyladenosine-3'-phosphate
tggaccatatttacaatgtta

SEQ ID NO: 3852 - RNA, 21 nt, synthetic construct
  source 1..21: mol_type = other RNA
  modified_base 1: mod_base = OTHER; note = 2'-O-methyluridine-3'-phosphorothioate
  modified_base 2: mod_base = OTHER; note = 2'-O-methyladenosine-3'-phosphorothioate
  modified_base 3: mod_base = OTHER; note = 2'-O-methylguanosine-3'-phosphate
  modified_base 4: mod_base = OTHER; note = 2'-O-methyluridine-3'-phosphate
  modified_base 5: mod_base = OTHER; note = 2'-O-methylcytidine-3'-phosphate
  modified_base 6: mod_base = OTHER; note (2R,3S,4S,5R)-5-(6-amino-9H-purin-9-yl)-4-(docosyloxy)-2-(h ydroxymethyl)tetrahydrofuran-3-ol
  modified_base 7: mod_base = OTHER; note = 2'-fluorouridine-3'-phosphate
  modified_base 8: mod_base = OTHER; note = 2'-O-methyluridine-3'-phosphate
  modified_base 9: mod_base = OTHER; note = 2'-fluoroguanosine-3'-phosphate
  modified_base 10: mod_base = OTHER; note = 2'-fluoroadenosine-3'-phosphate
  modified_base 11: mod_base = OTHER; note = 2'-fluoroadenosine-3'-phosphate
  modified_base 12: mod_base = OTHER; note = 2'-O-methylguanosine-3'-phosphate
  modified_base 13: mod_base = OTHER; note = 2'-O-methylcytidine-3'-phosphate
  modified_base 14: mod_base = OTHER; note = 2'-O-methyladenosine-3'-phosphate
  modified_base 15: mod_base = OTHER; note = 2'-O-methyladenosine-3'-phosphate
  modified_base 16: mod_base = OTHER; note = 2'-O-methyluridine-3'-phosphate
  modified_base 17: mod_base = OTHER; note = 2'-O-methylcytidine-3'-phosphate
  modified_base 18: mod_base = OTHER; note = 2'-O-methylcytidine-3'-phosphate
  modified_base 19: mod_base = OTHER; note = 2'-O-methyluridine-3'-phosphorothioate
  modified_base 20: mod_base = OTHER; note = 2'-O-methyluridine-3'-phosphorothioate
  modified_base 21: mod_base = OTHER; note = 2'-O-methyladenosine-3'-phosphate
tagtcattgaagcaatcctta

SEQ ID NO: 3853 - RNA, 21 nt, synthetic construct
  source 1..21: mol_type = other RNA
  modified_base 1: mod_base = OTHER; note = 2'-O-methyladenosine-3'-phosphorothioate
  modified_base 2: mod_base = OTHER; note = 2'-O-methylguanosine-3'-phosphorothioate
  modified_base 3: mod_base = OTHER; note = 2'-O-methylcytidine-3'-phosphate
  modified_base 4: mod_base = OTHER; note = 2'-O-methyluridine-3'-phosphate
  modified_base 5: mod_base = OTHER; note = 2'-O-methylguanosine-3'-phosphate
  modified_base 6: mod_base = OTHER; note 1-((2R,3R,4R,5R)-3-(docosyloxy)-4-hydroxy-5-(hydroxymethyl) tetrahydrofuran-2-yl)pyrimidine-2,4(1H,3H)-dione
  modified_base 7: mod_base = OTHER; note = 2'-fluorouridine-3'-phosphate
  modified_base 8: mod_base = OTHER; note = 2'-O-methyluridine-3'-phosphate
  modified_base 9: mod_base = OTHER; note = 2'-fluoroadenosine-3'-phosphate
  modified_base 10: mod_base = OTHER; note = 2'-fluoroguanosine-3'-phosphate
  modified_base 11: mod_base = OTHER; note = 2'-fluoroguanosine-3'-phosphate
  modified_base 12: mod_base = OTHER; note = 2'-O-methyluridine-3'-phosphate
  modified_base 13: mod_base = OTHER; note = 2'-O-methyluridine-3'-phosphate
  modified_base 14: mod_base = OTHER; note = 2'-O-methyluridine-3'-phosphate
  modified_base 15: mod_base = OTHER; note = 2'-O-methyladenosine-3'-phosphate
  modified_base 16: mod_base = OTHER; note = 2'-O-methyladenosine-3'-phosphate
  modified_base 17: mod_base = OTHER; note = 2'-O-methylcytidine-3'-phosphate
  modified_base 18: mod_base = OTHER; note = 2'-O-methyladenosine-3'-phosphate
  modified_base 19: mod_base = OTHER; note = 2'-O-methyladenosine-3'-phosphorothioate
  modified_base 20: mod_base = OTHER; note = 2'-O-methyluridine-3'-phosphorothioate
  modified_base 21: mod_base = OTHER; note = 2'-O-methyladenosine-3'-phosphate
agctgtttaggtttaacaata

SEQ ID NO: 3854 - RNA, 21 nt, synthetic construct
  source 1..21: mol_type = other RNA
  modified_base 1: mod_base = OTHER; note = 2'-O-methylcytidine-3'-phosphorothioate
  modified_base 2: mod_base = OTHER; note = 2'-O-methyladenosine-3'-phosphorothioate
  modified_base 3: mod_base = OTHER; note = 2'-O-methyladenosine-3'-phosphate
  modified_base 4: mod_base = OTHER; note = 2'-O-methylguanosine-3'-phosphate
  modified_base 5: mod_base = OTHER; note = 2'-O-methylguanosine-3'-phosphate
  modified_base 6: mod_base = OTHER; note 4-amino-1-((2R,3R,4R,5R)-3-(docosyloxy)-4-hydroxy-5-(hydrox ymethyl)tetrahydrofuran-2-yl)pyrimidin-2(1H)-one
  modified_base 7: mod_base = OTHER; note = 2'-fluoroadenosine-3'-phosphate
  modified_base 8: mod_base = OTHER; note = 2'-O-methyladenosine-3'-phosphate
  modified_base 9: mod_base = OTHER; note = 2'-fluoroadenosine-3'-phosphate
  modified_base 10: mod_base = OTHER; note = 2'-fluorouridine-3'-phosphate
  modified_base 11: mod_base = OTHER; note = 2'-fluoroguanosine-3'-phosphate
  modified_base 12: mod_base = OTHER; note = 2'-O-methyladenosine-3'-phosphate
  modified_base 13: mod_base = OTHER; note = 2'-O-methyluridine-3'-phosphate
  modified_base 14: mod_base = OTHER; note = 2'-O-methylguanosine-3'-phosphate
  modified_base 15: mod_base = OTHER; note = 2'-O-methyluridine-3'-phosphate
  modified_base 16: mod_base = OTHER; note = 2'-O-methyladenosine-3'-phosphate
  modified_base 17: mod_base = OTHER; note = 2'-O-methyladenosine-3'-phosphate
  modified_base 18: mod_base = OTHER; note = 2'-O-methyladenosine-3'-phosphate
  modified_base 19: mod_base = OTHER; note = 2'-O-methyluridine-3'-phosphorothioate
  modified_base 20: mod_base = OTHER; note = 2'-O-methyladenosine-3'-phosphorothioate
  modified_base 21: mod_base = OTHER; note = 2'-O-methyladenosine-3'-phosphate
caaggcaaatgatgtaaataa

SEQ ID NO: 3855 - RNA, 21 nt, synthetic construct
  source 1..21: mol_type = other RNA
  modified_base 1: mod_base = OTHER; note = 2'-O-methyladenosine-3'-phosphorothioate
  modified_base 2: mod_base = OTHER; note = 2'-O-methyluridine-3'-phosphorothioate
  modified_base 3: mod_base = OTHER; note = 2'-O-methylcytidine-3'-phosphate
  modified_base 4: mod_base = OTHER; note = 2'-O-methylcytidine-3'-phosphate
  modified_base 5: mod_base = OTHER; note = 2'-O-methyladenosine-3'-phosphate
  modified_base 6: mod_base = OTHER; note (2R,3S,4S,5R)-5-(6-amino-9H-purin-9-yl)-4-(docosyloxy)-2-(h ydroxymethyl)tetrahydrofuran-3-ol
  modified_base 7: mod_base = OTHER; note = 2'-fluorouridine-3'-phosphate
  modified_base 8: mod_base = OTHER; note = 2'-O-methyluridine-3'-phosphate
  modified_base 9: mod_base = OTHER; note = 2'-fluoroadenosine-3'-phosphate
  modified_base 10: mod_base = OTHER; note = 2'-fluorocytidine-3'-phosphate
  modified_base 11: mod_base = OTHER; note = 2'-fluorouridine-3'-phosphate
  modified_base 12: mod_base = OTHER; note = 2'-O-methyladenosine-3'-phosphate
  modified_base 13: mod_base = OTHER; note = 2'-O-methylcytidine-3'-phosphate
  modified_base 14: mod_base = OTHER; note = 2'-O-methyluridine-3'-phosphate
  modified_base 15: mod_base = OTHER; note = 2'-O-methylguanosine-3'-phosphate
  modified_base 16: mod_base = OTHER; note = 2'-O-methylguanosine-3'-phosphate
  modified_base 17: mod_base = OTHER; note = 2'-O-methyladenosine-3'-phosphate
  modified_base 18: mod_base = OTHER; note = 2'-O-methyladenosine-3'-phosphate
  modified_base 19: mod_base = OTHER; note = 2'-O-methyladenosine-3'-phosphorothioate
  modified_base 20: mod_base = OTHER; note = 2'-O-methylcytidine-3'-phosphorothioate
  modified_base 21: mod_base = OTHER; note = 2'-O-methyladenosine-3'-phosphate
atccaattactactggaaaca

SEQ ID NO: 3856 - RNA, 21 nt, synthetic construct
  source 1..21: mol_type = other RNA
  modified_base 1: mod_base = OTHER; note = 2'-O-methyladenosine-3'-phosphorothioate
  modified_base 2: mod_base = OTHER; note = 2'-O-methylcytidine-3'-phosphorothioate
  modified_base 3: mod_base = OTHER; note = 2'-O-methyluridine-3'-phosphate
  modified_base 4: mod_base = OTHER; note = 2'-O-methyluridine-3'-phosphate
  modified_base 5: mod_base = OTHER; note = 2'-O-methyladenosine-3'-phosphate
  modified_base 6: mod_base = OTHER; note 4-amino-1-((2R,3R,4R,5R)-3-(docosyloxy)-4-hydroxy-5-(hydrox ymethyl)tetrahydrofuran-2-yl)pyrimidin-2(1H)-one
  modified_base 7: mod_base = OTHER; note = 2'-fluoroadenosine-3'-phosphate
  modified_base 8: mod_base = OTHER; note = 2'-O-methyladenosine-3'-phosphate
  modified_base 9: mod_base = OTHER; note = 2'-fluorouridine-3'-phosphate
  modified_base 10: mod_base = OTHER; note = 2'-fluoroadenosine-3'-phosphate
  modified_base 11: mod_base = OTHER; note = 2'-fluorouridine-3'-phosphate
  modified_base 12: mod_base = OTHER; note = 2'-O-methyladenosine-3'-phosphate
  modified_base 13: mod_base = OTHER; note = 2'-O-methyluridine-3'-phosphate
  modified_base 14: mod_base = OTHER; note = 2'-O-methyladenosine-3'-phosphate
  modified_base 15: mod_base = OTHER; note = 2'-O-methyluridine-3'-phosphate
  modified_base 16: mod_base = OTHER; note = 2'-O-methyladenosine-3'-phosphate
  modified_base 17: mod_base = OTHER; note = 2'-O-methyluridine-3'-phosphate
  modified_base 18: mod_base = OTHER; note = 2'-O-methylcytidine-3'-phosphate
  modified_base 19: mod_base = OTHER; note = 2'-O-methylcytidine-3'-phosphorothioate
  modified_base 20: mod_base = OTHER; note = 2'-O-methyluridine-3'-phosphorothioate
  modified_base 21: mod_base = OTHER; note = 2'-O-methyladenosine-3'-phosphate
acttacaatatatatatccta

SEQ ID NO: 3857 - RNA, 21 nt, synthetic construct
  source 1..21: mol_type = other RNA
  modified_base 1: mod_base = OTHER; note = 2'-O-methyladenosine-3'-phosphorothioate
  modified_base 2: mod_base = OTHER; note = 2'-O-methyluridine-3'-phosphorothioate
  modified_base 3: mod_base = OTHER; note = 2'-O-methylguanosine-3'-phosphate
  modified_base 4: mod_base = OTHER; note = 2'-O-methylcytidine-3'-phosphate
  modified_base 5: mod_base = OTHER; note = 2'-O-methyladenosine-3'-phosphate
  modified_base 6: mod_base = OTHER; note 2-amino-9-((2R,3S,4S,5R)-3-(docosyloxy)-4-hydroxy-5-(hydrox ymethyl)tetrahydrofuran-2-yl)-1,9-dihydro-6H-purin-6-one
  modified_base 7: mod_base = OTHER; note = 2'-fluorouridine-3'-phosphate
  modified_base 8: mod_base = OTHER; note = 2'-O-methyluridine-3'-phosphate
  modified_base 9: mod_base = OTHER; note = 2'-fluorouridine-3'-phosphate
  modified_base 10: mod_base = OTHER; note = 2'-fluoroguanosine-3'-phosphate
  modified_base 11: mod_base = OTHER; note = 2'-fluoroguanosine-3'-phosphate
  modified_base 12: mod_base = OTHER; note = 2'-O-methyluridine-3'-phosphate
  modified_base 13: mod_base = OTHER; note = 2'-O-methyladenosine-3'-phosphate
  modified_base 14: mod_base = OTHER; note = 2'-O-methyluridine-3'-phosphate
  modified_base 15: mod_base = OTHER; note = 2'-O-methylcytidine-3'-phosphate
  modified_base 16: mod_base = OTHER; note = 2'-O-methyluridine-3'-phosphate
  modified_base 17: mod_base = OTHER; note = 2'-O-methylguanosine-3'-phosphate
  modified_base 18: mod_base = OTHER; note = 2'-O-methyladenosine-3'-phosphate
  modified_base 19: mod_base = OTHER; note = 2'-O-methylcytidine-3'-phosphorothioate
  modified_base 20: mod_base = OTHER; note = 2'-O-methyladenosine-3'-phosphorothioate
  modified_base 21: mod_base = OTHER; note = 2'-O-methyladenosine-3'-phosphate
atgcagtttggtatctgacaa

SEQ ID NO: 3858 - RNA, 21 nt, synthetic construct
  source 1..21: mol_type = other RNA
  modified_base 1: mod_base = OTHER; note = 2'-O-methylcytidine-3'-phosphorothioate
  modified_base 2: mod_base = OTHER; note = 2'-O-methylcytidine-3'-phosphorothioate
  modified_base 3: mod_base = OTHER; note = 2'-O-methyluridine-3'-phosphate
  modified_base 4: mod_base = OTHER; note = 2'-O-methyluridine-3'-phosphate
  modified_base 5: mod_base = OTHER; note = 2'-O-methyladenosine-3'-phosphate
  modified_base 6: mod_base = OTHER; note 1-((2R,3R,4R,5R)-3-(docosyloxy)-4-hydroxy-5-(hydroxymethyl) tetrahydrofuran-2-yl)pyrimidine-2,4(1H,3H)-dione
  modified_base 7: mod_base = OTHER; note = 2'-fluorouridine-3'-phosphate
  modified_base 8: mod_base = OTHER; note = 2'-O-methyluridine-3'-phosphate
  modified_base 9: mod_base = OTHER; note = 2'-fluorocytidine-3'-phosphate
  modified_base 10: mod_base = OTHER; note = 2'-fluoroadenosine-3'-phosphate
  modified_base 11: mod_base = OTHER; note = 2'-fluoroadenosine-3'-phosphate
  modified_base 12: mod_base = OTHER; note = 2'-O-methylguanosine-3'-phosphate
  modified_base 13: mod_base = OTHER; note = 2'-O-methyladenosine-3'-phosphate
  modified_base 14: mod_base = OTHER; note = 2'-O-methylcytidine-3'-phosphate
  modified_base 15: mod_base = OTHER; note = 2'-O-methyladenosine-3'-phosphate
  modified_base 16: mod_base = OTHER; note = 2'-O-methylcytidine-3'-phosphate
  modified_base 17: mod_base = OTHER; note = 2'-O-methyluridine-3'-phosphate
  modified_base 18: mod_base = OTHER; note = 2'-O-methylguanosine-3'-phosphate
  modified_base 19: mod_base = OTHER; note = 2'-O-methylguanosine-3'-phosphorothioate
  modified_base 20: mod_base = OTHER; note = 2'-O-methyluridine-3'-phosphorothioate
  modified_base 21: mod_base = OTHER; note = 2'-O-methyladenosine-3'-phosphate
ccttatttcaagacactggta

SEQ ID NO: 3859 - RNA, 21 nt, synthetic construct
  source 1..21: mol_type = other RNA
  modified_base 1: mod_base = OTHER; note = 2'-O-methylguanosine-3'-phosphorothioate
  modified_base 2: mod_base = OTHER; note = 2'-O-methyladenosine-3'-phosphorothioate
  modified_base 3: mod_base = OTHER; note = 2'-O-methyladenosine-3'-phosphate
  modified_base 4: mod_base = OTHER; note = 2'-O-methylguanosine-3'-phosphate
  modified_base 5: mod_base = OTHER; note = 2'-O-methylguanosine-3'-phosphate
  modified_base 6: mod_base = OTHER; note 2-amino-9-((2R,3S,4S,5R)-3-(docosyloxy)-4-hydroxy-5-(hydrox ymethyl)tetrahydrofuran-2-yl)-1,9-dihydro-6H-purin-6-one
  modified_base 7: mod_base = OTHER; note = 2'-fluoroadenosine-3'-phosphate
  modified_base 8: mod_base = OTHER; note = 2'-O-methyluridine-3'-phosphate
  modified_base 9: mod_base = OTHER; note = 2'-fluorouridine-3'-phosphate
  modified_base 10: mod_base = OTHER; note = 2'-fluorouridine-3'-phosphate
  modified_base 11: mod_base = OTHER; note = 2'-fluoroadenosine-3'-phosphate
  modified_base 12: mod_base = OTHER; note = 2'-O-methyluridine-3'-phosphate
  modified_base 13: mod_base = OTHER; note = 2'-O-methyluridine-3'-phosphate
  modified_base 14: mod_base = OTHER; note = 2'-O-methylcytidine-3'-phosphate
  modified_base 15: mod_base = OTHER; note = 2'-O-methyluridine-3'-phosphate
  modified_base 16: mod_base = OTHER; note = 2'-O-methyluridine-3'-phosphate
  modified_base 17: mod_base = OTHER; note = 2'-O-methyluridine-3'-phosphate
  modified_base 18: mod_base = OTHER; note = 2'-O-methyladenosine-3'-phosphate
  modified_base 19: mod_base = OTHER; note = 2'-O-methylguanosine-3'-phosphorothioate
  modified_base 20: mod_base = OTHER; note = 2'-O-methyluridine-3'-phosphorothioate
  modified_base 21: mod_base = OTHER; note = 2'-O-methyladenosine-3'-phosphate
gaagggatttattctttagta

SEQ ID NO: 3860 - RNA, 21 nt, synthetic construct
  source 1..21: mol_type = other RNA
  modified_base 1: mod_base = OTHER; note = 2'-O-methyladenosine-3'-phosphorothioate
  modified_base 2: mod_base = OTHER; note = 2'-O-methyluridine-3'-phosphorothioate
  modified_base 3: mod_base = OTHER; note = 2'-O-methylcytidine-3'-phosphate
  modified_base 4: mod_base = OTHER; note = 2'-O-methylcytidine-3'-phosphate
  modified_base 5: mod_base = OTHER; note = 2'-O-methyluridine-3'-phosphate
  modified_base 6: mod_base = OTHER; note 1-((2R,3R,4R,5R)-3-(docosyloxy)-4-hydroxy-5-(hydroxymethyl) tetrahydrofuran-2-yl)pyrimidine-2,4(1H,3H)-dione
  modified_base 7: mod_base = OTHER; note = 2'-fluoroguanosine-3'-phosphate
  modified_base 8: mod_base = OTHER; note = 2'-O-methylcytidine-3'-phosphate
  modified_base 9: mod_base = OTHER; note = 2'-fluorouridine-3'-phosphate
  modified_base 10: mod_base = OTHER; note = 2'-fluoroadenosine-3'-phosphate
  modified_base 11: mod_base = OTHER; note = 2'-fluorocytidine-3'-phosphate
  modified_base 12: mod_base = OTHER; note = 2'-O-methylguanosine-3'-phosphate
  modified_base 13: mod_base = OTHER; note = 2'-O-methylguanosine-3'-phosphate
  modified_base 14: mod_base = OTHER; note = 2'-O-methyladenosine-3'-phosphate
  modified_base 15: mod_base = OTHER; note = 2'-O-methyluridine-3'-phosphate
  modified_base 16: mod_base = OTHER; note = 2'-O-methylcytidine-3'-phosphate
  modified_base 17: mod_base = OTHER; note = 2'-O-methyluridine-3'-phosphate
  modified_base 18: mod_base = OTHER; note = 2'-O-methyluridine-3'-phosphate
  modified_base 19: mod_base = OTHER; note = 2'-O-methyladenosine-3'-phosphorothioate
  modified_base 20: mod_base = OTHER; note = 2'-O-methyladenosine-3'-phosphorothioate
  modified_base 21: mod_base = OTHER; note = 2'-O-methyladenosine-3'-phosphate
atccttgctacggatcttaaa

SEQ ID NO: 3861 - RNA, 21 nt, synthetic construct
  source 1..21: mol_type = other RNA
  modified_base 1: mod_base = OTHER; note = 2'-O-methyladenosine-3'-phosphorothioate
  modified_base 2: mod_base = OTHER; note = 2'-O-methylcytidine-3'-phosphorothioate
  modified_base 3: mod_base = OTHER; note = 2'-O-methyluridine-3'-phosphate
  modified_base 4: mod_base = OTHER; note = 2'-O-methylguanosine-3'-phosphate
  modified_base 5: mod_base = OTHER; note = 2'-O-methyladenosine-3'-phosphate
  modified_base 6: mod_base = OTHER; note 4-amino-1-((2R,3R,4R,5R)-3-(docosyloxy)-4-hydroxy-5-(hydrox ymethyl)tetrahydrofuran-2-yl)pyrimidin-2(1H)-one
  modified_base 7: mod_base = OTHER; note = 2'-fluorouridine-3'-phosphate
  modified_base 8: mod_base = OTHER; note = 2'-O-methyladenosine-3'-phosphate
  modified_base 9: mod_base = OTHER; note = 2'-fluorouridine-3'-phosphate
  modified_base 10: mod_base = OTHER; note = 2'-fluorocytidine-3'-phosphate
  modified_base 11: mod_base = OTHER; note = 2'-fluorocytidine-3'-phosphate
  modified_base 12: mod_base = OTHER; note = 2'-O-methylcytidine-3'-phosphate
  modified_base 13: mod_base = OTHER; note = 2'-O-methylguanosine-3'-phosphate
  modified_base 14: mod_base = OTHER; note = 2'-O-methyladenosine-3'-phosphate
  modified_base 15: mod_base = OTHER; note = 2'-O-methyladenosine-3'-phosphate
  modified_base 16: mod_base = OTHER; note = 2'-O-methylguanosine-3'-phosphate
  modified_base 17: mod_base = OTHER; note = 2'-O-methylcytidine-3'-phosphate
  modified_base 18: mod_base = OTHER; note = 2'-O-methyladenosine-3'-phosphate
  modified_base 19: mod_base = OTHER; note = 2'-O-methyladenosine-3'-phosphorothioate
  modified_base 20: mod_base = OTHER; note = 2'-O-methyladenosine-3'-phosphorothioate
  modified_base 21: mod_base = OTHER; note = 2'-O-methyladenosine-3'-phosphate
actgactatcccgaagcaaaa

SEQ ID NO: 3862 - RNA, 21 nt, synthetic construct
  source 1..21: mol_type = other RNA
  modified_base 1: mod_base = OTHER; note = 2'-O-methyluridine-3'-phosphorothioate
  modified_base 2: mod_base = OTHER; note = 2'-O-methylguanosine-3'-phosphorothioate
  modified_base 3: mod_base = OTHER; note = 2'-O-methyluridine-3'-phosphate
  modified_base 4: mod_base = OTHER; note = 2'-O-methyladenosine-3'-phosphate
  modified_base 5: mod_base = OTHER; note = 2'-O-methyluridine-3'-phosphate
  modified_base 6: mod_base = OTHER; note 1-((2R,3R,4R,5R)-3-(docosyloxy)-4-hydroxy-5-(hydroxymethyl) tetrahydrofuran-2-yl)pyrimidine-2,4(1H,3H)-dione
  modified_base 7: mod_base = OTHER; note = 2'-fluorouridine-3'-phosphate
  modified_base 8: mod_base = OTHER; note = 2'-O-methylcytidine-3'-phosphate
  modified_base 9: mod_base = OTHER; note = 2'-fluorouridine-3'-phosphate
  modified_base 10: mod_base = OTHER; note = 2'-fluoroguanosine-3'-phosphate
  modified_base 11: mod_base = OTHER; note = 2'-fluorocytidine-3'-phosphate
  modified_base 12: mod_base = OTHER; note = 2'-O-methyluridine-3'-phosphate
  modified_base 13: mod_base = OTHER; note = 2'-O-methyladenosine-3'-phosphate
  modified_base 14: mod_base = OTHER; note = 2'-O-methyluridine-3'-phosphate
  modified_base 15: mod_base = OTHER; note = 2'-O-methyluridine-3'-phosphate
  modified_base 16: mod_base = OTHER; note = 2'-O-methyladenosine-3'-phosphate
  modified_base 17: mod_base = OTHER; note = 2'-O-methyluridine-3'-phosphate
  modified_base 18: mod_base = OTHER; note = 2'-O-methyluridine-3'-phosphate
  modified_base 19: mod_base = OTHER; note = 2'-O-methyluridine-3'-phosphorothioate
  modified_base 20: mod_base = OTHER; note = 2'-O-methylcytidine-3'-phosphorothioate
  modified_base 21: mod_base = OTHER; note = 2'-O-methyladenosine-3'-phosphate
tgtatttctgctattatttca

SEQ ID NO: 3863 - RNA, 21 nt, synthetic construct
  source 1..21: mol_type = other RNA
  modified_base 1: mod_base = OTHER; note = 2'-O-methyluridine-3'-phosphorothioate
  modified_base 2: mod_base = OTHER; note = 2'-O-methylguanosine-3'-phosphorothioate
  modified_base 3: mod_base = OTHER; note = 2'-O-methyluridine-3'-phosphate
  modified_base 4: mod_base = OTHER; note = 2'-O-methyladenosine-3'-phosphate
  modified_base 5: mod_base = OTHER; note = 2'-O-methyladenosine-3'-phosphate
  modified_base 6: mod_base = OTHER; note 4-amino-1-((2R,3R,4R,5R)-3-(docosyloxy)-4-hydroxy-5-(hydrox ymethyl)tetrahydrofuran-2-yl)pyrimidin-2(1H)-one
  modified_base 7: mod_base = OTHER; note = 2'-fluoroadenosine-3'-phosphate
  modified_base 8: mod_base = OTHER; note = 2'-O-methyladenosine-3'-phosphate
  modified_base 9: mod_base = OTHER; note = 2'-fluorouridine-3'-phosphate
  modified_base 10: mod_base = OTHER; note = 2'-fluoroadenosine-3'-phosphate
  modified_base 11: mod_base = OTHER; note = 2'-fluoroadenosine-3'-phosphate
  modified_base 12: mod_base = OTHER; note = 2'-O-methylcytidine-3'-phosphate
  modified_base 13: mod_base = OTHER; note = 2'-O-methyluridine-3'-phosphate
  modified_base 14: mod_base = OTHER; note = 2'-O-methyladenosine-3'-phosphate
  modified_base 15: mod_base = OTHER; note = 2'-O-methylguanosine-3'-phosphate
  modified_base 16: mod_base = OTHER; note = 2'-O-methylcytidine-3'-phosphate
  modified_base 17: mod_base = OTHER; note = 2'-O-methylcytidine-3'-phosphate
  modified_base 18: mod_base = OTHER; note = 2'-O-methyluridine-3'-phosphate
  modified_base 19: mod_base = OTHER; note = 2'-O-methyladenosine-3'-phosphorothioate
  modified_base 20: mod_base = OTHER; note = 2'-O-methyladenosine-3'-phosphorothioate
  modified_base 21: mod_base = OTHER; note = 2'-O-methyladenosine-3'-phosphate
tgtaacaataactagcctaaa

SEQ ID NO: 3864 - RNA, 21 nt, synthetic construct
  source 1..21: mol_type = other RNA
  modified_base 1: mod_base = OTHER; note = 2'-O-methylguanosine-3'-phosphorothioate
  modified_base 2: mod_base = OTHER; note = 2'-O-methyluridine-3'-phosphorothioate
  modified_base 3: mod_base = OTHER; note = 2'-O-methyluridine-3'-phosphate
  modified_base 4: mod_base = OTHER; note = 2'-O-methylguanosine-3'-phosphate
  modified_base 5: mod_base = OTHER; note = 2'-O-methyluridine-3'-phosphate
  modified_base 6: mod_base = OTHER; note 1-((2R,3R,4R,5R)-3-(docosyloxy)-4-hydroxy-5-(hydroxymethyl) tetrahydrofuran-2-yl)pyrimidine-2,4(1H,3H)-dione
  modified_base 7: mod_base = OTHER; note = 2'-fluorouridine-3'-phosphate
  modified_base 8: mod_base = OTHER; note = 2'-O-methyluridine-3'-phosphate
  modified_base 9: mod_base = OTHER; note = 2'-fluorouridine-3'-phosphate
  modified_base 10: mod_base = OTHER; note = 2'-fluoroadenosine-3'-phosphate
  modified_base 11: mod_base = OTHER; note = 2'-fluorocytidine-3'-phosphate
  modified_base 12: mod_base = OTHER; note = 2'-O-methyluridine-3'-phosphate
  modified_base 13: mod_base = OTHER; note = 2'-O-methylcytidine-3'-phosphate
  modified_base 14: mod_base = OTHER; note = 2'-O-methyluridine-3'-phosphate
  modified_base 15: mod_base = OTHER; note = 2'-O-methyladenosine-3'-phosphate
  modified_base 16: mod_base = OTHER; note = 2'-O-methylguanosine-3'-phosphate
  modified_base 17: mod_base = OTHER; note = 2'-O-methylcytidine-3'-phosphate
  modified_base 18: mod_base = OTHER; note = 2'-O-methyluridine-3'-phosphate
  modified_base 19: mod_base = OTHER; note = 2'-O-methylcytidine-3'-phosphorothioate
  modified_base 20: mod_base = OTHER; note = 2'-O-methyladenosine-3'-phosphorothioate
  modified_base 21: mod_base = OTHER; note = 2'-O-methyladenosine-3'-phosphate
gttgtttttactctagctcaa

SEQ ID NO: 3865 - RNA, 21 nt, synthetic construct
  source 1..21: mol_type = other RNA
  modified_base 1: mod_base = OTHER; note = 2'-O-methylcytidine-3'-phosphorothioate
  modified_base 2: mod_base = OTHER; note = 2'-O-methyladenosine-3'-phosphorothioate
  modified_base 3: mod_base = OTHER; note = 2'-O-methylguanosine-3'-phosphate
  modified_base 4: mod_base = OTHER; note = 2'-O-methylguanosine-3'-phosphate
  modified_base 5: mod_base = OTHER; note = 2'-O-methylcytidine-3'-phosphate
  modified_base 6: mod_base = OTHER; note (2R,3S,4S,5R)-5-(6-amino-9H-purin-9-yl)-4-(docosyloxy)-2-(h ydroxymethyl)tetrahydrofuran-3-ol
  modified_base 7: mod_base = OTHER; note = 2'-fluoroguanosine-3'-phosphate
  modified_base 8: mod_base = OTHER; note = 2'-O-methyluridine-3'-phosphate
  modified_base 9: mod_base = OTHER; note = 2'-fluorouridine-3'-phosphate
  modified_base 10: mod_base = OTHER; note = 2'-fluorouridine-3'-phosphate
  modified_base 11: mod_base = OTHER; note = 2'-fluorouridine-3'-phosphate
  modified_base 12: mod_base = OTHER; note = 2'-O-methyladenosine-3'-phosphate
  modified_base 13: mod_base = OTHER; note = 2'-O-methyluridine-3'-phosphate
  modified_base 14: mod_base = OTHER; note = 2'-O-methyladenosine-3'-phosphate
  modified_base 15: mod_base = OTHER; note = 2'-O-methylcytidine-3'-phosphate
  modified_base 16: mod_base = OTHER; note = 2'-O-methyladenosine-3'-phosphate
  modified_base 17: mod_base = OTHER; note = 2'-O-methyladenosine-3'-phosphate
  modified_base 18: mod_base = OTHER; note = 2'-O-methyluridine-3'-phosphate
  modified_base 19: mod_base = OTHER; note = 2'-O-methylguanosine-3'-phosphorothioate
  modified_base 20: mod_base = OTHER; note = 2'-O-methyladenosine-3'-phosphorothioate
  modified_base 21: mod_base = OTHER; note = 2'-O-methyladenosine-3'-phosphate
caggcagttttatacaatgaa

SEQ ID NO: 3866 - RNA, 21 nt, synthetic construct
  source 1..21: mol_type = other RNA
  modified_base 1: mod_base = OTHER; note = 2'-O-methyladenosine-3'-phosphorothioate
  modified_base 2: mod_base = OTHER; note = 2'-O-methylguanosine-3'-phosphorothioate
  modified_base 3: mod_base = OTHER; note = 2'-O-methylguanosine-3'-phosphate
  modified_base 4: mod_base = OTHER; note = 2'-O-methyladenosine-3'-phosphate
  modified_base 5: mod_base = OTHER; note = 2'-O-methyluridine-3'-phosphate
  modified_base 6: mod_base = OTHER; note 1-((2R,3R,4R,5R)-3-(docosyloxy)-4-hydroxy-5-(hydroxymethyl) tetrahydrofuran-2-yl)pyrimidine-2,4(1H,3H)-dione
  modified_base 7: mod_base = OTHER; note = 2'-fluorocytidine-3'-phosphate
  modified_base 8: mod_base = OTHER; note = 2'-O-methyluridine-3'-phosphate
  modified_base 9: mod_base = OTHER; note = 2'-fluorocytidine-3'-phosphate
  modified_base 10: mod_base = OTHER; note = 2'-fluoroadenosine-3'-phosphate
  modified_base 11: mod_base = OTHER; note = 2'-fluoroguanosine-3'-phosphate
  modified_base 12: mod_base = OTHER; note = 2'-O-methyluridine-3'-phosphate
  modified_base 13: mod_base = OTHER; note = 2'-O-methylcytidine-3'-phosphate
  modified_base 14: mod_base = OTHER; note = 2'-O-methyladenosine-3'-phosphate
  modified_base 15: mod_base = OTHER; note = 2'-O-methylguanosine-3'-phosphate
  modified_base 16: mod_base = OTHER; note = 2'-O-methylguanosine-3'-phosphate
  modified_base 17: mod_base = OTHER; note = 2'-O-methyluridine-3'-phosphate
  modified_base 18: mod_base = OTHER; note = 2'-O-methyluridine-3'-phosphate
  modified_base 19: mod_base = OTHER; note = 2'-O-methyladenosine-3'-phosphorothioate
  modified_base 20: mod_base = OTHER; note = 2'-O-methyluridine-3'-phosphorothioate
  modified_base 21: mod_base = OTHER; note = 2'-O-methyladenosine-3'-phosphate
aggattctcagtcaggttata

SEQ ID NO: 3867 - RNA, 21 nt, synthetic construct
  source 1..21: mol_type = other RNA
  modified_base 1: mod_base = OTHER; note = 2'-O-methyladenosine-3'-phosphorothioate
  modified_base 2: mod_base = OTHER; note = 2'-O-methyluridine-3'-phosphorothioate
  modified_base 3: mod_base = OTHER; note = 2'-O-methyluridine-3'-phosphate
  modified_base 4: mod_base = OTHER; note = 2'-O-methyluridine-3'-phosphate
  modified_base 5: mod_base = OTHER; note = 2'-O-methyluridine-3'-phosphate
  modified_base 6: mod_base = OTHER; note 4-amino-1-((2R,3R,4R,5R)-3-(docosyloxy)-4-hydroxy-5-(hydrox ymethyl)tetrahydrofuran-2-yl)pyrimidin-2(1H)-one
  modified_base 7: mod_base = OTHER; note = 2'-fluorocytidine-3'-phosphate
  modified_base 8: mod_base = OTHER; note = 2'-O-methyladenosine-3'-phosphate
  modified_base 9: mod_base = OTHER; note = 2'-fluorouridine-3'-phosphate
  modified_base 10: mod_base = OTHER; note = 2'-fluorocytidine-3'-phosphate
  modified_base 11: mod_base = OTHER; note = 2'-fluoroadenosine-3'-phosphate
  modified_base 12: mod_base = OTHER; note = 2'-O-methyluridine-3'-phosphate
  modified_base 13: mod_base = OTHER; note = 2'-O-methylguanosine-3'-phosphate
  modified_base 14: mod_base = OTHER; note = 2'-O-methyluridine-3'-phosphate
  modified_base 15: mod_base = OTHER; note = 2'-O-methyluridine-3'-phosphate
  modified_base 16: mod_base = OTHER; note = 2'-O-methyluridine-3'-phosphate
  modified_base 17: mod_base = OTHER; note = 2'-O-methyladenosine-3'-phosphate
  modified_base 18: mod_base = OTHER; note = 2'-O-methyladenosine-3'-phosphate
  modified_base 19: mod_base = OTHER; note = 2'-O-methylguanosine-3'-phosphorothioate
  modified_base 20: mod_base = OTHER; note = 2'-O-methyluridine-3'-phosphorothioate
  modified_base 21: mod_base = OTHER; note = 2'-O-methyladenosine-3'-phosphate
attttccatcatgtttaagta

SEQ ID NO: 3868 - RNA, 21 nt, synthetic construct
  source 1..21: mol_type = other RNA
  modified_base 1: mod_base = OTHER; note = 2'-O-methyluridine-3'-phosphorothioate
  modified_base 2: mod_base = OTHER; note = 2'-O-methylguanosine-3'-phosphorothioate
  modified_base 3: mod_base = OTHER; note = 2'-O-methylcytidine-3'-phosphate
  modified_base 4: mod_base = OTHER; note = 2'-O-methylcytidine-3'-phosphate
  modified_base 5: mod_base = OTHER; note = 2'-O-methyladenosine-3'-phosphate
  modified_base 6: mod_base = OTHER; note 4-amino-1-((2R,3R,4R,5R)-3-(docosyloxy)-4-hydroxy-5-(hydrox ymethyl)tetrahydrofuran-2-yl)pyrimidin-2(1H)-one
  modified_base 7: mod_base = OTHER; note = 2'-fluorouridine-3'-phosphate
  modified_base 8: mod_base = OTHER; note = 2'-O-methyluridine-3'-phosphate
  modified_base 9: mod_base = OTHER; note = 2'-fluorouridine-3'-phosphate
  modified_base 10: mod_base = OTHER; note = 2'-fluorouridine-3'-phosphate
  modified_base 11: mod_base = OTHER; note = 2'-fluoroguanosine-3'-phosphate
  modified_base 12: mod_base = OTHER; note = 2'-O-methyluridine-3'-phosphate
  modified_base 13: mod_base = OTHER; note = 2'-O-methyluridine-3'-phosphate
  modified_base 14: mod_base = OTHER; note = 2'-O-methyladenosine-3'-phosphate
  modified_base 15: mod_base = OTHER; note = 2'-O-methylcytidine-3'-phosphate
  modified_base 16: mod_base = OTHER; note = 2'-O-methylcytidine-3'-phosphate
  modified_base 17: mod_base = OTHER; note = 2'-O-methyladenosine-3'-phosphate
  modified_base 18: mod_base = OTHER; note = 2'-O-methyluridine-3'-phosphate
  modified_base 19: mod_base = OTHER; note = 2'-O-methyluridine-3'-phosphorothioate
  modified_base 20: mod_base = OTHER; note = 2'-O-methylguanosine-3'-phosphorothioate
  modified_base 21: mod_base = OTHER; note = 2'-O-methyladenosine-3'-phosphate
tgccacttttgttaccattga

SEQ ID NO: 3869 - RNA, 21 nt, synthetic construct
  source 1..21: mol_type = other RNA
  modified_base 1: mod_base = OTHER; note = 2'-O-methyladenosine-3'-phosphorothioate
  modified_base 2: mod_base = OTHER; note = 2'-O-methylcytidine-3'-phosphorothioate
  modified_base 3: mod_base = OTHER; note = 2'-O-methyluridine-3'-phosphate
  modified_base 4: mod_base = OTHER; note = 2'-O-methyluridine-3'-phosphate
  modified_base 5: mod_base = OTHER; note = 2'-O-methylguanosine-3'-phosphate
  modified_base 6: mod_base = OTHER; note 4-amino-1-((2R,3R,4R,5R)-3-(docosyloxy)-4-hydroxy-5-(hydrox ymethyl)tetrahydrofuran-2-yl)pyrimidin-2(1H)-one
  modified_base 7: mod_base = OTHER; note = 2'-fluorouridine-3'-phosphate
  modified_base 8: mod_base = OTHER; note = 2'-O-methyladenosine-3'-phosphate
  modified_base 9: mod_base = OTHER; note = 2'-fluoroguanosine-3'-phosphate
  modified_base 10: mod_base = OTHER; note = 2'-fluorouridine-3'-phosphate
  modified_base 11: mod_base = OTHER; note = 2'-fluoroguanosine-3'-phosphate
  modified_base 12: mod_base = OTHER; note = 2'-O-methyluridine-3'-phosphate
  modified_base 13: mod_base = OTHER; note = 2'-O-methylguanosine-3'-phosphate
  modified_base 14: mod_base = OTHER; note = 2'-O-methyluridine-3'-phosphate
  modified_base 15: mod_base = OTHER; note = 2'-O-methylguanosine-3'-phosphate
  modified_base 16: mod_base = OTHER; note = 2'-O-methylguanosine-3'-phosphate
  modified_base 17: mod_base = OTHER; note = 2'-O-methyladenosine-3'-phosphate
  modified_base 18: mod_base = OTHER; note = 2'-O-methyluridine-3'-phosphate
  modified_base 19: mod_base = OTHER; note = 2'-O-methyladenosine-3'-phosphorothioate
  modified_base 20: mod_base = OTHER; note = 2'-O-methyluridine-3'-phosphorothioate
  modified_base 21: mod_base = OTHER; note = 2'-O-methyladenosine-3'-phosphate
acttgctagtgtgtggatata

SEQ ID NO: 3870 - RNA, 21 nt, synthetic construct
  source 1..21: mol_type = other RNA
  modified_base 1: mod_base = OTHER; note = 2'-O-methyladenosine-3'-phosphorothioate
  modified_base 2: mod_base = OTHER; note = 2'-O-methyladenosine-3'-phosphorothioate
  modified_base 3: mod_base = OTHER; note = 2'-O-methyluridine-3'-phosphate
  modified_base 4: mod_base = OTHER; note = 2'-O-methylcytidine-3'-phosphate
  modified_base 5: mod_base = OTHER; note = 2'-O-methyluridine-3'-phosphate
  modified_base 6: mod_base = OTHER; note 1-((2R,3R,4R,5R)-3-(docosyloxy)-4-hydroxy-5-(hydroxymethyl) tetrahydrofuran-2-yl)pyrimidine-2,4(1H,3H)-dione
  modified_base 7: mod_base = OTHER; note = 2'-fluoroadenosine-3'-phosphate
  modified_base 8: mod_base = OTHER; note = 2'-O-methylcytidine-3'-phosphate
  modified_base 9: mod_base = OTHER; note = 2'-fluorouridine-3'-phosphate
  modified_base 10: mod_base = OTHER; note = 2'-fluorouridine-3'-phosphate
  modified_base 11: mod_base = OTHER; note = 2'-fluoroguanosine-3'-phosphate
  modified_base 12: mod_base = OTHER; note = 2'-O-methyladenosine-3'-phosphate
  modified_base 13: mod_base = OTHER; note = 2'-O-methylguanosine-3'-phosphate
  modified_base 14: mod_base = OTHER; note = 2'-O-methyladenosine-3'-phosphate
  modified_base 15: mod_base = OTHER; note = 2'-O-methyladenosine-3'-phosphate
  modified_base 16: mod_base = OTHER; note = 2'-O-methyladenosine-3'-phosphate
  modified_base 17: mod_base = OTHER; note = 2'-O-methyluridine-3'-phosphate
  modified_base 18: mod_base = OTHER; note = 2'-O-methyluridine-3'-phosphate
  modified_base 19: mod_base = OTHER; note = 2'-O-methylguanosine-3'-phosphorothioate
  modified_base 20: mod_base = OTHER; note = 2'-O-methylcytidine-3'-phosphorothioate
  modified_base 21: mod_base = OTHER; note = 2'-O-methyladenosine-3'-phosphate
aatcttacttgagaaattgca

SEQ ID NO: 3871 - RNA, 21 nt, synthetic construct
  source 1..21: mol_type = other RNA
  modified_base 1: mod_base = OTHER; note = 2'-O-methyladenosine-3'-phosphorothioate
  modified_base 2: mod_base = OTHER; note = 2'-O-methylguanosine-3'-phosphorothioate
  modified_base 3: mod_base = OTHER; note = 2'-O-methyluridine-3'-phosphate
  modified_base 4: mod_base = OTHER; note = 2'-O-methyluridine-3'-phosphate
  modified_base 5: mod_base = OTHER; note = 2'-O-methylcytidine-3'-phosphate
  modified_base 6: mod_base = OTHER; note 2-amino-9-((2R,3S,4S,5R)-3-(docosyloxy)-4-hydroxy-5-(hydrox ymethyl)tetrahydrofuran-2-yl)-1,9-dihydro-6H-purin-6-one
  modified_base 7: mod_base = OTHER; note = 2'-fluoroadenosine-3'-phosphate
  modified_base 8: mod_base = OTHER; note = 2'-O-methylguanosine-3'-phosphate
  modified_base 9: mod_base = OTHER; note = 2'-fluoroadenosine-3'-phosphate
  modified_base 10: mod_base = OTHER; note = 2'-fluorocytidine-3'-phosphate
  modified_base 11: mod_base = OTHER; note = 2'-fluorouridine-3'-phosphate
  modified_base 12: mod_base = OTHER; note = 2'-O-methyluridine-3'-phosphate
  modified_base 13: mod_base = OTHER; note = 2'-O-methylguanosine-3'-phosphate
  modified_base 14: mod_base = OTHER; note = 2'-O-methylcytidine-3'-phosphate
  modified_base 15: mod_base = OTHER; note = 2'-O-methyladenosine-3'-phosphate
  modified_base 16: mod_base = OTHER; note = 2'-O-methyluridine-3'-phosphate
  modified_base 17: mod_base = OTHER; note = 2'-O-methyluridine-3'-phosphate
  modified_base 18: mod_base = OTHER; note = 2'-O-methyluridine-3'-phosphate
  modified_base 19: mod_base = OTHER; note = 2'-O-methylguanosine-3'-phosphorothioate
  modified_base 20: mod_base = OTHER; note = 2'-O-methyladenosine-3'-phosphorothioate
  modified_base 21: mod_base = OTHER; note = 2'-O-methyladenosine-3'-phosphate
agttcgagacttgcatttgaa

SEQ ID NO: 3872 - RNA, 21 nt, synthetic construct
  source 1..21: mol_type = other RNA
  modified_base 1: mod_base = OTHER; note = 2'-O-methylcytidine-3'-phosphorothioate
  modified_base 2: mod_base = OTHER; note = 2'-O-methylcytidine-3'-phosphorothioate
  modified_base 3: mod_base = OTHER; note = 2'-O-methyladenosine-3'-phosphate
  modified_base 4: mod_base = OTHER; note = 2'-O-methyluridine-3'-phosphate
  modified_base 5: mod_base = OTHER; note = 2'-O-methyladenosine-3'-phosphate
  modified_base 6: mod_base = OTHER; note 2-amino-9-((2R,3S,4S,5R)-3-(docosyloxy)-4-hydroxy-5-(hydrox ymethyl)tetrahydrofuran-2-yl)-1,9-dihydro-6H-purin-6-one
  modified_base 7: mod_base = OTHER; note = 2'-fluoroadenosine-3'-phosphate
  modified_base 8: mod_base = OTHER; note = 2'-O-methyladenosine-3'-phosphate
  modified_base 9: mod_base = OTHER; note = 2'-fluorouridine-3'-phosphate
  modified_base 10: mod_base = OTHER; note = 2'-fluorouridine-3'-phosphate
  modified_base 11: mod_base = OTHER; note = 2'-fluorouridine-3'-phosphate
  modified_base 12: mod_base = OTHER; note = 2'-O-methylcytidine-3'-phosphate
  modified_base 13: mod_base = OTHER; note = 2'-O-methylcytidine-3'-phosphate
  modified_base 14: mod_base = OTHER; note = 2'-O-methyluridine-3'-phosphate
  modified_base 15: mod_base = OTHER; note = 2'-O-methylguanosine-3'-phosphate
  modified_base 16: mod_base = OTHER; note = 2'-O-methyladenosine-3'-phosphate
  modified_base 17: mod_base = OTHER; note = 2'-O-methyluridine-3'-phosphate
  modified_base 18: mod_base = OTHER; note = 2'-O-methyladenosine-3'-phosphate
  modified_base 19: mod_base = OTHER; note = 2'-O-methylcytidine-3'-phosphorothioate
  modified_base 20: mod_base = OTHER; note = 2'-O-methyluridine-3'-phosphorothioate
  modified_base 21: mod_base = OTHER; note = 2'-O-methyladenosine-3'-phosphate
ccatagaatttcctgatacta

SEQ ID NO: 3873 - RNA, 21 nt, synthetic construct
  source 1..21: mol_type = other RNA
  modified_base 1: mod_base = OTHER; note = 2'-O-methyladenosine-3'-phosphorothioate
  modified_base 2: mod_base = OTHER; note = 2'-O-methylguanosine-3'-phosphorothioate
  modified_base 3: mod_base = OTHER; note = 2'-O-methylguanosine-3'-phosphate
  modified_base 4: mod_base = OTHER; note = 2'-O-methyluridine-3'-phosphate
  modified_base 5: mod_base = OTHER; note = 2'-O-methyladenosine-3'-phosphate
  modified_base 6: mod_base = OTHER; note (2R,3S,4S,5R)-5-(6-amino-9H-purin-9-yl)-4-(docosyloxy)-2-(h ydroxymethyl)tetrahydrofuran-3-ol
  modified_base 7: mod_base = OTHER; note = 2'-fluorouridine-3'-phosphate
  modified_base 8: mod_base = OTHER; note = 2'-O-methyluridine-3'-phosphate
  modified_base 9: mod_base = OTHER; note = 2'-fluorocytidine-3'-phosphate
  modified_base 10: mod_base = OTHER; note = 2'-fluorocytidine-3'-phosphate
  modified_base 11: mod_base = OTHER; note = 2'-fluorouridine-3'-phosphate
  modified_base 12: mod_base = OTHER; note = 2'-O-methyluridine-3'-phosphate
  modified_base 13: mod_base = OTHER; note = 2'-O-methyluridine-3'-phosphate
  modified_base 14: mod_base = OTHER; note = 2'-O-methyladenosine-3'-phosphate
  modified_base 15: mod_base = OTHER; note = 2'-O-methylguanosine-3'-phosphate
  modified_base 16: mod_base = OTHER; note = 2'-O-methyladenosine-3'-phosphate
  modified_base 17: mod_base = OTHER; note = 2'-O-methyladenosine-3'-phosphate
  modified_base 18: mod_base = OTHER; note = 2'-O-methyluridine-3'-phosphate
  modified_base 19: mod_base = OTHER; note = 2'-O-methyladenosine-3'-phosphorothioate
  modified_base 20: mod_base = OTHER; note = 2'-O-methyluridine-3'-phosphorothioate
  modified_base 21: mod_base = OTHER; note = 2'-O-methyladenosine-3'-phosphate
aggtaattcctttagaatata

SEQ ID NO: 3874 - RNA, 21 nt, synthetic construct
  source 1..21: mol_type = other RNA
  modified_base 1: mod_base = OTHER; note = 2'-O-methylcytidine-3'-phosphorothioate
  modified_base 2: mod_base = OTHER; note = 2'-O-methyluridine-3'-phosphorothioate
  modified_base 3: mod_base = OTHER; note = 2'-O-methyluridine-3'-phosphate
  modified_base 4: mod_base = OTHER; note = 2'-O-methyladenosine-3'-phosphate
  modified_base 5: mod_base = OTHER; note = 2'-O-methyluridine-3'-phosphate
  modified_base 6: mod_base = OTHER; note 2-amino-9-((2R,3S,4S,5R)-3-(docosyloxy)-4-hydroxy-5-(hydrox ymethyl)tetrahydrofuran-2-yl)-1,9-dihydro-6H-purin-6-one
  modified_base 7: mod_base = OTHER; note = 2'-fluoroguanosine-3'-phosphate
  modified_base 8: mod_base = OTHER; note = 2'-O-methyladenosine-3'-phosphate
  modified_base 9: mod_base = OTHER; note = 2'-fluoroadenosine-3'-phosphate
  modified_base 10: mod_base = OTHER; note = 2'-fluoroadenosine-3'-phosphate
  modified_base 11: mod_base = OTHER; note = 2'-fluorocytidine-3'-phosphate
  modified_base 12: mod_base = OTHER; note = 2'-O-methyluridine-3'-phosphate
  modified_base 13: mod_base = OTHER; note = 2'-O-methylcytidine-3'-phosphate
  modified_base 14: mod_base = OTHER; note = 2'-O-methyladenosine-3'-phosphate
  modified_base 15: mod_base = OTHER; note = 2'-O-methyladenosine-3'-phosphate
  modified_base 16: mod_base = OTHER; note = 2'-O-methylcytidine-3'-phosphate
  modified_base 17: mod_base = OTHER; note = 2'-O-methyladenosine-3'-phosphate
  modified_base 18: mod_base = OTHER; note = 2'-O-methyladenosine-3'-phosphate
  modified_base 19: mod_base = OTHER; note = 2'-O-methylguanosine-3'-phosphorothioate
  modified_base 20: mod_base = OTHER; note = 2'-O-methyladenosine-3'-phosphorothioate
  modified_base 21: mod_base = OTHER; note = 2'-O-methyladenosine-3'-phosphate
cttatggaaactcaacaagaa

SEQ ID NO: 3875 - RNA, 21 nt, synthetic construct
  source 1..21: mol_type = other RNA
  modified_base 1: mod_base = OTHER; note = 2'-O-methyladenosine-3'-phosphorothioate
  modified_base 2: mod_base = OTHER; note = 2'-O-methyladenosine-3'-phosphorothioate
  modified_base 3: mod_base = OTHER; note = 2'-O-methylguanosine-3'-phosphate
  modified_base 4: mod_base = OTHER; note = 2'-O-methylcytidine-3'-phosphate
  modified_base 5: mod_base = OTHER; note = 2'-O-methyladenosine-3'-phosphate
  modified_base 6: mod_base = OTHER; note 2-amino-9-((2R,3S,4S,5R)-3-(docosyloxy)-4-hydroxy-5-(hydrox ymethyl)tetrahydrofuran-2-yl)-1,9-dihydro-6H-purin-6-one
  modified_base 7: mod_base = OTHER; note = 2'-fluorocytidine-3'-phosphate
  modified_base 8: mod_base = OTHER; note = 2'-O-methyladenosine-3'-phosphate
  modified_base 9: mod_base = OTHER; note = 2'-fluorouridine-3'-phosphate
  modified_base 10: mod_base = OTHER; note = 2'-fluorouridine-3'-phosphate
  modified_base 11: mod_base = OTHER; note = 2'-fluorouridine-3'-phosphate
  modified_base 12: mod_base = OTHER; note = 2'-O-methyluridine-3'-phosphate
  modified_base 13: mod_base = OTHER; note = 2'-O-methyladenosine-3'-phosphate
  modified_base 14: mod_base = OTHER; note = 2'-O-methyladenosine-3'-phosphate
  modified_base 15: mod_base = OTHER; note = 2'-O-methyladenosine-3'-phosphate
  modified_base 16: mod_base = OTHER; note = 2'-O-methyluridine-3'-phosphate
  modified_base 17: mod_base = OTHER; note = 2'-O-methyluridine-3'-phosphate
  modified_base 18: mod_base = OTHER; note = 2'-O-methyladenosine-3'-phosphate
  modified_base 19: mod_base = OTHER; note = 2'-O-methylcytidine-3'-phosphorothioate
  modified_base 20: mod_base = OTHER; note = 2'-O-methylguanosine-3'-phosphorothioate
  modified_base 21: mod_base = OTHER; note = 2'-O-methyladenosine-3'-phosphate
aagcagcattttaaattacga

SEQ ID NO: 3876 - RNA, 21 nt, synthetic construct
  source 1..21: mol_type = other RNA
  modified_base 1: mod_base = OTHER; note = 2'-O-methyluridine-3'-phosphorothioate
  modified_base 2: mod_base = OTHER; note = 2'-O-methylguanosine-3'-phosphorothioate
  modified_base 3: mod_base = OTHER; note = 2'-O-methyladenosine-3'-phosphate
  modified_base 4: mod_base = OTHER; note = 2'-O-methylcytidine-3'-phosphate
  modified_base 5: mod_base = OTHER; note = 2'-O-methyluridine-3'-phosphate
  modified_base 6: mod_base = OTHER; note 4-amino-1-((2R,3R,4R,5R)-3-(docosyloxy)-4-hydroxy-5-(hydrox ymethyl)tetrahydrofuran-2-yl)pyrimidin-2(1H)-one
  modified_base 7: mod_base = OTHER; note = 2'-fluorouridine-3'-phosphate
  modified_base 8: mod_base = OTHER; note = 2'-O-methylcytidine-3'-phosphate
  modified_base 9: mod_base = OTHER; note = 2'-fluoroadenosine-3'-phosphate
  modified_base 10: mod_base = OTHER; note = 2'-fluoroadenosine-3'-phosphate
  modified_base 11: mod_base = OTHER; note = 2'-fluorocytidine-3'-phosphate
  modified_base 12: mod_base = OTHER; note = 2'-O-methyluridine-3'-phosphate
  modified_base 13: mod_base = OTHER; note = 2'-O-methylguanosine-3'-phosphate
  modified_base 14: mod_base = OTHER; note = 2'-O-methyladenosine-3'-phosphate
  modified_base 15: mod_base = OTHER; note = 2'-O-methylcytidine-3'-phosphate
  modified_base 16: mod_base = OTHER; note = 2'-O-methylcytidine-3'-phosphate
  modified_base 17: mod_base = OTHER; note = 2'-O-methyladenosine-3'-phosphate
  modified_base 18: mod_base = OTHER; note = 2'-O-methyluridine-3'-phosphate
  modified_base 19: mod_base = OTHER; note = 2'-O-methyluridine-3'-phosphorothioate
  modified_base 20: mod_base = OTHER; note = 2'-O-methylcytidine-3'-phosphorothioate
  modified_base 21: mod_base = OTHER; note = 2'-O-methyladenosine-3'-phosphate
tgactctcaactgaccattca

SEQ ID NO: 3877 - RNA, 21 nt, synthetic construct
  source 1..21: mol_type = other RNA
  modified_base 1: mod_base = OTHER; note = 2'-O-methyladenosine-3'-phosphorothioate
  modified_base 2: mod_base = OTHER; note = 2'-O-methylguanosine-3'-phosphorothioate
  modified_base 3: mod_base = OTHER; note = 2'-O-methylguanosine-3'-phosphate
  modified_base 4: mod_base = OTHER; note = 2'-O-methyluridine-3'-phosphate
  modified_base 5: mod_base = OTHER; note = 2'-O-methyluridine-3'-phosphate
  modified_base 6: mod_base = OTHER; note 1-((2R,3R,4R,5R)-3-(docosyloxy)-4-hydroxy-5-(hydroxymethyl) tetrahydrofuran-2-yl)pyrimidine-2,4(1H,3H)-dione
  modified_base 7: mod_base = OTHER; note = 2'-fluoroadenosine-3'-phosphate
  modified_base 8: mod_base = OTHER; note = 2'-O-methyluridine-3'-phosphate
  modified_base 9: mod_base = OTHER; note = 2'-fluorocytidine-3'-phosphate
  modified_base 10: mod_base = OTHER; note = 2'-fluorocytidine-3'-phosphate
  modified_base 11: mod_base = OTHER; note = 2'-fluoroadenosine-3'-phosphate
  modified_base 12: mod_base = OTHER; note = 2'-O-methyluridine-3'-phosphate
  modified_base 13: mod_base = OTHER; note = 2'-O-methylguanosine-3'-phosphate
  modified_base 14: mod_base = OTHER; note = 2'-O-methyladenosine-3'-phosphate
  modified_base 15: mod_base = OTHER; note = 2'-O-methyladenosine-3'-phosphate
  modified_base 16: mod_base = OTHER; note = 2'-O-methylguanosine-3'-phosphate
  modified_base 17: mod_base = OTHER; note = 2'-O-methylguanosine-3'-phosphate
  modified_base 18: mod_base = OTHER; note = 2'-O-methyladenosine-3'-phosphate
  modified_base 19: mod_base = OTHER; note = 2'-O-methylcytidine-3'-phosphorothioate
  modified_base 20: mod_base = OTHER; note = 2'-O-methyluridine-3'-phosphorothioate
  modified_base 21: mod_base = OTHER; note = 2'-O-methyladenosine-3'-phosphate
aggtttatccatgaaggacta

SEQ ID NO: 3878 - RNA, 21 nt, synthetic construct
  source 1..21: mol_type = other RNA
  modified_base 1: mod_base = OTHER; note = 2'-O-methyladenosine-3'-phosphorothioate
  modified_base 2: mod_base = OTHER; note = 2'-O-methylcytidine-3'-phosphorothioate
  modified_base 3: mod_base = OTHER; note = 2'-O-methylcytidine-3'-phosphate
  modified_base 4: mod_base = OTHER; note = 2'-O-methyladenosine-3'-phosphate
  modified_base 5: mod_base = OTHER; note = 2'-O-methyladenosine-3'-phosphate
  modified_base 6: mod_base = OTHER; note 2-amino-9-((2R,3S,4S,5R)-3-(docosyloxy)-4-hydroxy-5-(hydrox ymethyl)tetrahydrofuran-2-yl)-1,9-dihydro-6H-purin-6-one
  modified_base 7: mod_base = OTHER; note = 2'-fluoroadenosine-3'-phosphate
  modified_base 8: mod_base = OTHER; note = 2'-O-methyladenosine-3'-phosphate
  modified_base 9: mod_base = OTHER; note = 2'-fluorouridine-3'-phosphate
  modified_base 10: mod_base = OTHER; note = 2'-fluorouridine-3'-phosphate
  modified_base 11: mod_base = OTHER; note = 2'-fluorouridine-3'-phosphate
  modified_base 12: mod_base = OTHER; note = 2'-O-methylguanosine-3'-phosphate
  modified_base 13: mod_base = OTHER; note = 2'-O-methylguanosine-3'-phosphate
  modified_base 14: mod_base = OTHER; note = 2'-O-methylcytidine-3'-phosphate
  modified_base 15: mod_base = OTHER; note = 2'-O-methyladenosine-3'-phosphate
  modified_base 16: mod_base = OTHER; note = 2'-O-methyluridine-3'-phosphate
  modified_base 17: mod_base = OTHER; note = 2'-O-methyluridine-3'-phosphate
  modified_base 18: mod_base = OTHER; note = 2'-O-methyluridine-3'-phosphate
  modified_base 19: mod_base = OTHER; note = 2'-O-methylcytidine-3'-phosphorothioate
  modified_base 20: mod_base = OTHER; note = 2'-O-methyladenosine-3'-phosphorothioate
  modified_base 21: mod_base = OTHER; note = 2'-O-methyladenosine-3'-phosphate
accaagaatttggcatttcaa

SEQ ID NO: 3879 - RNA, 21 nt, synthetic construct
  source 1..21: mol_type = other RNA
  modified_base 1: mod_base = OTHER; note = 2'-O-methyluridine-3'-phosphorothioate
  modified_base 2: mod_base = OTHER; note = 2'-O-methyladenosine-3'-phosphorothioate
  modified_base 3: mod_base = OTHER; note = 2'-O-methyluridine-3'-phosphate
  modified_base 4: mod_base = OTHER; note = 2'-O-methylcytidine-3'-phosphate
  modified_base 5: mod_base = OTHER; note = 2'-O-methyluridine-3'-phosphate
  modified_base 6: mod_base = OTHER; note (2R,3S,4S,5R)-5-(6-amino-9H-purin-9-yl)-4-(docosyloxy)-2-(h ydroxymethyl)tetrahydrofuran-3-ol
  modified_base 7: mod_base = OTHER; note = 2'-fluoroguanosine-3'-phosphate
  modified_base 8: mod_base = OTHER; note = 2'-O-methyladenosine-3'-phosphate
  modified_base 9: mod_base = OTHER; note = 2'-fluoroadenosine-3'-phosphate
  modified_base 10: mod_base = OTHER; note = 2'-fluorouridine-3'-phosphate
  modified_base 11: mod_base = OTHER; note = 2'-fluoroadenosine-3'-phosphate
  modified_base 12: mod_base = OTHER; note = 2'-O-methyluridine-3'-phosphate
  modified_base 13: mod_base = OTHER; note = 2'-O-methyluridine-3'-phosphate
  modified_base 14: mod_base = OTHER; note = 2'-O-methyluridine-3'-phosphate
  modified_base 15: mod_base = OTHER; note = 2'-O-methylguanosine-3'-phosphate
  modified_base 16: mod_base = OTHER; note = 2'-O-methylguanosine-3'-phosphate
  modified_base 17: mod_base = OTHER; note = 2'-O-methylcytidine-3'-phosphate
  modified_base 18: mod_base = OTHER; note = 2'-O-methyluridine-3'-phosphate
  modified_base 19: mod_base = OTHER; note = 2'-O-methyluridine-3'-phosphorothioate
  modified_base 20: mod_base = OTHER; note = 2'-O-methyladenosine-3'-phosphorothioate
  modified_base 21: mod_base = OTHER; note = 2'-O-methyladenosine-3'-phosphate
tatctagaatatttggcttaa

SEQ ID NO: 3880 - RNA, 21 nt, synthetic construct
  source 1..21: mol_type = other RNA
  modified_base 1: mod_base = OTHER; note = 2'-O-methylcytidine-3'-phosphorothioate
  modified_base 2: mod_base = OTHER; note = 2'-O-methyluridine-3'-phosphorothioate
  modified_base 3: mod_base = OTHER; note = 2'-O-methylcytidine-3'-phosphate
  modified_base 4: mod_base = OTHER; note = 2'-O-methylcytidine-3'-phosphate
  modified_base 5: mod_base = OTHER; note = 2'-O-methyluridine-3'-phosphate
  modified_base 6: mod_base = OTHER; note 2-amino-9-((2R,3S,4S,5R)-3-(docosyloxy)-4-hydroxy-5-(hydrox ymethyl)tetrahydrofuran-2-yl)-1,9-dihydro-6H-purin-6-one
  modified_base 7: mod_base = OTHER; note = 2'-fluorocytidine-3'-phosphate
  modified_base 8: mod_base = OTHER; note = 2'-O-methyladenosine-3'-phosphate
  modified_base 9: mod_base = OTHER; note = 2'-fluoroguanosine-3'-phosphate
  modified_base 10: mod_base = OTHER; note = 2'-fluoroadenosine-3'-phosphate
  modified_base 11: mod_base = OTHER; note = 2'-fluoroadenosine-3'-phosphate
  modified_base 12: mod_base = OTHER; note = 2'-O-methyluridine-3'-phosphate
  modified_base 13: mod_base = OTHER; note = 2'-O-methyladenosine-3'-phosphate
  modified_base 14: mod_base = OTHER; note = 2'-O-methylcytidine-3'-phosphate
  modified_base 15: mod_base = OTHER; note = 2'-O-methyladenosine-3'-phosphate
  modified_base 16: mod_base = OTHER; note = 2'-O-methyluridine-3'-phosphate
  modified_base 17: mod_base = OTHER; note = 2'-O-methyladenosine-3'-phosphate
  modified_base 18: mod_base = OTHER; note = 2'-O-methylcytidine-3'-phosphate
  modified_base 19: mod_base = OTHER; note = 2'-O-methyladenosine-3'-phosphorothioate
  modified_base 20: mod_base = OTHER; note = 2'-O-methyladenosine-3'-phosphorothioate
  modified_base 21: mod_base = OTHER; note = 2'-O-methyladenosine-3'-phosphate
ctcctgcagaatacatacaaa

SEQ ID NO: 3881 - RNA, 21 nt, synthetic construct
  source 1..21: mol_type = other RNA
  modified_base 1: mod_base = OTHER; note = 2'-O-methyluridine-3'-phosphorothioate
  modified_base 2: mod_base = OTHER; note = 2'-O-methylcytidine-3'-phosphorothioate
  modified_base 3: mod_base = OTHER; note = 2'-O-methyladenosine-3'-phosphate
  modified_base 4: mod_base = OTHER; note = 2'-O-methylcytidine-3'-phosphate
  modified_base 5: mod_base = OTHER; note = 2'-O-methyladenosine-3'-phosphate
  modified_base 6: mod_base = OTHER; note 4-amino-1-((2R,3R,4R,5R)-3-(docosyloxy)-4-hydroxy-5-(hydrox ymethyl)tetrahydrofuran-2-yl)pyrimidin-2(1H)-one
  modified_base 7: mod_base = OTHER; note = 2'-fluorocytidine-3'-phosphate
  modified_base 8: mod_base = OTHER; note = 2'-O-methyladenosine-3'-phosphate
  modified_base 9: mod_base = OTHER; note = 2'-fluorouridine-3'-phosphate
  modified_base 10: mod_base = OTHER; note = 2'-fluorouridine-3'-phosphate
  modified_base 11: mod_base = OTHER; note = 2'-fluorouridine-3'-phosphate
  modified_base 12: mod_base = OTHER; note = 2'-O-methylcytidine-3'-phosphate
  modified_base 13: mod_base = OTHER; note = 2'-O-methylcytidine-3'-phosphate
  modified_base 14: mod_base = OTHER; note = 2'-O-methyluridine-3'-phosphate
  modified_base 15: mod_base = OTHER; note = 2'-O-methylguanosine-3'-phosphate
  modified_base 16: mod_base = OTHER; note = 2'-O-methylguanosine-3'-phosphate
  modified_base 17: mod_base = OTHER; note = 2'-O-methyladenosine-3'-phosphate
  modified_base 18: mod_base = OTHER; note = 2'-O-methyluridine-3'-phosphate
  modified_base 19: mod_base = OTHER; note = 2'-O-methyluridine-3'-phosphorothioate
  modified_base 20: mod_base = OTHER; note = 2'-O-methyluridine-3'-phosphorothioate
  modified_base 21: mod_base = OTHER; note = 2'-O-methyladenosine-3'-phosphate
tcacaccatttcctggattta

SEQ ID NO: 3882 - RNA, 21 nt, synthetic construct
  source 1..21: mol_type = other RNA
  modified_base 1: mod_base = OTHER; note = 2'-O-methyladenosine-3'-phosphorothioate
  modified_base 2: mod_base = OTHER; note = 2'-O-methyluridine-3'-phosphorothioate
  modified_base 3: mod_base = OTHER; note = 2'-O-methylguanosine-3'-phosphate
  modified_base 4: mod_base = OTHER; note = 2'-O-methyluridine-3'-phosphate
  modified_base 5: mod_base = OTHER; note = 2'-O-methylguanosine-3'-phosphate
  modified_base 6: mod_base = OTHER; note 2-amino-9-((2R,3S,4S,5R)-3-(docosyloxy)-4-hydroxy-5-(hydrox ymethyl)tetrahydrofuran-2-yl)-1,9-dihydro-6H-purin-6-one
  modified_base 7: mod_base = OTHER; note = 2'-fluoroadenosine-3'-phosphate
  modified_base 8: mod_base = OTHER; note = 2'-O-methyladenosine-3'-phosphate
  modified_base 9: mod_base = OTHER; note = 2'-fluorouridine-3'-phosphate
  modified_base 10: mod_base = OTHER; note = 2'-fluorouridine-3'-phosphate
  modified_base 11: mod_base = OTHER; note = 2'-fluorocytidine-3'-phosphate
  modified_base 12: mod_base = OTHER; note = 2'-O-methyladenosine-3'-phosphate
  modified_base 13: mod_base = OTHER; note = 2'-O-methyladenosine-3'-phosphate
  modified_base 14: mod_base = OTHER; note = 2'-O-methylguanosine-3'-phosphate
  modified_base 15: mod_base = OTHER; note = 2'-O-methylcytidine-3'-phosphate
  modified_base 16: mod_base = OTHER; note = 2'-O-methylguanosine-3'-phosphate
  modified_base 17: mod_base = OTHER; note = 2'-O-methylcytidine-3'-phosphate
  modified_base 18: mod_base = OTHER; note = 2'-O-methyluridine-3'-phosphate
  modified_base 19: mod_base = OTHER; note = 2'-O-methyluridine-3'-phosphorothioate
  modified_base 20: mod_base = OTHER; note = 2'-O-methyluridine-3'-phosphorothioate
  modified_base 21: mod_base = OTHER; note = 2'-O-methyladenosine-3'-phosphate
atgtggaattcaagcgcttta

SEQ ID NO: 3883 - RNA, 21 nt, synthetic construct
  source 1..21: mol_type = other RNA
  modified_base 1: mod_base = OTHER; note = 2'-O-methyladenosine-3'-phosphorothioate
  modified_base 2: mod_base = OTHER; note = 2'-O-methyluridine-3'-phosphorothioate
  modified_base 3: mod_base = OTHER; note = 2'-O-methyluridine-3'-phosphate
  modified_base 4: mod_base = OTHER; note = 2'-O-methylguanosine-3'-phosphate
  modified_base 5: mod_base = OTHER; note = 2'-O-methyluridine-3'-phosphate
  modified_base 6: mod_base = OTHER; note 2-amino-9-((2R,3S,4S,5R)-3-(docosyloxy)-4-hydroxy-5-(hydrox ymethyl)tetrahydrofuran-2-yl)-1,9-dihydro-6H-purin-6-one
  modified_base 7: mod_base = OTHER; note = 2'-fluorouridine-3'-phosphate
  modified_base 8: mod_base = OTHER; note = 2'-O-methyladenosine-3'-phosphate
  modified_base 9: mod_base = OTHER; note = 2'-fluorouridine-3'-phosphate
  modified_base 10: mod_base = OTHER; note = 2'-fluorouridine-3'-phosphate
  modified_base 11: mod_base = OTHER; note = 2'-fluoroadenosine-3'-phosphate
  modified_base 12: mod_base = OTHER; note = 2'-O-methyluridine-3'-phosphate
  modified_base 13: mod_base = OTHER; note = 2'-O-methylcytidine-3'-phosphate
  modified_base 14: mod_base = OTHER; note = 2'-O-methyluridine-3'-phosphate
  modified_base 15: mod_base = OTHER; note = 2'-O-methyladenosine-3'-phosphate
  modified_base 16: mod_base = OTHER; note = 2'-O-methylcytidine-3'-phosphate
  modified_base 17: mod_base = OTHER; note = 2'-O-methyluridine-3'-phosphate
  modified_base 18: mod_base = OTHER; note = 2'-O-methyladenosine-3'-phosphate
  modified_base 19: mod_base = OTHER; note = 2'-O-methyluridine-3'-phosphorothioate
  modified_base 20: mod_base = OTHER; note = 2'-O-methylguanosine-3'-phosphorothioate
  modified_base 21: mod_base = OTHER; note = 2'-O-methyladenosine-3'-phosphate
attgtgtattatctactatga

SEQ ID NO: 3884 - RNA, 21 nt, synthetic construct
  source 1..21: mol_type = other RNA
  modified_base 1: mod_base = OTHER; note = 2'-O-methyladenosine-3'-phosphorothioate
  modified_base 2: mod_base = OTHER; note = 2'-O-methyladenosine-3'-phosphorothioate
  modified_base 3: mod_base = OTHER; note = 2'-O-methyluridine-3'-phosphate
  modified_base 4: mod_base = OTHER; note = 2'-O-methylguanosine-3'-phosphate
  modified_base 5: mod_base = OTHER; note = 2'-O-methylguanosine-3'-phosphate
  modified_base 6: mod_base = OTHER; note (2R,3S,4S,5R)-5-(6-amino-9H-purin-9-yl)-4-(docosyloxy)-2-(h ydroxymethyl)tetrahydrofuran-3-ol
  modified_base 7: mod_base = OTHER; note = 2'-fluoroguanosine-3'-phosphate
  modified_base 8: mod_base = OTHER; note = 2'-O-methyluridine-3'-phosphate
  modified_base 9: mod_base = OTHER; note = 2'-fluoroadenosine-3'-phosphate
  modified_base 10: mod_base = OTHER; note = 2'-fluoroadenosine-3'-phosphate
  modified_base 11: mod_base = OTHER; note = 2'-fluorouridine-3'-phosphate
  modified_base 12: mod_base = OTHER; note = 2'-O-methylguanosine-3'-phosphate
  modified_base 13: mod_base = OTHER; note = 2'-O-methyladenosine-3'-phosphate
  modified_base 14: mod_base = OTHER; note = 2'-O-methyladenosine-3'-phosphate
  modified_base 15: mod_base = OTHER; note = 2'-O-methyladenosine-3'-phosphate
  modified_base 16: mod_base = OTHER; note = 2'-O-methyladenosine-3'-phosphate
  modified_base 17: mod_base = OTHER; note = 2'-O-methyluridine-3'-phosphate
  modified_base 18: mod_base = OTHER; note = 2'-O-methylguanosine-3'-phosphate
  modified_base 19: mod_base = OTHER; note = 2'-O-methyladenosine-3'-phosphorothioate
  modified_base 20: mod_base = OTHER; note = 2'-O-methyluridine-3'-phosphorothioate
  modified_base 21: mod_base = OTHER; note = 2'-O-methyladenosine-3'-phosphate
aatggagtaatgaaaatgata

SEQ ID NO: 3885 - RNA, 21 nt, synthetic construct
  source 1..21: mol_type = other RNA
  modified_base 1: mod_base = OTHER; note = 2'-O-methyladenosine-3'-phosphorothioate
  modified_base 2: mod_base = OTHER; note = 2'-O-methylcytidine-3'-phosphorothioate
  modified_base 3: mod_base = OTHER; note = 2'-O-methyluridine-3'-phosphate
  modified_base 4: mod_base = OTHER; note = 2'-O-methylguanosine-3'-phosphate
  modified_base 5: mod_base = OTHER; note = 2'-O-methylguanosine-3'-phosphate
  modified_base 6: mod_base = OTHER; note 1-((2R,3R,4R,5R)-3-(docosyloxy)-4-hydroxy-5-(hydroxymethyl) tetrahydrofuran-2-yl)pyrimidine-2,4(1H,3H)-dione
  modified_base 7: mod_base = OTHER; note = 2'-fluorouridine-3'-phosphate
  modified_base 8: mod_base = OTHER; note = 2'-O-methyluridine-3'-phosphate
  modified_base 9: mod_base = OTHER; note = 2'-fluoroadenosine-3'-phosphate
  modified_base 10: mod_base = OTHER; note = 2'-fluorouridine-3'-phosphate
  modified_base 11: mod_base = OTHER; note = 2'-fluorouridine-3'-phosphate
  modified_base 12: mod_base = OTHER; note = 2'-O-methylguanosine-3'-phosphate
  modified_base 13: mod_base = OTHER; note = 2'-O-methylguanosine-3'-phosphate
  modified_base 14: mod_base = OTHER; note = 2'-O-methyladenosine-3'-phosphate
  modified_base 15: mod_base = OTHER; note = 2'-O-methyladenosine-3'-phosphate
  modified_base 16: mod_base = OTHER; note = 2'-O-methyladenosine-3'-phosphate
  modified_base 17: mod_base = OTHER; note = 2'-O-methyluridine-3'-phosphate
  modified_base 18: mod_base = OTHER; note = 2'-O-methyladenosine-3'-phosphate
  modified_base 19: mod_base = OTHER; note = 2'-O-methyluridine-3'-phosphorothioate
  modified_base 20: mod_base = OTHER; note = 2'-O-methyluridine-3'-phosphorothioate
  modified_base 21: mod_base = OTHER; note = 2'-O-methyladenosine-3'-phosphate
actggtttattggaaatatta

SEQ ID NO: 3886 - RNA, 21 nt, synthetic construct
  source 1..21: mol_type = other RNA
  modified_base 1: mod_base = OTHER; note = 2'-O-methylcytidine-3'-phosphorothioate
  modified_base 2: mod_base = OTHER; note = 2'-O-methyladenosine-3'-phosphorothioate
  modified_base 3: mod_base = OTHER; note = 2'-O-methyladenosine-3'-phosphate
  modified_base 4: mod_base = OTHER; note = 2'-O-methylguanosine-3'-phosphate
  modified_base 5: mod_base = OTHER; note = 2'-O-methyluridine-3'-phosphate
  modified_base 6: mod_base = OTHER; note 2-amino-9-((2R,3S,4S,5R)-3-(docosyloxy)-4-hydroxy-5-(hydrox ymethyl)tetrahydrofuran-2-yl)-1,9-dihydro-6H-purin-6-one
  modified_base 7: mod_base = OTHER; note = 2'-fluorouridine-3'-phosphate
  modified_base 8: mod_base = OTHER; note = 2'-O-methyladenosine-3'-phosphate
  modified_base 9: mod_base = OTHER; note = 2'-fluorouridine-3'-phosphate
  modified_base 10: mod_base = OTHER; note = 2'-fluoroguanosine-3'-phosphate
  modified_base 11: mod_base = OTHER; note = 2'-fluorouridine-3'-phosphate
  modified_base 12: mod_base = OTHER; note = 2'-O-methylguanosine-3'-phosphate
  modified_base 13: mod_base = OTHER; note = 2'-O-methyluridine-3'-phosphate
  modified_base 14: mod_base = OTHER; note = 2'-O-methyladenosine-3'-phosphate
  modified_base 15: mod_base = OTHER; note = 2'-O-methyluridine-3'-phosphate
  modified_base 16: mod_base = OTHER; note = 2'-O-methyladenosine-3'-phosphate
  modified_base 17: mod_base = OTHER; note = 2'-O-methyladenosine-3'-phosphate
  modified_base 18: mod_base = OTHER; note = 2'-O-methyladenosine-3'-phosphate
  modified_base 19: mod_base = OTHER; note = 2'-O-methylguanosine-3'-phosphorothioate
  modified_base 20: mod_base = OTHER; note = 2'-O-methyluridine-3'-phosphorothioate
  modified_base 21: mod_base = OTHER; note = 2'-O-methyladenosine-3'-phosphate
caagtgtatgtgtataaagta

SEQ ID NO: 3887 - RNA, 21 nt, synthetic construct
  source 1..21: mol_type = other RNA
  modified_base 1: mod_base = OTHER; note = 2'-O-methyluridine-3'-phosphorothioate
  modified_base 2: mod_base = OTHER; note = 2'-O-methyladenosine-3'-phosphorothioate
  modified_base 3: mod_base = OTHER; note = 2'-O-methylcytidine-3'-phosphate
  modified_base 4: mod_base = OTHER; note = 2'-O-methyladenosine-3'-phosphate
  modified_base 5: mod_base = OTHER; note = 2'-O-methyladenosine-3'-phosphate
  modified_base 6: mod_base = OTHER; note 2-amino-9-((2R,3S,4S,5R)-3-(docosyloxy)-4-hydroxy-5-(hydrox ymethyl)tetrahydrofuran-2-yl)-1,9-dihydro-6H-purin-6-one
  modified_base 7: mod_base = OTHER; note = 2'-fluorocytidine-3'-phosphate
  modified_base 8: mod_base = OTHER; note = 2'-O-methyladenosine-3'-phosphate
  modified_base 9: mod_base = OTHER; note = 2'-fluorouridine-3'-phosphate
  modified_base 10: mod_base = OTHER; note = 2'-fluoroguanosine-3'-phosphate
  modified_base 11: mod_base = OTHER; note = 2'-fluorocytidine-3'-phosphate
  modified_base 12: mod_base = OTHER; note = 2'-O-methyladenosine-3'-phosphate
  modified_base 13: mod_base = OTHER; note = 2'-O-methyluridine-3'-phosphate
  modified_base 14: mod_base = OTHER; note = 2'-O-methyladenosine-3'-phosphate
  modified_base 15: mod_base = OTHER; note = 2'-O-methyluridine-3'-phosphate
  modified_base 16: mod_base = OTHER; note = 2'-O-methyluridine-3'-phosphate
  modified_base 17: mod_base = OTHER; note = 2'-O-methylguanosine-3'-phosphate
  modified_base 18: mod_base = OTHER; note = 2'-O-methyladenosine-3'-phosphate
  modified_base 19: mod_base = OTHER; note = 2'-O-methylguanosine-3'-phosphorothioate
  modified_base 20: mod_base = OTHER; note = 2'-O-methyladenosine-3'-phosphorothioate
  modified_base 21: mod_base = OTHER; note = 2'-O-methyladenosine-3'-phosphate
tacaagcatgcatattgagaa

SEQ ID NO: 3888 - RNA, 21 nt, synthetic construct
  source 1..21: mol_type = other RNA
  modified_base 1: mod_base = OTHER; note = 2'-O-methyluridine-3'-phosphorothioate
  modified_base 2: mod_base = OTHER; note = 2'-O-methylguanosine-3'-phosphorothioate
  modified_base 3: mod_base = OTHER; note = 2'-O-methyluridine-3'-phosphate
  modified_base 4: mod_base = OTHER; note = 2'-O-methylguanosine-3'-phosphate
  modified_base 5: mod_base = OTHER; note = 2'-O-methyluridine-3'-phosphate
  modified_base 6: mod_base = OTHER; note 4-amino-1-((2R,3R,4R,5R)-3-(docosyloxy)-4-hydroxy-5-(hydrox ymethyl)tetrahydrofuran-2-yl)pyrimidin-2(1H)-one
  modified_base 7: mod_base = OTHER; note = 2'-fluorouridine-3'-phosphate
  modified_base 8: mod_base = OTHER; note = 2'-O-methyluridine-3'-phosphate
  modified_base 9: mod_base = OTHER; note = 2'-fluorouridine-3'-phosphate
  modified_base 10: mod_base = OTHER; note = 2'-fluorouridine-3'-phosphate
  modified_base 11: mod_base = OTHER; note = 2'-fluoroadenosine-3'-phosphate
  modified_base 12: mod_base = OTHER; note = 2'-O-methyluridine-3'-phosphate
  modified_base 13: mod_base = OTHER; note = 2'-O-methylguanosine-3'-phosphate
  modified_base 14: mod_base = OTHER; note = 2'-O-methyluridine-3'-phosphate
  modified_base 15: mod_base = OTHER; note = 2'-O-methylcytidine-3'-phosphate
  modified_base 16: mod_base = OTHER; note = 2'-O-methyluridine-3'-phosphate
  modified_base 17: mod_base = OTHER; note = 2'-O-methyluridine-3'-phosphate
  modified_base 18: mod_base = OTHER; note = 2'-O-methyluridine-3'-phosphate
  modified_base 19: mod_base = OTHER; note = 2'-O-methylguanosine-3'-phosphorothioate
  modified_base 20: mod_base = OTHER; note = 2'-O-methyladenosine-3'-phosphorothioate
  modified_base 21: mod_base = OTHER; note = 2'-O-methyladenosine-3'-phosphate
tgtgtcttttatgtctttgaa

SEQ ID NO: 3889 - RNA, 21 nt, synthetic construct
  source 1..21: mol_type = other RNA
  modified_base 1: mod_base = OTHER; note = 2'-O-methyladenosine-3'-phosphorothioate
  modified_base 2: mod_base = OTHER; note = 2'-O-methyluridine-3'-phosphorothioate
  modified_base 3: mod_base = OTHER; note = 2'-O-methyluridine-3'-phosphate
  modified_base 4: mod_base = OTHER; note = 2'-O-methyluridine-3'-phosphate
  modified_base 5: mod_base = OTHER; note = 2'-O-methyluridine-3'-phosphate
  modified_base 6: mod_base = OTHER; note 4-amino-1-((2R,3R,4R,5R)-3-(docosyloxy)-4-hydroxy-5-(hydrox ymethyl)tetrahydrofuran-2-yl)pyrimidin-2(1H)-one
  modified_base 7: mod_base = OTHER; note = 2'-fluorouridine-3'-phosphate
  modified_base 8: mod_base = OTHER; note = 2'-O-methylcytidine-3'-phosphate
  modified_base 9: mod_base = OTHER; note = 2'-fluoroguanosine-3'-phosphate
  modified_base 10: mod_base = OTHER; note = 2'-fluorocytidine-3'-phosphate
  modified_base 11: mod_base = OTHER; note = 2'-fluoroadenosine-3'-phosphate
  modified_base 12: mod_base = OTHER; note = 2'-O-methylguanosine-3'-phosphate
  modified_base 13: mod_base = OTHER; note = 2'-O-methyladenosine-3'-phosphate
  modified_base 14: mod_base = OTHER; note = 2'-O-methyladenosine-3'-phosphate
  modified_base 15: mod_base = OTHER; note = 2'-O-methyluridine-3'-phosphate
  modified_base 16: mod_base = OTHER; note = 2'-O-methyluridine-3'-phosphate
  modified_base 17: mod_base = OTHER; note = 2'-O-methylcytidine-3'-phosphate
  modified_base 18: mod_base = OTHER; note = 2'-O-methyladenosine-3'-phosphate
  modified_base 19: mod_base = OTHER; note = 2'-O-methyladenosine-3'-phosphorothioate
  modified_base 20: mod_base = OTHER; note = 2'-O-methyluridine-3'-phosphorothioate
  modified_base 21: mod_base = OTHER; note = 2'-O-methyladenosine-3'-phosphate
attttctcgcagaattcaata

SEQ ID NO: 3890 - RNA, 21 nt, synthetic construct
  source 1..21: mol_type = other RNA
  modified_base 1: mod_base = OTHER; note = 2'-O-methyluridine-3'-phosphorothioate
  modified_base 2: mod_base = OTHER; note = 2'-O-methyladenosine-3'-phosphorothioate
  modified_base 3: mod_base = OTHER; note = 2'-O-methylguanosine-3'-phosphate
  modified_base 4: mod_base = OTHER; note = 2'-O-methylcytidine-3'-phosphate
  modified_base 5: mod_base = OTHER; note = 2'-O-methylguanosine-3'-phosphate
  modified_base 6: mod_base = OTHER; note (2R,3S,4S,5R)-5-(6-amino-9H-purin-9-yl)-4-(docosyloxy)-2-(h ydroxymethyl)tetrahydrofuran-3-ol
  modified_base 7: mod_base = OTHER; note = 2'-fluorocytidine-3'-phosphate
  modified_base 8: mod_base = OTHER; note = 2'-O-methyladenosine-3'-phosphate
  modified_base 9: mod_base = OTHER; note = 2'-fluoroguanosine-3'-phosphate
  modified_base 10: mod_base = OTHER; note = 2'-fluorouridine-3'-phosphate
  modified_base 11: mod_base = OTHER; note = 2'-fluorouridine-3'-phosphate
  modified_base 12: mod_base = OTHER; note = 2'-O-methyluridine-3'-phosphate
  modified_base 13: mod_base = OTHER; note = 2'-O-methylguanosine-3'-phosphate
  modified_base 14: mod_base = OTHER; note = 2'-O-methyladenosine-3'-phosphate
  modified_base 15: mod_base = OTHER; note = 2'-O-methylguanosine-3'-phosphate
  modified_base 16: mod_base = OTHER; note = 2'-O-methyluridine-3'-phosphate
  modified_base 17: mod_base = OTHER; note = 2'-O-methyladenosine-3'-phosphate
  modified_base 18: mod_base = OTHER; note = 2'-O-methyladenosine-3'-phosphate
  modified_base 19: mod_base = OTHER; note = 2'-O-methyladenosine-3'-phosphorothioate
  modified_base 20: mod_base = OTHER; note = 2'-O-methyladenosine-3'-phosphorothioate
  modified_base 21: mod_base = OTHER; note = 2'-O-methyladenosine-3'-phosphate
tagcgacagtttgagtaaaaa

SEQ ID NO: 3891 - RNA, 21 nt, synthetic construct
  source 1..21: mol_type = other RNA
  modified_base 1: mod_base = OTHER; note = 2'-O-methylcytidine-3'-phosphorothioate
  modified_base 2: mod_base = OTHER; note = 2'-O-methyluridine-3'-phosphorothioate
  modified_base 3: mod_base = OTHER; note = 2'-O-methylguanosine-3'-phosphate
  modified_base 4: mod_base = OTHER; note = 2'-O-methylguanosine-3'-phosphate
  modified_base 5: mod_base = OTHER; note = 2'-O-methyluridine-3'-phosphate
  modified_base 6: mod_base = OTHER; note 2-amino-9-((2R,3S,4S,5R)-3-(docosyloxy)-4-hydroxy-5-(hydrox ymethyl)tetrahydrofuran-2-yl)-1,9-dihydro-6H-purin-6-one
  modified_base 7: mod_base = OTHER; note = 2'-fluorouridine-3'-phosphate
  modified_base 8: mod_base = OTHER; note = 2'-O-methyladenosine-3'-phosphate
  modified_base 9: mod_base = OTHER; note = 2'-fluorouridine-3'-phosphate
  modified_base 10: mod_base = OTHER; note = 2'-fluoroguanosine-3'-phosphate
  modified_base 11: mod_base = OTHER; note = 2'-fluoroadenosine-3'-phosphate
  modified_base 12: mod_base = OTHER; note = 2'-O-methyladenosine-3'-phosphate
  modified_base 13: mod_base = OTHER; note = 2'-O-methyluridine-3'-phosphate
  modified_base 14: mod_base = OTHER; note = 2'-O-methyladenosine-3'-phosphate
  modified_base 15: mod_base = OTHER; note = 2'-O-methylcytidine-3'-phosphate
  modified_base 16: mod_base = OTHER; note = 2'-O-methyluridine-3'-phosphate
  modified_base 17: mod_base = OTHER; note = 2'-O-methyluridine-3'-phosphate
  modified_base 18: mod_base = OTHER; note = 2'-O-methyluridine-3'-phosphate
  modified_base 19: mod_base = OTHER; note = 2'-O-methylguanosine-3'-phosphorothioate
  modified_base 20: mod_base = OTHER; note = 2'-O-methyluridine-3'-phosphorothioate
  modified_base 21: mod_base = OTHER; note = 2'-O-methyladenosine-3'-phosphate
ctggtgtatgaatactttgta

SEQ ID NO: 3892 - RNA, 21 nt, synthetic construct
  source 1..21: mol_type = other RNA
  modified_base 1: mod_base = OTHER; note = 2'-O-methylguanosine-3'-phosphorothioate
  modified_base 2: mod_base = OTHER; note = 2'-O-methyluridine-3'-phosphorothioate
  modified_base 3: mod_base = OTHER; note = 2'-O-methylguanosine-3'-phosphate
  modified_base 4: mod_base = OTHER; note = 2'-O-methyladenosine-3'-phosphate
  modified_base 5: mod_base = OTHER; note = 2'-O-methyluridine-3'-phosphate
  modified_base 6: mod_base = OTHER; note (2R,3S,4S,5R)-5-(6-amino-9H-purin-9-yl)-4-(docosyloxy)-2-(h ydroxymethyl)tetrahydrofuran-3-ol
  modified_base 7: mod_base = OTHER; note = 2'-fluoroadenosine-3'-phosphate
  modified_base 8: mod_base = OTHER; note = 2'-O-methylguanosine-3'-phosphate
  modified_base 9: mod_base = OTHER; note = 2'-fluorouridine-3'-phosphate
  modified_base 10: mod_base = OTHER; note = 2'-fluoroguanosine-3'-phosphate
  modified_base 11: mod_base = OTHER; note = 2'-fluoroguanosine-3'-phosphate
  modified_base 12: mod_base = OTHER; note = 2'-O-methylcytidine-3'-phosphate
  modified_base 13: mod_base = OTHER; note = 2'-O-methyluridine-3'-phosphate
  modified_base 14: mod_base = OTHER; note = 2'-O-methyladenosine-3'-phosphate
  modified_base 15: mod_base = OTHER; note = 2'-O-methyladenosine-3'-phosphate
  modified_base 16: mod_base = OTHER; note = 2'-O-methylcytidine-3'-phosphate
  modified_base 17: mod_base = OTHER; note = 2'-O-methyladenosine-3'-phosphate
  modified_base 18: mod_base = OTHER; note = 2'-O-methylguanosine-3'-phosphate
  modified_base 19: mod_base = OTHER; note = 2'-O-methyladenosine-3'-phosphorothioate
  modified_base 20: mod_base = OTHER; note = 2'-O-methyladenosine-3'-phosphorothioate
  modified_base 21: mod_base = OTHER; note = 2'-O-methyladenosine-3'-phosphate
gtgataagtggctaacagaaa

SEQ ID NO: 3893 - RNA, 21 nt, synthetic construct
  source 1..21: mol_type = other RNA
  modified_base 1: mod_base = OTHER; note = 2'-O-methylguanosine-3'-phosphorothioate
  modified_base 2: mod_base = OTHER; note = 2'-O-methyluridine-3'-phosphorothioate
  modified_base 3: mod_base = OTHER; note = 2'-O-methyladenosine-3'-phosphate
  modified_base 4: mod_base = OTHER; note = 2'-O-methylguanosine-3'-phosphate
  modified_base 5: mod_base = OTHER; note = 2'-O-methylguanosine-3'-phosphate
  modified_base 6: mod_base = OTHER; note 4-amino-1-((2R,3R,4R,5R)-3-(docosyloxy)-4-hydroxy-5-(hydrox ymethyl)tetrahydrofuran-2-yl)pyrimidin-2(1H)-one
  modified_base 7: mod_base = OTHER; note = 2'-fluorouridine-3'-phosphate
  modified_base 8: mod_base = OTHER; note = 2'-O-methyladenosine-3'-phosphate
  modified_base 9: mod_base = OTHER; note = 2'-fluoroadenosine-3'-phosphate
  modified_base 10: mod_base = OTHER; note = 2'-fluorouridine-3'-phosphate
  modified_base 11: mod_base = OTHER; note = 2'-fluoroadenosine-3'-phosphate
  modified_base 12: mod_base = OTHER; note = 2'-O-methyluridine-3'-phosphate
  modified_base 13: mod_base = OTHER; note = 2'-O-methyluridine-3'-phosphate
  modified_base 14: mod_base = OTHER; note = 2'-O-methyluridine-3'-phosphate
  modified_base 15: mod_base = OTHER; note = 2'-O-methyluridine-3'-phosphate
  modified_base 16: mod_base = OTHER; note = 2'-O-methylcytidine-3'-phosphate
  modified_base 17: mod_base = OTHER; note = 2'-O-methyluridine-3'-phosphate
  modified_base 18: mod_base = OTHER; note = 2'-O-methyladenosine-3'-phosphate
  modified_base 19: mod_base = OTHER; note = 2'-O-methyluridine-3'-phosphorothioate
  modified_base 20: mod_base = OTHER; note = 2'-O-methyluridine-3'-phosphorothioate
  modified_base 21: mod_base = OTHER; note = 2'-O-methyladenosine-3'-phosphate
gtaggctaatattttctatta

SEQ ID NO: 3894 - RNA, 21 nt, synthetic construct
  source 1..21: mol_type = other RNA
  modified_base 1: mod_base = OTHER; note = 2'-O-methylcytidine-3'-phosphorothioate
  modified_base 2: mod_base = OTHER; note = 2'-O-methylcytidine-3'-phosphorothioate
  modified_base 3: mod_base = OTHER; note = 2'-O-methyluridine-3'-phosphate
  modified_base 4: mod_base = OTHER; note = 2'-O-methylcytidine-3'-phosphate
  modified_base 5: mod_base = OTHER; note = 2'-O-methyluridine-3'-phosphate
  modified_base 6: mod_base = OTHER; note 1-((2R,3R,4R,5R)-3-(docosyloxy)-4-hydroxy-5-(hydroxymethyl) tetrahydrofuran-2-yl)pyrimidine-2,4(1H,3H)-dione
  modified_base 7: mod_base = OTHER; note = 2'-fluorocytidine-3'-phosphate
  modified_base 8: mod_base = OTHER; note = 2'-O-methyladenosine-3'-phosphate
  modified_base 9: mod_base = OTHER; note = 2'-fluorouridine-3'-phosphate
  modified_base 10: mod_base = OTHER; note = 2'-fluorocytidine-3'-phosphate
  modified_base 11: mod_base = OTHER; note = 2'-fluorocytidine-3'-phosphate
  modified_base 12: mod_base = OTHER; note = 2'-O-methyluridine-3'-phosphate
  modified_base 13: mod_base = OTHER; note = 2'-O-methylcytidine-3'-phosphate
  modified_base 14: mod_base = OTHER; note = 2'-O-methylguanosine-3'-phosphate
  modified_base 15: mod_base = OTHER; note = 2'-O-methyladenosine-3'-phosphate
  modified_base 16: mod_base = OTHER; note = 2'-O-methylcytidine-3'-phosphate
  modified_base 17: mod_base = OTHER; note = 2'-O-methyluridine-3'-phosphate
  modified_base 18: mod_base = OTHER; note = 2'-O-methylguanosine-3'-phosphate
  modified_base 19: mod_base = OTHER; note = 2'-O-methyluridine-3'-phosphorothioate
  modified_base 20: mod_base = OTHER; note = 2'-O-methylcytidine-3'-phosphorothioate
  modified_base 21: mod_base = OTHER; note = 2'-O-methyladenosine-3'-phosphate
cctcttcatcctcgactgtca

SEQ ID NO: 3895 - RNA, 21 nt, synthetic construct
  source 1..21: mol_type = other RNA
  modified_base 1: mod_base = OTHER; note = 2'-O-methyladenosine-3'-phosphorothioate
  modified_base 2: mod_base = OTHER; note = 2'-O-methyladenosine-3'-phosphorothioate
  modified_base 3: mod_base = OTHER; note = 2'-O-methyluridine-3'-phosphate
  modified_base 4: mod_base = OTHER; note = 2'-O-methyluridine-3'-phosphate
  modified_base 5: mod_base = OTHER; note = 2'-O-methylguanosine-3'-phosphate
  modified_base 6: mod_base = OTHER; note 4-amino-1-((2R,3R,4R,5R)-3-(docosyloxy)-4-hydroxy-5-(hydrox ymethyl)tetrahydrofuran-2-yl)pyrimidin-2(1H)-one
  modified_base 7: mod_base = OTHER; note = 2'-fluorocytidine-3'-phosphate
  modified_base 8: mod_base = OTHER; note = 2'-O-methyladenosine-3'-phosphate
  modified_base 9: mod_base = OTHER; note = 2'-fluorouridine-3'-phosphate
  modified_base 10: mod_base = OTHER; note = 2'-fluoroadenosine-3'-phosphate
  modified_base 11: mod_base = OTHER; note = 2'-fluoroadenosine-3'-phosphate
  modified_base 12: mod_base = OTHER; note = 2'-O-methylguanosine-3'-phosphate
  modified_base 13: mod_base = OTHER; note = 2'-O-methylcytidine-3'-phosphate
  modified_base 14: mod_base = OTHER; note = 2'-O-methylcytidine-3'-phosphate
  modified_base 15: mod_base = OTHER; note = 2'-O-methyladenosine-3'-phosphate
  modified_base 16: mod_base = OTHER; note = 2'-O-methyluridine-3'-phosphate
  modified_base 17: mod_base = OTHER; note = 2'-O-methyladenosine-3'-phosphate
  modified_base 18: mod_base = OTHER; note = 2'-O-methyluridine-3'-phosphate
  modified_base 19: mod_base = OTHER; note = 2'-O-methyluridine-3'-phosphorothioate
  modified_base 20: mod_base = OTHER; note = 2'-O-methyladenosine-3'-phosphorothioate
  modified_base 21: mod_base = OTHER; note = 2'-O-methyladenosine-3'-phosphate
aattgccataagccatattaa

SEQ ID NO: 3896 - RNA, 21 nt, synthetic construct
  source 1..21: mol_type = other RNA
  modified_base 1: mod_base = OTHER; note = 2'-O-methylguanosine-3'-phosphorothioate
  modified_base 2: mod_base = OTHER; note = 2'-O-methylcytidine-3'-phosphorothioate
  modified_base 3: mod_base = OTHER; note = 2'-O-methylguanosine-3'-phosphate
  modified_base 4: mod_base = OTHER; note = 2'-O-methyladenosine-3'-phosphate
  modified_base 5: mod_base = OTHER; note = 2'-O-methyladenosine-3'-phosphate
  modified_base 6: mod_base = OTHER; note 1-((2R,3R,4R,5R)-3-(docosyloxy)-4-hydroxy-5-(hydroxymethyl) tetrahydrofuran-2-yl)pyrimidine-2,4(1H,3H)-dione
  modified_base 7: mod_base = OTHER; note = 2'-fluoroadenosine-3'-phosphate
  modified_base 8: mod_base = OTHER; note = 2'-O-methyluridine-3'-phosphate
  modified_base 9: mod_base = OTHER; note = 2'-fluorouridine-3'-phosphate
  modified_base 10: mod_base = OTHER; note = 2'-fluorouridine-3'-phosphate
  modified_base 11: mod_base = OTHER; note = 2'-fluorouridine-3'-phosphate
  modified_base 12: mod_base = OTHER; note = 2'-O-methylguanosine-3'-phosphate
  modified_base 13: mod_base = OTHER; note = 2'-O-methyluridine-3'-phosphate
  modified_base 14: mod_base = OTHER; note = 2'-O-methylcytidine-3'-phosphate
  modified_base 15: mod_base = OTHER; note = 2'-O-methyladenosine-3'-phosphate
  modified_base 16: mod_base = OTHER; note = 2'-O-methylguanosine-3'-phosphate
  modified_base 17: mod_base = OTHER; note = 2'-O-methylcytidine-3'-phosphate
  modified_base 18: mod_base = OTHER; note = 2'-O-methyluridine-3'-phosphate
  modified_base 19: mod_base = OTHER; note = 2'-O-methyladenosine-3'-phosphorothioate
  modified_base 20: mod_base = OTHER; note = 2'-O-methyladenosine-3'-phosphorothioate
  modified_base 21: mod_base = OTHER; note = 2'-O-methyladenosine-3'-phosphate
gcgaatattttgtcagctaaa

SEQ ID NO: 3897 - RNA, 21 nt, synthetic construct
  source 1..21: mol_type = other RNA
  modified_base 1: mod_base = OTHER; note = 2'-O-methyladenosine-3'-phosphorothioate
  modified_base 2: mod_base = OTHER; note = 2'-O-methyluridine-3'-phosphorothioate
  modified_base 3: mod_base = OTHER; note = 2'-O-methylcytidine-3'-phosphate
  modified_base 4: mod_base = OTHER; note = 2'-O-methylcytidine-3'-phosphate
  modified_base 5: mod_base = OTHER; note = 2'-O-methyladenosine-3'-phosphate
  modified_base 6: mod_base = OTHER; note 2-amino-9-((2R,3S,4S,5R)-3-(docosyloxy)-4-hydroxy-5-(hydrox ymethyl)tetrahydrofuran-2-yl)-1,9-dihydro-6H-purin-6-one
  modified_base 7: mod_base = OTHER; note = 2'-fluorouridine-3'-phosphate
  modified_base 8: mod_base = OTHER; note = 2'-O-methylguanosine-3'-phosphate
  modified_base 9: mod_base = OTHER; note = 2'-fluorouridine-3'-phosphate
  modified_base 10: mod_base = OTHER; note = 2'-fluorouridine-3'-phosphate
  modified_base 11: mod_base = OTHER; note = 2'-fluoroguanosine-3'-phosphate
  modified_base 12: mod_base = OTHER; note = 2'-O-methylcytidine-3'-phosphate
  modified_base 13: mod_base = OTHER; note = 2'-O-methylcytidine-3'-phosphate
  modified_base 14: mod_base = OTHER; note = 2'-O-methyluridine-3'-phosphate
  modified_base 15: mod_base = OTHER; note = 2'-O-methyluridine-3'-phosphate
  modified_base 16: mod_base = OTHER; note = 2'-O-methyluridine-3'-phosphate
  modified_base 17: mod_base = OTHER; note = 2'-O-methylcytidine-3'-phosphate
  modified_base 18: mod_base = OTHER; note = 2'-O-methyluridine-3'-phosphate
  modified_base 19: mod_base = OTHER; note = 2'-O-methylguanosine-3'-phosphorothioate
  modified_base 20: mod_base = OTHER; note = 2'-O-methyladenosine-3'-phosphorothioate
  modified_base 21: mod_base = OTHER; note = 2'-O-methyladenosine-3'-phosphate
atccagtgttgcctttctgaa

SEQ ID NO: 3898 - RNA, 21 nt, synthetic construct
  source 1..21: mol_type = other RNA
  modified_base 1: mod_base = OTHER; note = 2'-O-methyladenosine-3'-phosphorothioate
  modified_base 2: mod_base = OTHER; note = 2'-O-methyladenosine-3'-phosphorothioate
  modified_base 3: mod_base = OTHER; note = 2'-O-methyladenosine-3'-phosphate
  modified_base 4: mod_base = OTHER; note = 2'-O-methylguanosine-3'-phosphate
  modified_base 5: mod_base = OTHER; note = 2'-O-methyluridine-3'-phosphate
  modified_base 6: mod_base = OTHER; note 4-amino-1-((2R,3R,4R,5R)-3-(docosyloxy)-4-hydroxy-5-(hydrox ymethyl)tetrahydrofuran-2-yl)pyrimidin-2(1H)-one
  modified_base 7: mod_base = OTHER; note = 2'-fluorouridine-3'-phosphate
  modified_base 8: mod_base = OTHER; note = 2'-O-methyladenosine-3'-phosphate
  modified_base 9: mod_base = OTHER; note = 2'-fluorouridine-3'-phosphate
  modified_base 10: mod_base = OTHER; note = 2'-fluoroguanosine-3'-phosphate
  modified_base 11: mod_base = OTHER; note = 2'-fluorocytidine-3'-phosphate
  modified_base 12: mod_base = OTHER; note = 2'-O-methylcytidine-3'-phosphate
  modified_base 13: mod_base = OTHER; note = 2'-O-methyluridine-3'-phosphate
  modified_base 14: mod_base = OTHER; note = 2'-O-methylguanosine-3'-phosphate
  modified_base 15: mod_base = OTHER; note = 2'-O-methyluridine-3'-phosphate
  modified_base 16: mod_base = OTHER; note = 2'-O-methylcytidine-3'-phosphate
  modified_base 17: mod_base = OTHER; note = 2'-O-methyluridine-3'-phosphate
  modified_base 18: mod_base = OTHER; note = 2'-O-methyladenosine-3'-phosphate
  modified_base 19: mod_base = OTHER; note = 2'-O-methyladenosine-3'-phosphorothioate
  modified_base 20: mod_base = OTHER; note = 2'-O-methyladenosine-3'-phosphorothioate
  modified_base 21: mod_base = OTHER; note = 2'-O-methyladenosine-3'-phosphate
aaagtctatgcctgtctaaaa

SEQ ID NO: 3899 - RNA, 21 nt, synthetic construct
  source 1..21: mol_type = other RNA
  modified_base 1: mod_base = OTHER; note = 2'-O-methylguanosine-3'-phosphorothioate
  modified_base 2: mod_base = OTHER; note = 2'-O-methylguanosine-3'-phosphorothioate
  modified_base 3: mod_base = OTHER; note = 2'-O-methyladenosine-3'-phosphate
  modified_base 4: mod_base = OTHER; note = 2'-O-methylcytidine-3'-phosphate
  modified_base 5: mod_base = OTHER; note = 2'-O-methyladenosine-3'-phosphate
  modified_base 6: mod_base = OTHER; note 1-((2R,3R,4R,5R)-3-(docosyloxy)-4-hydroxy-5-(hydroxymethyl) tetrahydrofuran-2-yl)pyrimidine-2,4(1H,3H)-dione
  modified_base 7: mod_base = OTHER; note = 2'-fluorocytidine-3'-phosphate
  modified_base 8: mod_base = OTHER; note = 2'-O-methyladenosine-3'-phosphate
  modified_base 9: mod_base = OTHER; note = 2'-fluoroguanosine-3'-phosphate
  modified_base 10: mod_base = OTHER; note = 2'-fluoroadenosine-3'-phosphate
  modified_base 11: mod_base = OTHER; note = 2'-fluoroadenosine-3'-phosphate
  modified_base 12: mod_base = OTHER; note = 2'-O-methylguanosine-3'-phosphate
  modified_base 13: mod_base = OTHER; note = 2'-O-methyluridine-3'-phosphate
  modified_base 14: mod_base = OTHER; note = 2'-O-methyluridine-3'-phosphate
  modified_base 15: mod_base = OTHER; note = 2'-O-methyluridine-3'-phosphate
  modified_base 16: mod_base = OTHER; note = 2'-O-methylguanosine-3'-phosphate
  modified_base 17: mod_base = OTHER; note = 2'-O-methyladenosine-3'-phosphate
  modified_base 18: mod_base = OTHER; note = 2'-O-methyladenosine-3'-phosphate
  modified_base 19: mod_base = OTHER; note = 2'-O-methyluridine-3'-phosphorothioate
  modified_base 20: mod_base = OTHER; note = 2'-O-methyluridine-3'-phosphorothioate
  modified_base 21: mod_base = OTHER; note = 2'-O-methyladenosine-3'-phosphate
ggacatcagaagtttgaatta

SEQ ID NO: 3900 - RNA, 21 nt, synthetic construct
  source 1..21: mol_type = other RNA
  modified_base 1: mod_base = OTHER; note = 2'-O-methylguanosine-3'-phosphorothioate
  modified_base 2: mod_base = OTHER; note = 2'-O-methylguanosine-3'-phosphorothioate
  modified_base 3: mod_base = OTHER; note = 2'-O-methylcytidine-3'-phosphate
  modified_base 4: mod_base = OTHER; note = 2'-O-methylguanosine-3'-phosphate
  modified_base 5: mod_base = OTHER; note = 2'-O-methyladenosine-3'-phosphate
  modified_base 6: mod_base = OTHER; note (2R,3S,4S,5R)-5-(6-amino-9H-purin-9-yl)-4-(docosyloxy)-2-(h ydroxymethyl)tetrahydrofuran-3-ol
  modified_base 7: mod_base = OTHER; note = 2'-fluorouridine-3'-phosphate
  modified_base 8: mod_base = OTHER; note = 2'-O-methyluridine-3'-phosphate
  modified_base 9: mod_base = OTHER; note = 2'-fluoroguanosine-3'-phosphate
  modified_base 10: mod_base = OTHER; note = 2'-fluorocytidine-3'-phosphate
  modified_base 11: mod_base = OTHER; note = 2'-fluorouridine-3'-phosphate
  modified_base 12: mod_base = OTHER; note = 2'-O-methyluridine-3'-phosphate
  modified_base 13: mod_base = OTHER; note = 2'-O-methyladenosine-3'-phosphate
  modified_base 14: mod_base = OTHER; note = 2'-O-methyluridine-3'-phosphate
  modified_base 15: mod_base = OTHER; note = 2'-O-methyladenosine-3'-phosphate
  modified_base 16: mod_base = OTHER; note = 2'-O-methyluridine-3'-phosphate
  modified_base 17: mod_base = OTHER; note = 2'-O-methyluridine-3'-phosphate
  modified_base 18: mod_base = OTHER; note = 2'-O-methyluridine-3'-phosphate
  modified_base 19: mod_base = OTHER; note = 2'-O-methylcytidine-3'-phosphorothioate
  modified_base 20: mod_base = OTHER; note = 2'-O-methyluridine-3'-phosphorothioate
  modified_base 21: mod_base = OTHER; note = 2'-O-methyladenosine-3'-phosphate
ggcgaattgcttatatttcta

SEQ ID NO: 3901 - RNA, 21 nt, synthetic construct
  source 1..21: mol_type = other RNA
  modified_base 1: mod_base = OTHER; note = 2'-O-methylcytidine-3'-phosphorothioate
  modified_base 2: mod_base = OTHER; note = 2'-O-methyladenosine-3'-phosphorothioate
  modified_base 3: mod_base = OTHER; note = 2'-O-methylcytidine-3'-phosphate
  modified_base 4: mod_base = OTHER; note = 2'-O-methyladenosine-3'-phosphate
  modified_base 5: mod_base = OTHER; note = 2'-O-methylcytidine-3'-phosphate
  modified_base 6: mod_base = OTHER; note 1-((2R,3R,4R,5R)-3-(docosyloxy)-4-hydroxy-5-(hydroxymethyl) tetrahydrofuran-2-yl)pyrimidine-2,4(1H,3H)-dione
  modified_base 7: mod_base = OTHER; note = 2'-fluoroadenosine-3'-phosphate
  modified_base 8: mod_base = OTHER; note = 2'-O-methyluridine-3'-phosphate
  modified_base 9: mod_base = OTHER; note = 2'-fluoroguanosine-3'-phosphate
  modified_base 10: mod_base = OTHER; note = 2'-fluorouridine-3'-phosphate
  modified_base 11: mod_base = OTHER; note = 2'-fluoroguanosine-3'-phosphate
  modified_base 12: mod_base = OTHER; note = 2'-O-methyluridine-3'-phosphate
  modified_base 13: mod_base = OTHER; note = 2'-O-methyladenosine-3'-phosphate
  modified_base 14: mod_base = OTHER; note = 2'-O-methyladenosine-3'-phosphate
  modified_base 15: mod_base = OTHER; note = 2'-O-methyladenosine-3'-phosphate
  modified_base 16: mod_base = OTHER; note = 2'-O-methylcytidine-3'-phosphate
  modified_base 17: mod_base = OTHER; note = 2'-O-methylcytidine-3'-phosphate
  modified_base 18: mod_base = OTHER; note = 2'-O-methyladenosine-3'-phosphate
  modified_base 19: mod_base = OTHER; note = 2'-O-methylguanosine-3'-phosphorothioate
  modified_base 20: mod_base = OTHER; note = 2'-O-methyluridine-3'-phosphorothioate
  modified_base 21: mod_base = OTHER; note = 2'-O-methyladenosine-3'-phosphate
cacactatgtgtaaaccagta

SEQ ID NO: 3902 - RNA, 21 nt, synthetic construct
  source 1..21: mol_type = other RNA
  modified_base 1: mod_base = OTHER; note = 2'-O-methylcytidine-3'-phosphorothioate
  modified_base 2: mod_base = OTHER; note = 2'-O-methyladenosine-3'-phosphorothioate
  modified_base 3: mod_base = OTHER; note = 2'-O-methylguanosine-3'-phosphate
  modified_base 4: mod_base = OTHER; note = 2'-O-methylguanosine-3'-phosphate
  modified_base 5: mod_base = OTHER; note = 2'-O-methyluridine-3'-phosphate
  modified_base 6: mod_base = OTHER; note 2-amino-9-((2R,3S,4S,5R)-3-(docosyloxy)-4-hydroxy-5-(hydrox ymethyl)tetrahydrofuran-2-yl)-1,9-dihydro-6H-purin-6-one
  modified_base 7: mod_base = OTHER; note = 2'-fluoroadenosine-3'-phosphate
  modified_base 8: mod_base = OTHER; note = 2'-O-methyladenosine-3'-phosphate
  modified_base 9: mod_base = OTHER; note = 2'-fluoroguanosine-3'-phosphate
  modified_base 10: mod_base = OTHER; note = 2'-fluoroadenosine-3'-phosphate
  modified_base 11: mod_base = OTHER; note = 2'-fluoroadenosine-3'-phosphate
  modified_base 12: mod_base = OTHER; note = 2'-O-methylguanosine-3'-phosphate
  modified_base 13: mod_base = OTHER; note = 2'-O-methyladenosine-3'-phosphate
  modified_base 14: mod_base = OTHER; note = 2'-O-methyladenosine-3'-phosphate
  modified_base 15: mod_base = OTHER; note = 2'-O-methyladenosine-3'-phosphate
  modified_base 16: mod_base = OTHER; note = 2'-O-methyladenosine-3'-phosphate
  modified_base 17: mod_base = OTHER; note = 2'-O-methylcytidine-3'-phosphate
  modified_base 18: mod_base = OTHER; note = 2'-O-methyladenosine-3'-phosphate
  modified_base 19: mod_base = OTHER; note = 2'-O-methyluridine-3'-phosphorothioate
  modified_base 20: mod_base = OTHER; note = 2'-O-methyluridine-3'-phosphorothioate
  modified_base 21: mod_base = OTHER; note = 2'-O-methyladenosine-3'-phosphate
caggtgaagaagaaaacatta

SEQ ID NO: 3903 - RNA, 21 nt, synthetic construct
  source 1..21: mol_type = other RNA
  modified_base 1: mod_base = OTHER; note = 2'-O-methylguanosine-3'-phosphorothioate
  modified_base 2: mod_base = OTHER; note = 2'-O-methyluridine-3'-phosphorothioate
  modified_base 3: mod_base = OTHER; note = 2'-O-methylguanosine-3'-phosphate
  modified_base 4: mod_base = OTHER; note = 2'-O-methyladenosine-3'-phosphate
  modified_base 5: mod_base = OTHER; note = 2'-O-methylguanosine-3'-phosphate
  modified_base 6: mod_base = OTHER; note 4-amino-1-((2R,3R,4R,5R)-3-(docosyloxy)-4-hydroxy-5-(hydrox ymethyl)tetrahydrofuran-2-yl)pyrimidin-2(1H)-one
  modified_base 7: mod_base = OTHER; note = 2'-fluorouridine-3'-phosphate
  modified_base 8: mod_base = OTHER; note = 2'-O-methylcytidine-3'-phosphate
  modified_base 9: mod_base = OTHER; note = 2'-fluorouridine-3'-phosphate
  modified_base 10: mod_base = OTHER; note = 2'-fluorouridine-3'-phosphate
  modified_base 11: mod_base = OTHER; note = 2'-fluoroadenosine-3'-phosphate
  modified_base 12: mod_base = OTHER; note = 2'-O-methyluridine-3'-phosphate
  modified_base 13: mod_base = OTHER; note = 2'-O-methyluridine-3'-phosphate
  modified_base 14: mod_base = OTHER; note = 2'-O-methyluridine-3'-phosphate
  modified_base 15: mod_base = OTHER; note = 2'-O-methyluridine-3'-phosphate
  modified_base 16: mod_base = OTHER; note = 2'-O-methyluridine-3'-phosphate
  modified_base 17: mod_base = OTHER; note = 2'-O-methylcytidine-3'-phosphate
  modified_base 18: mod_base = OTHER; note = 2'-O-methyladenosine-3'-phosphate
  modified_base 19: mod_base = OTHER; note = 2'-O-methylcytidine-3'-phosphorothioate
  modified_base 20: mod_base = OTHER; note = 2'-O-methyluridine-3'-phosphorothioate
  modified_base 21: mod_base = OTHER; note = 2'-O-methyladenosine-3'-phosphate
gtgagctcttatttttcacta

SEQ ID NO: 3904 - RNA, 21 nt, synthetic construct
  source 1..21: mol_type = other RNA
  modified_base 1: mod_base = OTHER; note = 2'-O-methyladenosine-3'-phosphorothioate
  modified_base 2: mod_base = OTHER; note = 2'-O-methyladenosine-3'-phosphorothioate
  modified_base 3: mod_base = OTHER; note = 2'-O-methyladenosine-3'-phosphate
  modified_base 4: mod_base = OTHER; note = 2'-O-methylguanosine-3'-phosphate
  modified_base 5: mod_base = OTHER; note = 2'-O-methylcytidine-3'-phosphate
  modified_base 6: mod_base = OTHER; note 1-((2R,3R,4R,5R)-3-(docosyloxy)-4-hydroxy-5-(hydroxymethyl) tetrahydrofuran-2-yl)pyrimidine-2,4(1H,3H)-dione
  modified_base 7: mod_base = OTHER; note = 2'-fluoroguanosine-3'-phosphate
  modified_base 8: mod_base = OTHER; note = 2'-O-methyladenosine-3'-phosphate
  modified_base 9: mod_base = OTHER; note = 2'-fluorouridine-3'-phosphate
  modified_base 10: mod_base = OTHER; note = 2'-fluoroguanosine-3'-phosphate
  modified_base 11: mod_base = OTHER; note = 2'-fluoroguanosine-3'-phosphate
  modified_base 12: mod_base = OTHER; note = 2'-O-methylguanosine-3'-phosphate
  modified_base 13: mod_base = OTHER; note = 2'-O-methyladenosine-3'-phosphate
  modified_base 14: mod_base = OTHER; note = 2'-O-methyladenosine-3'-phosphate
  modified_base 15: mod_base = OTHER; note = 2'-O-methyluridine-3'-phosphate
  modified_base 16: mod_base = OTHER; note = 2'-O-methyladenosine-3'-phosphate
  modified_base 17: mod_base = OTHER; note = 2'-O-methyladenosine-3'-phosphate
  modified_base 18: mod_base = OTHER; note = 2'-O-methyladenosine-3'-phosphate
  modified_base 19: mod_base = OTHER; note = 2'-O-methylcytidine-3'-phosphorothioate
  modified_base 20: mod_base = OTHER; note = 2'-O-methyluridine-3'-phosphorothioate
  modified_base 21: mod_base = OTHER; note = 2'-O-methyladenosine-3'-phosphate
aaagctgatgggaataaacta

SEQ ID NO: 3905 - RNA, 21 nt, synthetic construct
  source 1..21: mol_type = other RNA
  modified_base 1: mod_base = OTHER; note = 2'-O-methylguanosine-3'-phosphorothioate
  modified_base 2: mod_base = OTHER; note = 2'-O-methyluridine-3'-phosphorothioate
  modified_base 3: mod_base = OTHER; note = 2'-O-methylguanosine-3'-phosphate
  modified_base 4: mod_base = OTHER; note = 2'-O-methyluridine-3'-phosphate
  modified_base 5: mod_base = OTHER; note = 2'-O-methylcytidine-3'-phosphate
  modified_base 6: mod_base = OTHER; note 2-amino-9-((2R,3S,4S,5R)-3-(docosyloxy)-4-hydroxy-5-(hydrox ymethyl)tetrahydrofuran-2-yl)-1,9-dihydro-6H-purin-6-one
  modified_base 7: mod_base = OTHER; note = 2'-fluorouridine-3'-phosphate
  modified_base 8: mod_base = OTHER; note = 2'-O-methyluridine-3'-phosphate
  modified_base 9: mod_base = OTHER; note = 2'-fluoroadenosine-3'-phosphate
  modified_base 10: mod_base = OTHER; note = 2'-fluoroguanosine-3'-phosphate
  modified_base 11: mod_base = OTHER; note = 2'-fluoroguanosine-3'-phosphate
  modified_base 12: mod_base = OTHER; note = 2'-O-methyladenosine-3'-phosphate
  modified_base 13: mod_base = OTHER; note = 2'-O-methylguanosine-3'-phosphate
  modified_base 14: mod_base = OTHER; note = 2'-O-methyladenosine-3'-phosphate
  modified_base 15: mod_base = OTHER; note = 2'-O-methyladenosine-3'-phosphate
  modified_base 16: mod_base = OTHER; note = 2'-O-methyladenosine-3'-phosphate
  modified_base 17: mod_base = OTHER; note = 2'-O-methylcytidine-3'-phosphate
  modified_base 18: mod_base = OTHER; note = 2'-O-methyluridine-3'-phosphate
  modified_base 19: mod_base = OTHER; note = 2'-O-methylguanosine-3'-phosphorothioate
  modified_base 20: mod_base = OTHER; note = 2'-O-methylcytidine-3'-phosphorothioate
  modified_base 21: mod_base = OTHER; note = 2'-O-methyladenosine-3'-phosphate
gtgtcgttaggagaaactgca

SEQ ID NO: 3906 - RNA, 21 nt, synthetic construct
  source 1..21: mol_type = other RNA
  modified_base 1: mod_base = OTHER; note = 2'-O-methylguanosine-3'-phosphorothioate
  modified_base 2: mod_base = OTHER; note = 2'-O-methylguanosine-3'-phosphorothioate
  modified_base 3: mod_base = OTHER; note = 2'-O-methylguanosine-3'-phosphate
  modified_base 4: mod_base = OTHER; note = 2'-O-methyladenosine-3'-phosphate
  modified_base 5: mod_base = OTHER; note = 2'-O-methylcytidine-3'-phosphate
  modified_base 6: mod_base = OTHER; note 1-((2R,3R,4R,5R)-3-(docosyloxy)-4-hydroxy-5-(hydroxymethyl) tetrahydrofuran-2-yl)pyrimidine-2,4(1H,3H)-dione
  modified_base 7: mod_base = OTHER; note = 2'-fluorouridine-3'-phosphate
  modified_base 8: mod_base = OTHER; note = 2'-O-methyladenosine-3'-phosphate
  modified_base 9: mod_base = OTHER; note = 2'-fluoroadenosine-3'-phosphate
  modified_base 10: mod_base = OTHER; note = 2'-fluoroadenosine-3'-phosphate
  modified_base 11: mod_base = OTHER; note = 2'-fluoroadenosine-3'-phosphate
  modified_base 12: mod_base = OTHER; note = 2'-O-methylcytidine-3'-phosphate
  modified_base 13: mod_base = OTHER; note = 2'-O-methyladenosine-3'-phosphate
  modified_base 14: mod_base = OTHER; note = 2'-O-methyladenosine-3'-phosphate
  modified_base 15: mod_base = OTHER; note = 2'-O-methyluridine-3'-phosphate
  modified_base 16: mod_base = OTHER; note = 2'-O-methylguanosine-3'-phosphate
  modified_base 17: mod_base = OTHER; note = 2'-O-methylguanosine-3'-phosphate
  modified_base 18: mod_base = OTHER; note = 2'-O-methyluridine-3'-phosphate
  modified_base 19: mod_base = OTHER; note = 2'-O-methyladenosine-3'-phosphorothioate
  modified_base 20: mod_base = OTHER; note = 2'-O-methyluridine-3'-phosphorothioate
  modified_base 21: mod_base = OTHER; note = 2'-O-methyladenosine-3'-phosphate
gggacttaaaacaatggtata

SEQ ID NO: 3907 - RNA, 21 nt, synthetic construct
  source 1..21: mol_type = other RNA
  modified_base 1: mod_base = OTHER; note = 2'-O-methylcytidine-3'-phosphorothioate
  modified_base 2: mod_base = OTHER; note = 2'-O-methyluridine-3'-phosphorothioate
  modified_base 3: mod_base = OTHER; note = 2'-O-methylguanosine-3'-phosphate
  modified_base 4: mod_base = OTHER; note = 2'-O-methyladenosine-3'-phosphate
  modified_base 5: mod_base = OTHER; note = 2'-O-methyluridine-3'-phosphate
  modified_base 6: mod_base = OTHER; note 2-amino-9-((2R,3S,4S,5R)-3-(docosyloxy)-4-hydroxy-5-(hydrox ymethyl)tetrahydrofuran-2-yl)-1,9-dihydro-6H-purin-6-one
  modified_base 7: mod_base = OTHER; note = 2'-fluoroguanosine-3'-phosphate
  modified_base 8: mod_base = OTHER; note = 2'-O-methyluridine-3'-phosphate
  modified_base 9: mod_base = OTHER; note = 2'-fluoroadenosine-3'-phosphate
  modified_base 10: mod_base = OTHER; note = 2'-fluoroguanosine-3'-phosphate
  modified_base 11: mod_base = OTHER; note = 2'-fluoroadenosine-3'-phosphate
  modified_base 12: mod_base = OTHER; note = 2'-O-methyladenosine-3'-phosphate
  modified_base 13: mod_base = OTHER; note = 2'-O-methyluridine-3'-phosphate
  modified_base 14: mod_base = OTHER; note = 2'-O-methyluridine-3'-phosphate
  modified_base 15: mod_base = OTHER; note = 2'-O-methyladenosine-3'-phosphate
  modified_base 16: mod_base = OTHER; note = 2'-O-methyladenosine-3'-phosphate
  modified_base 17: mod_base = OTHER; note = 2'-O-methylcytidine-3'-phosphate
  modified_base 18: mod_base = OTHER; note = 2'-O-methylcytidine-3'-phosphate
  modified_base 19: mod_base = OTHER; note = 2'-O-methyladenosine-3'-phosphorothioate
  modified_base 20: mod_base = OTHER; note = 2'-O-methyluridine-3'-phosphorothioate
  modified_base 21: mod_base = OTHER; note = 2'-O-methyladenosine-3'-phosphate
ctgatggtagaattaaccata

SEQ ID NO: 3908 - RNA, 21 nt, synthetic construct
  source 1..21: mol_type = other RNA
  modified_base 1: mod_base = OTHER; note = 2'-O-methyladenosine-3'-phosphorothioate
  modified_base 2: mod_base = OTHER; note = 2'-O-methylcytidine-3'-phosphorothioate
  modified_base 3: mod_base = OTHER; note = 2'-O-methyluridine-3'-phosphate
  modified_base 4: mod_base = OTHER; note = 2'-O-methyladenosine-3'-phosphate
  modified_base 5: mod_base = OTHER; note = 2'-O-methyluridine-3'-phosphate
  modified_base 6: mod_base = OTHER; note 2-amino-9-((2R,3S,4S,5R)-3-(docosyloxy)-4-hydroxy-5-(hydrox ymethyl)tetrahydrofuran-2-yl)-1,9-dihydro-6H-purin-6-one
  modified_base 7: mod_base = OTHER; note = 2'-fluorouridine-3'-phosphate
  modified_base 8: mod_base = OTHER; note = 2'-O-methylguanosine-3'-phosphate
  modified_base 9: mod_base = OTHER; note = 2'-fluorouridine-3'-phosphate
  modified_base 10: mod_base = OTHER; note = 2'-fluoroguanosine-3'-phosphate
  modified_base 11: mod_base = OTHER; note = 2'-fluorouridine-3'-phosphate
  modified_base 12: mod_base = OTHER; note = 2'-O-methyluridine-3'-phosphate
  modified_base 13: mod_base = OTHER; note = 2'-O-methyluridine-3'-phosphate
  modified_base 14: mod_base = OTHER; note = 2'-O-methyluridine-3'-phosphate
  modified_base 15: mod_base = OTHER; note = 2'-O-methyladenosine-3'-phosphate
  modified_base 16: mod_base = OTHER; note = 2'-O-methyluridine-3'-phosphate
  modified_base 17: mod_base = OTHER; note = 2'-O-methyluridine-3'-phosphate
  modified_base 18: mod_base = OTHER; note = 2'-O-methyluridine-3'-phosphate
  modified_base 19: mod_base = OTHER; note = 2'-O-methylcytidine-3'-phosphorothioate
  modified_base 20: mod_base = OTHER; note = 2'-O-methyluridine-3'-phosphorothioate
  modified_base 21: mod_base = OTHER; note = 2'-O-methyladenosine-3'-phosphate
actatgtgtgttttatttcta

SEQ ID NO: 3909 - RNA, 21 nt, synthetic construct
  source 1..21: mol_type = other RNA
  modified_base 1: mod_base = OTHER; note = 2'-O-methylcytidine-3'-phosphorothioate
  modified_base 2: mod_base = OTHER; note = 2'-O-methyluridine-3'-phosphorothioate
  modified_base 3: mod_base = OTHER; note = 2'-O-methylguanosine-3'-phosphate
  modified_base 4: mod_base = OTHER; note = 2'-O-methyladenosine-3'-phosphate
  modified_base 5: mod_base = OTHER; note = 2'-O-methyluridine-3'-phosphate
  modified_base 6: mod_base = OTHER; note (2R,3S,4S,5R)-5-(6-amino-9H-purin-9-yl)-4-(docosyloxy)-2-(h ydroxymethyl)tetrahydrofuran-3-ol
  modified_base 7: mod_base = OTHER; note = 2'-fluoroadenosine-3'-phosphate
  modified_base 8: mod_base = OTHER; note = 2'-O-methyluridine-3'-phosphate
  modified_base 9: mod_base = OTHER; note = 2'-fluorouridine-3'-phosphate
  modified_base 10: mod_base = OTHER; note = 2'-fluorouridine-3'-phosphate
  modified_base 11: mod_base = OTHER; note = 2'-fluoroadenosine-3'-phosphate
  modified_base 12: mod_base = OTHER; note = 2'-O-methyluridine-3'-phosphate
  modified_base 13: mod_base = OTHER; note = 2'-O-methyladenosine-3'-phosphate
  modified_base 14: mod_base = OTHER; note = 2'-O-methyluridine-3'-phosphate
  modified_base 15: mod_base = OTHER; note = 2'-O-methyluridine-3'-phosphate
  modified_base 16: mod_base = OTHER; note = 2'-O-methyluridine-3'-phosphate
  modified_base 17: mod_base = OTHER; note = 2'-O-methylguanosine-3'-phosphate
  modified_base 18: mod_base = OTHER; note = 2'-O-methylcytidine-3'-phosphate
  modified_base 19: mod_base = OTHER; note = 2'-O-methyladenosine-3'-phosphorothioate
  modified_base 20: mod_base = OTHER; note = 2'-O-methylcytidine-3'-phosphorothioate
  modified_base 21: mod_base = OTHER; note = 2'-O-methyladenosine-3'-phosphate
ctgataatttatatttgcaca

SEQ ID NO: 3910 - RNA, 21 nt, synthetic construct
  source 1..21: mol_type = other RNA
  modified_base 1: mod_base = OTHER; note = 2'-O-methylguanosine-3'-phosphorothioate
  modified_base 2: mod_base = OTHER; note = 2'-O-methyluridine-3'-phosphorothioate
  modified_base 3: mod_base = OTHER; note = 2'-O-methylcytidine-3'-phosphate
  modified_base 4: mod_base = OTHER; note = 2'-O-methylcytidine-3'-phosphate
  modified_base 5: mod_base = OTHER; note = 2'-O-methyluridine-3'-phosphate
  modified_base 6: mod_base = OTHER; note 1-((2R,3R,4R,5R)-3-(docosyloxy)-4-hydroxy-5-(hydroxymethyl) tetrahydrofuran-2-yl)pyrimidine-2,4(1H,3H)-dione
  modified_base 7: mod_base = OTHER; note = 2'-fluoroadenosine-3'-phosphate
  modified_base 8: mod_base = OTHER; note = 2'-O-methyladenosine-3'-phosphate
  modified_base 9: mod_base = OTHER; note = 2'-fluoroadenosine-3'-phosphate
  modified_base 10: mod_base = OTHER; note = 2'-fluorouridine-3'-phosphate
  modified_base 11: mod_base = OTHER; note = 2'-fluorouridine-3'-phosphate
  modified_base 12: mod_base = OTHER; note = 2'-O-methyladenosine-3'-phosphate
  modified_base 13: mod_base = OTHER; note = 2'-O-methyluridine-3'-phosphate
  modified_base 14: mod_base = OTHER; note = 2'-O-methyluridine-3'-phosphate
  modified_base 15: mod_base = OTHER; note = 2'-O-methyluridine-3'-phosphate
  modified_base 16: mod_base = OTHER; note = 2'-O-methyladenosine-3'-phosphate
  modified_base 17: mod_base = OTHER; note = 2'-O-methyladenosine-3'-phosphate
  modified_base 18: mod_base = OTHER; note = 2'-O-methylcytidine-3'-phosphate
  modified_base 19: mod_base = OTHER; note = 2'-O-methylcytidine-3'-phosphorothioate
  modified_base 20: mod_base = OTHER; note = 2'-O-methylcytidine-3'-phosphorothioate
  modified_base 21: mod_base = OTHER; note = 2'-O-methyladenosine-3'-phosphate
gtccttaaattatttaaccca

SEQ ID NO: 3911 - RNA, 21 nt, synthetic construct
  source 1..21: mol_type = other RNA
  modified_base 1: mod_base = OTHER; note = 2'-O-methylcytidine-3'-phosphorothioate
  modified_base 2: mod_base = OTHER; note = 2'-O-methylguanosine-3'-phosphorothioate
  modified_base 3: mod_base = OTHER; note = 2'-O-methylcytidine-3'-phosphate
  modified_base 4: mod_base = OTHER; note = 2'-O-methyladenosine-3'-phosphate
  modified_base 5: mod_base = OTHER; note = 2'-O-methyladenosine-3'-phosphate
  modified_base 6: mod_base = OTHER; note 1-((2R,3R,4R,5R)-3-(docosyloxy)-4-hydroxy-5-(hydroxymethyl) tetrahydrofuran-2-yl)pyrimidine-2,4(1H,3H)-dione
  modified_base 7: mod_base = OTHER; note = 2'-fluoroadenosine-3'-phosphate
  modified_base 8: mod_base = OTHER; note = 2'-O-methyluridine-3'-phosphate
  modified_base 9: mod_base = OTHER; note = 2'-fluoroguanosine-3'-phosphate
  modified_base 10: mod_base = OTHER; note = 2'-fluoroguanosine-3'-phosphate
  modified_base 11: mod_base = OTHER; note = 2'-fluorouridine-3'-phosphate
  modified_base 12: mod_base = OTHER; note = 2'-O-methylguanosine-3'-phosphate
  modified_base 13: mod_base = OTHER; note = 2'-O-methyluridine-3'-phosphate
  modified_base 14: mod_base = OTHER; note = 2'-O-methylcytidine-3'-phosphate
  modified_base 15: mod_base = OTHER; note = 2'-O-methyladenosine-3'-phosphate
  modified_base 16: mod_base = OTHER; note = 2'-O-methylguanosine-3'-phosphate
  modified_base 17: mod_base = OTHER; note = 2'-O-methyladenosine-3'-phosphate
  modified_base 18: mod_base = OTHER; note = 2'-O-methyluridine-3'-phosphate
  modified_base 19: mod_base = OTHER; note = 2'-O-methylcytidine-3'-phosphorothioate
  modified_base 20: mod_base = OTHER; note = 2'-O-methyluridine-3'-phosphorothioate
  modified_base 21: mod_base = OTHER; note = 2'-O-methyladenosine-3'-phosphate
cgcaatatggtgtcagatcta

SEQ ID NO: 3912 - RNA, 21 nt, synthetic construct
  source 1..21: mol_type = other RNA
  modified_base 1: mod_base = OTHER; note = 2'-O-methyluridine-3'-phosphorothioate
  modified_base 2: mod_base = OTHER; note = 2'-O-methyluridine-3'-phosphorothioate
  modified_base 3: mod_base = OTHER; note = 2'-O-methylcytidine-3'-phosphate
  modified_base 4: mod_base = OTHER; note = 2'-O-methylguanosine-3'-phosphate
  modified_base 5: mod_base = OTHER; note = 2'-O-methyladenosine-3'-phosphate
  modified_base 6: mod_base = OTHER; note (2R,3S,4S,5R)-5-(6-amino-9H-purin-9-yl)-4-(docosyloxy)-2-(h ydroxymethyl)tetrahydrofuran-3-ol
  modified_base 7: mod_base = OTHER; note = 2'-fluoroguanosine-3'-phosphate
  modified_base 8: mod_base = OTHER; note = 2'-O-methyladenosine-3'-phosphate
  modified_base 9: mod_base = OTHER; note = 2'-fluoroguanosine-3'-phosphate
  modified_base 10: mod_base = OTHER; note = 2'-fluorocytidine-3'-phosphate
  modified_base 11: mod_base = OTHER; note = 2'-fluorouridine-3'-phosphate
  modified_base 12: mod_base = OTHER; note = 2'-O-methylguanosine-3'-phosphate
  modified_base 13: mod_base = OTHER; note = 2'-O-methylcytidine-3'-phosphate
  modified_base 14: mod_base = OTHER; note = 2'-O-methyluridine-3'-phosphate
  modified_base 15: mod_base = OTHER; note = 2'-O-methylcytidine-3'-phosphate
  modified_base 16: mod_base = OTHER; note = 2'-O-methyluridine-3'-phosphate
  modified_base 17: mod_base = OTHER; note = 2'-O-methyladenosine-3'-phosphate
  modified_base 18: mod_base = OTHER; note = 2'-O-methyladenosine-3'-phosphate
  modified_base 19: mod_base = OTHER; note = 2'-O-methyluridine-3'-phosphorothioate
  modified_base 20: mod_base = OTHER; note = 2'-O-methylcytidine-3'-phosphorothioate
  modified_base 21: mod_base = OTHER; note = 2'-O-methyladenosine-3'-phosphate
ttcgaagagctgctctaatca

SEQ ID NO: 3913 - RNA, 21 nt, synthetic construct
  source 1..21: mol_type = other RNA
  modified_base 1: mod_base = OTHER; note = 2'-O-methyluridine-3'-phosphorothioate
  modified_base 2: mod_base = OTHER; note = 2'-O-methyluridine-3'-phosphorothioate
  modified_base 3: mod_base = OTHER; note = 2'-O-methyluridine-3'-phosphate
  modified_base 4: mod_base = OTHER; note = 2'-O-methylcytidine-3'-phosphate
  modified_base 5: mod_base = OTHER; note = 2'-O-methyluridine-3'-phosphate
  modified_base 6: mod_base = OTHER; note 2-amino-9-((2R,3S,4S,5R)-3-(docosyloxy)-4-hydroxy-5-(hydrox ymethyl)tetrahydrofuran-2-yl)-1,9-dihydro-6H-purin-6-one
  modified_base 7: mod_base = OTHER; note = 2'-fluorocytidine-3'-phosphate
  modified_base 8: mod_base = OTHER; note = 2'-O-methyluridine-3'-phosphate
  modified_base 9: mod_base = OTHER; note = 2'-fluoroguanosine-3'-phosphate
  modified_base 10: mod_base = OTHER; note = 2'-fluoroadenosine-3'-phosphate
  modified_base 11: mod_base = OTHER; note = 2'-fluoroguanosine-3'-phosphate
  modified_base 12: mod_base = OTHER; note = 2'-O-methyladenosine-3'-phosphate
  modified_base 13: mod_base = OTHER; note = 2'-O-methylguanosine-3'-phosphate
  modified_base 14: mod_base = OTHER; note = 2'-O-methyluridine-3'-phosphate
  modified_base 15: mod_base = OTHER; note = 2'-O-methyladenosine-3'-phosphate
  modified_base 16: mod_base = OTHER; note = 2'-O-methyluridine-3'-phosphate
  modified_base 17: mod_base = OTHER; note = 2'-O-methyluridine-3'-phosphate
  modified_base 18: mod_base = OTHER; note = 2'-O-methylcytidine-3'-phosphate
  modified_base 19: mod_base = OTHER; note = 2'-O-methyladenosine-3'-phosphorothioate
  modified_base 20: mod_base = OTHER; note = 2'-O-methylguanosine-3'-phosphorothioate
  modified_base 21: mod_base = OTHER; note = 2'-O-methyladenosine-3'-phosphate
tttctgctgagagtattcaga

SEQ ID NO: 3914 - RNA, 21 nt, synthetic construct
  source 1..21: mol_type = other RNA
  modified_base 1: mod_base = OTHER; note = 2'-O-methyluridine-3'-phosphorothioate
  modified_base 2: mod_base = OTHER; note = 2'-O-methyluridine-3'-phosphorothioate
  modified_base 3: mod_base = OTHER; note = 2'-O-methylguanosine-3'-phosphate
  modified_base 4: mod_base = OTHER; note = 2'-O-methyladenosine-3'-phosphate
  modified_base 5: mod_base = OTHER; note = 2'-O-methyladenosine-3'-phosphate
  modified_base 6: mod_base = OTHER; note 4-amino-1-((2R,3R,4R,5R)-3-(docosyloxy)-4-hydroxy-5-(hydrox ymethyl)tetrahydrofuran-2-yl)pyrimidin-2(1H)-one
  modified_base 7: mod_base = OTHER; note = 2'-fluoroadenosine-3'-phosphate
  modified_base 8: mod_base = OTHER; note = 2'-O-methylguanosine-3'-phosphate
  modified_base 9: mod_base = OTHER; note = 2'-fluoroguanosine-3'-phosphate
  modified_base 10: mod_base = OTHER; note = 2'-fluoroadenosine-3'-phosphate
  modified_base 11: mod_base = OTHER; note = 2'-fluoroadenosine-3'-phosphate
  modified_base 12: mod_base = OTHER; note = 2'-O-methylguanosine-3'-phosphate
  modified_base 13: mod_base = OTHER; note = 2'-O-methyluridine-3'-phosphate
  modified_base 14: mod_base = OTHER; note = 2'-O-methyladenosine-3'-phosphate
  modified_base 15: mod_base = OTHER; note = 2'-O-methyluridine-3'-phosphate
  modified_base 16: mod_base = OTHER; note = 2'-O-methylcytidine-3'-phosphate
  modified_base 17: mod_base = OTHER; note = 2'-O-methyladenosine-3'-phosphate
  modified_base 18: mod_base = OTHER; note = 2'-O-methylcytidine-3'-phosphate
  modified_base 19: mod_base = OTHER; note = 2'-O-methyluridine-3'-phosphorothioate
  modified_base 20: mod_base = OTHER; note = 2'-O-methylguanosine-3'-phosphorothioate
  modified_base 21: mod_base = OTHER; note = 2'-O-methyladenosine-3'-phosphate
ttgaacaggaagtatcactga

SEQ ID NO: 3915 - RNA, 21 nt, synthetic construct
  source 1..21: mol_type = other RNA
  modified_base 1: mod_base = OTHER; note = 2'-O-methyluridine-3'-phosphorothioate
  modified_base 2: mod_base = OTHER; note = 2'-O-methylguanosine-3'-phosphorothioate
  modified_base 3: mod_base = OTHER; note = 2'-O-methylcytidine-3'-phosphate
  modified_base 4: mod_base = OTHER; note = 2'-O-methylcytidine-3'-phosphate
  modified_base 5: mod_base = OTHER; note = 2'-O-methyluridine-3'-phosphate
  modified_base 6: mod_base = OTHER; note 1-((2R,3R,4R,5R)-3-(docosyloxy)-4-hydroxy-5-(hydroxymethyl) tetrahydrofuran-2-yl)pyrimidine-2,4(1H,3H)-dione
  modified_base 7: mod_base = OTHER; note = 2'-fluoroguanosine-3'-phosphate
  modified_base 8: mod_base = OTHER; note = 2'-O-methyluridine-3'-phosphate
  modified_base 9: mod_base = OTHER; note = 2'-fluoroadenosine-3'-phosphate
  modified_base 10: mod_base = OTHER; note = 2'-fluorouridine-3'-phosphate
  modified_base 11: mod_base = OTHER; note = 2'-fluorouridine-3'-phosphate
  modified_base 12: mod_base = OTHER; note = 2'-O-methyluridine-3'-phosphate
  modified_base 13: mod_base = OTHER; note = 2'-O-methylcytidine-3'-phosphate
  modified_base 14: mod_base = OTHER; note = 2'-O-methylcytidine-3'-phosphate
  modified_base 15: mod_base = OTHER; note = 2'-O-methyladenosine-3'-phosphate
  modified_base 16: mod_base = OTHER; note = 2'-O-methylguanosine-3'-phosphate
  modified_base 17: mod_base = OTHER; note = 2'-O-methyladenosine-3'-phosphate
  modified_base 18: mod_base = OTHER; note = 2'-O-methylguanosine-3'-phosphate
  modified_base 19: mod_base = OTHER; note = 2'-O-methyladenosine-3'-phosphorothioate
  modified_base 20: mod_base = OTHER; note = 2'-O-methyladenosine-3'-phosphorothioate
  modified_base 21: mod_base = OTHER; note = 2'-O-methyladenosine-3'-phosphate
tgccttgtatttccagagaaa

SEQ ID NO: 3916 - RNA, 21 nt, synthetic construct
  source 1..21: mol_type = other RNA
  modified_base 1: mod_base = OTHER; note = 2'-O-methylguanosine-3'-phosphorothioate
  modified_base 2: mod_base = OTHER; note = 2'-O-methyluridine-3'-phosphorothioate
  modified_base 3: mod_base = OTHER; note = 2'-O-methyluridine-3'-phosphate
  modified_base 4: mod_base = OTHER; note = 2'-O-methyladenosine-3'-phosphate
  modified_base 5: mod_base = OTHER; note = 2'-O-methylcytidine-3'-phosphate
  modified_base 6: mod_base = OTHER; note 1-((2R,3R,4R,5R)-3-(docosyloxy)-4-hydroxy-5-(hydroxymethyl) tetrahydrofuran-2-yl)pyrimidine-2,4(1H,3H)-dione
  modified_base 7: mod_base = OTHER; note = 2'-fluoroadenosine-3'-phosphate
  modified_base 8: mod_base = OTHER; note = 2'-O-methyluridine-3'-phosphate
  modified_base 9: mod_base = OTHER; note = 2'-fluoroguanosine-3'-phosphate
  modified_base 10: mod_base = OTHER; note = 2'-fluoroguanosine-3'-phosphate
  modified_base 11: mod_base = OTHER; note = 2'-fluorocytidine-3'-phosphate
  modified_base 12: mod_base = OTHER; note = 2'-O-methyladenosine-3'-phosphate
  modified_base 13: mod_base = OTHER; note = 2'-O-methylguanosine-3'-phosphate
  modified_base 14: mod_base = OTHER; note = 2'-O-methyluridine-3'-phosphate
  modified_base 15: mod_base = OTHER; note = 2'-O-methyluridine-3'-phosphate
  modified_base 16: mod_base = OTHER; note = 2'-O-methylguanosine-3'-phosphate
  modified_base 17: mod_base = OTHER; note = 2'-O-methylcytidine-3'-phosphate
  modified_base 18: mod_base = OTHER; note = 2'-O-methyladenosine-3'-phosphate
  modified_base 19: mod_base = OTHER; note = 2'-O-methyladenosine-3'-phosphorothioate
  modified_base 20: mod_base = OTHER; note = 2'-O-methyladenosine-3'-phosphorothioate
  modified_base 21: mod_base = OTHER; note = 2'-O-methyladenosine-3'-phosphate
gttactatggcagttgcaaaa

SEQ ID NO: 3917 - RNA, 21 nt, synthetic construct
  source 1..21: mol_type = other RNA
  modified_base 1: mod_base = OTHER; note = 2'-O-methyladenosine-3'-phosphorothioate
  modified_base 2: mod_base = OTHER; note = 2'-O-methyluridine-3'-phosphorothioate
  modified_base 3: mod_base = OTHER; note = 2'-O-methylguanosine-3'-phosphate
  modified_base 4: mod_base = OTHER; note = 2'-O-methylguanosine-3'-phosphate
  modified_base 5: mod_base = OTHER; note = 2'-O-methylcytidine-3'-phosphate
  modified_base 6: mod_base = OTHER; note 1-((2R,3R,4R,5R)-3-(docosyloxy)-4-hydroxy-5-(hydroxymethyl) tetrahydrofuran-2-yl)pyrimidine-2,4(1H,3H)-dione
  modified_base 7: mod_base = OTHER; note = 2'-fluoroguanosine-3'-phosphate
  modified_base 8: mod_base = OTHER; note = 2'-O-methyladenosine-3'-phosphate
  modified_base 9: mod_base = OTHER; note = 2'-fluoroadenosine-3'-phosphate
  modified_base 10: mod_base = OTHER; note = 2'-fluorouridine-3'-phosphate
  modified_base 11: mod_base = OTHER; note = 2'-fluorouridine-3'-phosphate
  modified_base 12: mod_base = OTHER; note = 2'-O-methyluridine-3'-phosphate
  modified_base 13: mod_base = OTHER; note = 2'-O-methyluridine-3'-phosphate
  modified_base 14: mod_base = OTHER; note = 2'-O-methyladenosine-3'-phosphate
  modified_base 15: mod_base = OTHER; note = 2'-O-methyladenosine-3'-phosphate
  modified_base 16: mod_base = OTHER; note = 2'-O-methyladenosine-3'-phosphate
  modified_base 17: mod_base = OTHER; note = 2'-O-methylguanosine-3'-phosphate
  modified_base 18: mod_base = OTHER; note = 2'-O-methylcytidine-3'-phosphate
  modified_base 19: mod_base = OTHER; note = 2'-O-methyluridine-3'-phosphorothioate
  modified_base 20: mod_base = OTHER; note = 2'-O-methylguanosine-3'-phosphorothioate
  modified_base 21: mod_base = OTHER; note = 2'-O-methyladenosine-3'-phosphate
atggctgaattttaaagctga

SEQ ID NO: 3918 - RNA, 21 nt, synthetic construct
  source 1..21: mol_type = other RNA
  modified_base 1: mod_base = OTHER; note = 2'-O-methylguanosine-3'-phosphorothioate
  modified_base 2: mod_base = OTHER; note = 2'-O-methyluridine-3'-phosphorothioate
  modified_base 3: mod_base = OTHER; note = 2'-O-methylcytidine-3'-phosphate
  modified_base 4: mod_base = OTHER; note = 2'-O-methylcytidine-3'-phosphate
  modified_base 5: mod_base = OTHER; note = 2'-O-methyladenosine-3'-phosphate
  modified_base 6: mod_base = OTHER; note 1-((2R,3R,4R,5R)-3-(docosyloxy)-4-hydroxy-5-(hydroxymethyl) tetrahydrofuran-2-yl)pyrimidine-2,4(1H,3H)-dione
  modified_base 7: mod_base = OTHER; note = 2'-fluorouridine-3'-phosphate
  modified_base 8: mod_base = OTHER; note = 2'-O-methylcytidine-3'-phosphate
  modified_base 9: mod_base = OTHER; note = 2'-fluoroadenosine-3'-phosphate
  modified_base 10: mod_base = OTHER; note = 2'-fluorouridine-3'-phosphate
  modified_base 11: mod_base = OTHER; note = 2'-fluoroguanosine-3'-phosphate
  modified_base 12: mod_base = OTHER; note = 2'-O-methylguanosine-3'-phosphate
  modified_base 13: mod_base = OTHER; note = 2'-O-methyladenosine-3'-phosphate
  modified_base 14: mod_base = OTHER; note = 2'-O-methyluridine-3'-phosphate
  modified_base 15: mod_base = OTHER; note = 2'-O-methylcytidine-3'-phosphate
  modified_base 16: mod_base = OTHER; note = 2'-O-methylguanosine-3'-phosphate
  modified_base 17: mod_base = OTHER; note = 2'-O-methyluridine-3'-phosphate
  modified_base 18: mod_base = OTHER; note = 2'-O-methyluridine-3'-phosphate
  modified_base 19: mod_base = OTHER; note = 2'-O-methylcytidine-3'-phosphorothioate
  modified_base 20: mod_base = OTHER; note = 2'-O-methyluridine-3'-phosphorothioate
  modified_base 21: mod_base = OTHER; note = 2'-O-methyladenosine-3'-phosphate
gtccattcatggatcgttcta

SEQ ID NO: 3919 - RNA, 21 nt, synthetic construct
  source 1..21: mol_type = other RNA
  modified_base 1: mod_base = OTHER; note = 2'-O-methyluridine-3'-phosphorothioate
  modified_base 2: mod_base = OTHER; note = 2'-O-methylguanosine-3'-phosphorothioate
  modified_base 3: mod_base = OTHER; note = 2'-O-methyluridine-3'-phosphate
  modified_base 4: mod_base = OTHER; note = 2'-O-methylguanosine-3'-phosphate
  modified_base 5: mod_base = OTHER; note = 2'-O-methyluridine-3'-phosphate
  modified_base 6: mod_base = OTHER; note (2R,3S,4S,5R)-5-(6-amino-9H-purin-9-yl)-4-(docosyloxy)-2-(h ydroxymethyl)tetrahydrofuran-3-ol
  modified_base 7: mod_base = OTHER; note = 2'-fluoroadenosine-3'-phosphate
  modified_base 8: mod_base = OTHER; note = 2'-O-methylcytidine-3'-phosphate
  modified_base 9: mod_base = OTHER; note = 2'-fluorouridine-3'-phosphate
  modified_base 10: mod_base = OTHER; note = 2'-fluorocytidine-3'-phosphate
  modified_base 11: mod_base = OTHER; note = 2'-fluorocytidine-3'-phosphate
  modified_base 12: mod_base = OTHER; note = 2'-O-methyluridine-3'-phosphate
  modified_base 13: mod_base = OTHER; note = 2'-O-methyladenosine-3'-phosphate
  modified_base 14: mod_base = OTHER; note = 2'-O-methyluridine-3'-phosphate
  modified_base 15: mod_base = OTHER; note = 2'-O-methylguanosine-3'-phosphate
  modified_base 16: mod_base = OTHER; note = 2'-O-methyladenosine-3'-phosphate
  modified_base 17: mod_base = OTHER; note = 2'-O-methyluridine-3'-phosphate
  modified_base 18: mod_base = OTHER; note = 2'-O-methylguanosine-3'-phosphate
  modified_base 19: mod_base = OTHER; note = 2'-O-methylcytidine-3'-phosphorothioate
  modified_base 20: mod_base = OTHER; note = 2'-O-methyluridine-3'-phosphorothioate
  modified_base 21: mod_base = OTHER; note = 2'-O-methyladenosine-3'-phosphate
tgtgtaactcctatgatgcta

SEQ ID NO: 3920 - RNA, 21 nt, synthetic construct
  source 1..21: mol_type = other RNA
  modified_base 1: mod_base = OTHER; note = 2'-O-methyluridine-3'-phosphorothioate
  modified_base 2: mod_base = OTHER; note = 2'-O-methylguanosine-3'-phosphorothioate
  modified_base 3: mod_base = OTHER; note = 2'-O-methylguanosine-3'-phosphate
  modified_base 4: mod_base = OTHER; note = 2'-O-methylcytidine-3'-phosphate
  modified_base 5: mod_base = OTHER; note = 2'-O-methyladenosine-3'-phosphate
  modified_base 6: mod_base = OTHER; note 2-amino-9-((2R,3S,4S,5R)-3-(docosyloxy)-4-hydroxy-5-(hydrox ymethyl)tetrahydrofuran-2-yl)-1,9-dihydro-6H-purin-6-one
  modified_base 7: mod_base = OTHER; note = 2'-fluorouridine-3'-phosphate
  modified_base 8: mod_base = OTHER; note = 2'-O-methyluridine-3'-phosphate
  modified_base 9: mod_base = OTHER; note = 2'-fluorouridine-3'-phosphate
  modified_base 10: mod_base = OTHER; note = 2'-fluorocytidine-3'-phosphate
  modified_base 11: mod_base = OTHER; note = 2'-fluorocytidine-3'-phosphate
  modified_base 12: mod_base = OTHER; note = 2'-O-methylcytidine-3'-phosphate
  modified_base 13: mod_base = OTHER; note = 2'-O-methyladenosine-3'-phosphate
  modified_base 14: mod_base = OTHER; note = 2'-O-methylcytidine-3'-phosphate
  modified_base 15: mod_base = OTHER; note = 2'-O-methyluridine-3'-phosphate
  modified_base 16: mod_base = OTHER; note = 2'-O-methylcytidine-3'-phosphate
  modified_base 17: mod_base = OTHER; note = 2'-O-methylcytidine-3'-phosphate
  modified_base 18: mod_base = OTHER; note = 2'-O-methyluridine-3'-phosphate
  modified_base 19: mod_base = OTHER; note = 2'-O-methyladenosine-3'-phosphorothioate
  modified_base 20: mod_base = OTHER; note = 2'-O-methyluridine-3'-phosphorothioate
  modified_base 21: mod_base = OTHER; note = 2'-O-methyladenosine-3'-phosphate
tggcagtttcccactcctata

SEQ ID NO: 3921 - RNA, 21 nt, synthetic construct
  source 1..21: mol_type = other RNA
  modified_base 1: mod_base = OTHER; note = 2'-O-methylcytidine-3'-phosphorothioate
  modified_base 2: mod_base = OTHER; note = 2'-O-methylcytidine-3'-phosphorothioate
  modified_base 3: mod_base = OTHER; note = 2'-O-methyluridine-3'-phosphate
  modified_base 4: mod_base = OTHER; note = 2'-O-methylcytidine-3'-phosphate
  modified_base 5: mod_base = OTHER; note = 2'-O-methyladenosine-3'-phosphate
  modified_base 6: mod_base = OTHER; note (2R,3S,4S,5R)-5-(6-amino-9H-purin-9-yl)-4-(docosyloxy)-2-(h ydroxymethyl)tetrahydrofuran-3-ol
  modified_base 7: mod_base = OTHER; note = 2'-fluoroguanosine-3'-phosphate
  modified_base 8: mod_base = OTHER; note = 2'-O-methylcytidine-3'-phosphate
  modified_base 9: mod_base = OTHER; note = 2'-fluoroadenosine-3'-phosphate
  modified_base 10: mod_base = OTHER; note = 2'-fluoroguanosine-3'-phosphate
  modified_base 11: mod_base = OTHER; note = 2'-fluoroadenosine-3'-phosphate
  modified_base 12: mod_base = OTHER; note = 2'-O-methyluridine-3'-phosphate
  modified_base 13: mod_base = OTHER; note = 2'-O-methylguanosine-3'-phosphate
  modified_base 14: mod_base = OTHER; note = 2'-O-methyladenosine-3'-phosphate
  modified_base 15: mod_base = OTHER; note = 2'-O-methylguanosine-3'-phosphate
  modified_base 16: mod_base = OTHER; note = 2'-O-methyladenosine-3'-phosphate
  modified_base 17: mod_base = OTHER; note = 2'-O-methyluridine-3'-phosphate
  modified_base 18: mod_base = OTHER; note = 2'-O-methyluridine-3'-phosphate
  modified_base 19: mod_base = OTHER; note = 2'-O-methylcytidine-3'-phosphorothioate
  modified_base 20: mod_base = OTHER; note = 2'-O-methyladenosine-3'-phosphorothioate
  modified_base 21: mod_base = OTHER; note = 2'-O-methyladenosine-3'-phosphate
cctcaagcagatgagattcaa

SEQ ID NO: 3922 - RNA, 21 nt, synthetic construct
  source 1..21: mol_type = other RNA
  modified_base 1: mod_base = OTHER; note = 2'-O-methyladenosine-3'-phosphorothioate
  modified_base 2: mod_base = OTHER; note = 2'-O-methyluridine-3'-phosphorothioate
  modified_base 3: mod_base = OTHER; note = 2'-O-methylguanosine-3'-phosphate
  modified_base 4: mod_base = OTHER; note = 2'-O-methyluridine-3'-phosphate
  modified_base 5: mod_base = OTHER; note = 2'-O-methyluridine-3'-phosphate
  modified_base 6: mod_base = OTHER; note 2-amino-9-((2R,3S,4S,5R)-3-(docosyloxy)-4-hydroxy-5-(hydrox ymethyl)tetrahydrofuran-2-yl)-1,9-dihydro-6H-purin-6-one
  modified_base 7: mod_base = OTHER; note = 2'-fluorouridine-3'-phosphate
  modified_base 8: mod_base = OTHER; note = 2'-O-methyluridine-3'-phosphate
  modified_base 9: mod_base = OTHER; note = 2'-fluorouridine-3'-phosphate
  modified_base 10: mod_base = OTHER; note = 2'-fluorouridine-3'-phosphate
  modified_base 11: mod_base = OTHER; note = 2'-fluorocytidine-3'-phosphate
  modified_base 12: mod_base = OTHER; note = 2'-O-methyluridine-3'-phosphate
  modified_base 13: mod_base = OTHER; note = 2'-O-methylcytidine-3'-phosphate
  modified_base 14: mod_base = OTHER; note = 2'-O-methyladenosine-3'-phosphate
  modified_base 15: mod_base = OTHER; note = 2'-O-methyladenosine-3'-phosphate
  modified_base 16: mod_base = OTHER; note = 2'-O-methyladenosine-3'-phosphate
  modified_base 17: mod_base = OTHER; note = 2'-O-methyladenosine-3'-phosphate
  modified_base 18: mod_base = OTHER; note = 2'-O-methylguanosine-3'-phosphate
  modified_base 19: mod_base = OTHER; note = 2'-O-methylcytidine-3'-phosphorothioate
  modified_base 20: mod_base = OTHER; note = 2'-O-methyladenosine-3'-phosphorothioate
  modified_base 21: mod_base = OTHER; note = 2'-O-methyladenosine-3'-phosphate
atgttgttttctcaaaagcaa

SEQ ID NO: 3923 - RNA, 21 nt, synthetic construct
  source 1..21: mol_type = other RNA
  modified_base 1: mod_base = OTHER; note = 2'-O-methylguanosine-3'-phosphorothioate
  modified_base 2: mod_base = OTHER; note = 2'-O-methyladenosine-3'-phosphorothioate
  modified_base 3: mod_base = OTHER; note = 2'-O-methylguanosine-3'-phosphate
  modified_base 4: mod_base = OTHER; note = 2'-O-methylguanosine-3'-phosphate
  modified_base 5: mod_base = OTHER; note = 2'-O-methylguanosine-3'-phosphate
  modified_base 6: mod_base = OTHER; note (2R,3S,4S,5R)-5-(6-amino-9H-purin-9-yl)-4-(docosyloxy)-2-(h ydroxymethyl)tetrahydrofuran-3-ol
  modified_base 7: mod_base = OTHER; note = 2'-fluorouridine-3'-phosphate
  modified_base 8: mod_base = OTHER; note = 2'-O-methyluridine-3'-phosphate
  modified_base 9: mod_base = OTHER; note = 2'-fluorouridine-3'-phosphate
  modified_base 10: mod_base = OTHER; note = 2'-fluorocytidine-3'-phosphate
  modified_base 11: mod_base = OTHER; note = 2'-fluorouridine-3'-phosphate
  modified_base 12: mod_base = OTHER; note = 2'-O-methylguanosine-3'-phosphate
  modified_base 13: mod_base = OTHER; note = 2'-O-methylcytidine-3'-phosphate
  modified_base 14: mod_base = OTHER; note = 2'-O-methyluridine-3'-phosphate
  modified_base 15: mod_base = OTHER; note = 2'-O-methylcytidine-3'-phosphate
  modified_base 16: mod_base = OTHER; note = 2'-O-methyladenosine-3'-phosphate
  modified_base 17: mod_base = OTHER; note = 2'-O-methyladenosine-3'-phosphate
  modified_base 18: mod_base = OTHER; note = 2'-O-methyluridine-3'-phosphate
  modified_base 19: mod_base = OTHER; note = 2'-O-methylguanosine-3'-phosphorothioate
  modified_base 20: mod_base = OTHER; note = 2'-O-methylcytidine-3'-phosphorothioate
  modified_base 21: mod_base = OTHER; note = 2'-O-methyladenosine-3'-phosphate
gagggatttctgctcaatgca

SEQ ID NO: 3924 - RNA, 21 nt, synthetic construct
  source 1..21: mol_type = other RNA
  modified_base 1: mod_base = OTHER; note = 2'-O-methylguanosine-3'-phosphorothioate
  modified_base 2: mod_base = OTHER; note = 2'-O-methylcytidine-3'-phosphorothioate
  modified_base 3: mod_base = OTHER; note = 2'-O-methylcytidine-3'-phosphate
  modified_base 4: mod_base = OTHER; note = 2'-O-methyluridine-3'-phosphate
  modified_base 5: mod_base = OTHER; note = 2'-O-methyluridine-3'-phosphate
  modified_base 6: mod_base = OTHER; note 4-amino-1-((2R,3R,4R,5R)-3-(docosyloxy)-4-hydroxy-5-(hydrox ymethyl)tetrahydrofuran-2-yl)pyrimidin-2(1H)-one
  modified_base 7: mod_base = OTHER; note = 2'-fluorouridine-3'-phosphate
  modified_base 8: mod_base = OTHER; note = 2'-O-methyluridine-3'-phosphate
  modified_base 9: mod_base = OTHER; note = 2'-fluorocytidine-3'-phosphate
  modified_base 10: mod_base = OTHER; note = 2'-fluorouridine-3'-phosphate
  modified_base 11: mod_base = OTHER; note = 2'-fluorouridine-3'-phosphate
  modified_base 12: mod_base = OTHER; note = 2'-O-methylcytidine-3'-phosphate
  modified_base 13: mod_base = OTHER; note = 2'-O-methylcytidine-3'-phosphate
  modified_base 14: mod_base = OTHER; note = 2'-O-methyluridine-3'-phosphate
  modified_base 15: mod_base = OTHER; note = 2'-O-methylcytidine-3'-phosphate
  modified_base 16: mod_base = OTHER; note = 2'-O-methyladenosine-3'-phosphate
  modified_base 17: mod_base = OTHER; note = 2'-O-methylcytidine-3'-phosphate
  modified_base 18: mod_base = OTHER; note = 2'-O-methylcytidine-3'-phosphate
  modified_base 19: mod_base = OTHER; note = 2'-O-methyluridine-3'-phosphorothioate
  modified_base 20: mod_base = OTHER; note = 2'-O-methylguanosine-3'-phosphorothioate
  modified_base 21: mod_base = OTHER; note = 2'-O-methyladenosine-3'-phosphate
gccttcttcttcctcacctga

SEQ ID NO: 3925 - RNA, 21 nt, synthetic construct
  source 1..21: mol_type = other RNA
  modified_base 1: mod_base = OTHER; note = 2'-O-methyluridine-3'-phosphorothioate
  modified_base 2: mod_base = OTHER; note = 2'-O-methyluridine-3'-phosphorothioate
  modified_base 3: mod_base = OTHER; note = 2'-O-methylguanosine-3'-phosphate
  modified_base 4: mod_base = OTHER; note = 2'-O-methyladenosine-3'-phosphate
  modified_base 5: mod_base = OTHER; note = 2'-O-methylguanosine-3'-phosphate
  modified_base 6: mod_base = OTHER; note (2R,3S,4S,5R)-5-(6-amino-9H-purin-9-yl)-4-(docosyloxy)-2-(h ydroxymethyl)tetrahydrofuran-3-ol
  modified_base 7: mod_base = OTHER; note = 2'-fluorouridine-3'-phosphate
  modified_base 8: mod_base = OTHER; note = 2'-O-methyluridine-3'-phosphate
  modified_base 9: mod_base = OTHER; note = 2'-fluoroguanosine-3'-phosphate
  modified_base 10: mod_base = OTHER; note = 2'-fluoroadenosine-3'-phosphate
  modified_base 11: mod_base = OTHER; note = 2'-fluoroadenosine-3'-phosphate
  modified_base 12: mod_base = OTHER; note = 2'-O-methyluridine-3'-phosphate
  modified_base 13: mod_base = OTHER; note = 2'-O-methylcytidine-3'-phosphate
  modified_base 14: mod_base = OTHER; note = 2'-O-methyladenosine-3'-phosphate
  modified_base 15: mod_base = OTHER; note = 2'-O-methylcytidine-3'-phosphate
  modified_base 16: mod_base = OTHER; note = 2'-O-methyladenosine-3'-phosphate
  modified_base 17: mod_base = OTHER; note = 2'-O-methyluridine-3'-phosphate
  modified_base 18: mod_base = OTHER; note = 2'-O-methyluridine-3'-phosphate
  modified_base 19: mod_base = OTHER; note = 2'-O-methyluridine-3'-phosphorothioate
  modified_base 20: mod_base = OTHER; note = 2'-O-methylcytidine-3'-phosphorothioate
  modified_base 21: mod_base = OTHER; note = 2'-O-methyladenosine-3'-phosphate
ttgagattgaatcacatttca

SEQ ID NO: 3926 - RNA, 21 nt, synthetic construct
  source 1..21: mol_type = other RNA
  modified_base 1: mod_base = OTHER; note = 2'-O-methylcytidine-3'-phosphorothioate
  modified_base 2: mod_base = OTHER; note = 2'-O-methyluridine-3'-phosphorothioate
  modified_base 3: mod_base = OTHER; note = 2'-O-methylguanosine-3'-phosphate
  modified_base 4: mod_base = OTHER; note = 2'-O-methyluridine-3'-phosphate
  modified_base 5: mod_base = OTHER; note = 2'-O-methyluridine-3'-phosphate
  modified_base 6: mod_base = OTHER; note 4-amino-1-((2R,3R,4R,5R)-3-(docosyloxy)-4-hydroxy-5-(hydrox ymethyl)tetrahydrofuran-2-yl)pyrimidin-2(1H)-one
  modified_base 7: mod_base = OTHER; note = 2'-fluoroadenosine-3'-phosphate
  modified_base 8: mod_base = OTHER; note = 2'-O-methylguanosine-3'-phosphate
  modified_base 9: mod_base = OTHER; note = 2'-fluorouridine-3'-phosphate
  modified_base 10: mod_base = OTHER; note = 2'-fluoroguanosine-3'-phosphate
  modified_base 11: mod_base = OTHER; note = 2'-fluorocytidine-3'-phosphate
  modified_base 12: mod_base = OTHER; note = 2'-O-methyluridine-3'-phosphate
  modified_base 13: mod_base = OTHER; note = 2'-O-methyladenosine-3'-phosphate
  modified_base 14: mod_base = OTHER; note = 2'-O-methyluridine-3'-phosphate
  modified_base 15: mod_base = OTHER; note = 2'-O-methyluridine-3'-phosphate
  modified_base 16: mod_base = OTHER; note = 2'-O-methylcytidine-3'-phosphate
  modified_base 17: mod_base = OTHER; note = 2'-O-methyluridine-3'-phosphate
  modified_base 18: mod_base = OTHER; note = 2'-O-methylcytidine-3'-phosphate
  modified_base 19: mod_base = OTHER; note = 2'-O-methylcytidine-3'-phosphorothioate
  modified_base 20: mod_base = OTHER; note = 2'-O-methylcytidine-3'-phosphorothioate
  modified_base 21: mod_base = OTHER; note = 2'-O-methyladenosine-3'-phosphate
ctgttcagtgctattctccca

SEQ ID NO: 3927 - RNA, 21 nt, synthetic construct
  source 1..21: mol_type = other RNA
  modified_base 1: mod_base = OTHER; note = 2'-O-methylcytidine-3'-phosphorothioate
  modified_base 2: mod_base = OTHER; note = 2'-O-methylcytidine-3'-phosphorothioate
  modified_base 3: mod_base = OTHER; note = 2'-O-methyluridine-3'-phosphate
  modified_base 4: mod_base = OTHER; note = 2'-O-methylguanosine-3'-phosphate
  modified_base 5: mod_base = OTHER; note = 2'-O-methylguanosine-3'-phosphate
  modified_base 6: mod_base = OTHER; note 4-amino-1-((2R,3R,4R,5R)-3-(docosyloxy)-4-hydroxy-5-(hydrox ymethyl)tetrahydrofuran-2-yl)pyrimidin-2(1H)-one
  modified_base 7: mod_base = OTHER; note = 2'-fluorouridine-3'-phosphate
  modified_base 8: mod_base = OTHER; note = 2'-O-methyluridine-3'-phosphate
  modified_base 9: mod_base = OTHER; note = 2'-fluoroadenosine-3'-phosphate
  modified_base 10: mod_base = OTHER; note = 2'-fluorocytidine-3'-phosphate
  modified_base 11: mod_base = OTHER; note = 2'-fluoroadenosine-3'-phosphate
  modified_base 12: mod_base = OTHER; note = 2'-O-methylguanosine-3'-phosphate
  modified_base 13: mod_base = OTHER; note = 2'-O-methylcytidine-3'-phosphate
  modified_base 14: mod_base = OTHER; note = 2'-O-methyladenosine-3'-phosphate
  modified_base 15: mod_base = OTHER; note = 2'-O-methylguanosine-3'-phosphate
  modified_base 16: mod_base = OTHER; note = 2'-O-methyladenosine-3'-phosphate
  modified_base 17: mod_base = OTHER; note = 2'-O-methyluridine-3'-phosphate
  modified_base 18: mod_base = OTHER; note = 2'-O-methylcytidine-3'-phosphate
  modified_base 19: mod_base = OTHER; note = 2'-O-methylcytidine-3'-phosphorothioate
  modified_base 20: mod_base = OTHER; note = 2'-O-methyladenosine-3'-phosphorothioate
  modified_base 21: mod_base = OTHER; note = 2'-O-methyladenosine-3'-phosphate
cctggcttacagcagatccaa

SEQ ID NO: 3928 - RNA, 21 nt, synthetic construct
  source 1..21: mol_type = other RNA
  modified_base 1: mod_base = OTHER; note = 2'-O-methylguanosine-3'-phosphorothioate
  modified_base 2: mod_base = OTHER; note = 2'-O-methyladenosine-3'-phosphorothioate
  modified_base 3: mod_base = OTHER; note = 2'-O-methylcytidine-3'-phosphate
  modified_base 4: mod_base = OTHER; note = 2'-O-methyladenosine-3'-phosphate
  modified_base 5: mod_base = OTHER; note = 2'-O-methylguanosine-3'-phosphate
  modified_base 6: mod_base = OTHER; note 4-amino-1-((2R,3R,4R,5R)-3-(docosyloxy)-4-hydroxy-5-(hydrox ymethyl)tetrahydrofuran-2-yl)pyrimidin-2(1H)-one
  modified_base 7: mod_base = OTHER; note = 2'-fluoroadenosine-3'-phosphate
  modified_base 8: mod_base = OTHER; note = 2'-O-methylguanosine-3'-phosphate
  modified_base 9: mod_base = OTHER; note = 2'-fluoroadenosine-3'-phosphate
  modified_base 10: mod_base = OTHER; note = 2'-fluoroadenosine-3'-phosphate
  modified_base 11: mod_base = OTHER; note = 2'-fluoroadenosine-3'-phosphate
  modified_base 12: mod_base = OTHER; note = 2'-O-methyladenosine-3'-phosphate
  modified_base 13: mod_base = OTHER; note = 2'-O-methyluridine-3'-phosphate
  modified_base 14: mod_base = OTHER; note = 2'-O-methyluridine-3'-phosphate
  modified_base 15: mod_base = OTHER; note = 2'-O-methyladenosine-3'-phosphate
  modified_base 16: mod_base = OTHER; note = 2'-O-methyluridine-3'-phosphate
  modified_base 17: mod_base = OTHER; note = 2'-O-methyluridine-3'-phosphate
  modified_base 18: mod_base = OTHER; note = 2'-O-methyluridine-3'-phosphate
  modified_base 19: mod_base = OTHER; note = 2'-O-methylcytidine-3'-phosphorothioate
  modified_base 20: mod_base = OTHER; note = 2'-O-methyladenosine-3'-phosphorothioate
  modified_base 21: mod_base = OTHER; note = 2'-O-methyladenosine-3'-phosphate
gacagcagaaaattatttcaa

SEQ ID NO: 3929 - RNA, 21 nt, synthetic construct
  source 1..21: mol_type = other RNA
  modified_base 1: mod_base = OTHER; note = 2'-O-methyluridine-3'-phosphorothioate
  modified_base 2: mod_base = OTHER; note = 2'-O-methyluridine-3'-phosphorothioate
  modified_base 3: mod_base = OTHER; note = 2'-O-methylguanosine-3'-phosphate
  modified_base 4: mod_base = OTHER; note = 2'-O-methylguanosine-3'-phosphate
  modified_base 5: mod_base = OTHER; note = 2'-O-methylguanosine-3'-phosphate
  modified_base 6: mod_base = OTHER; note 1-((2R,3R,4R,5R)-3-(docosyloxy)-4-hydroxy-5-(hydroxymethyl) tetrahydrofuran-2-yl)pyrimidine-2,4(1H,3H)-dione
  modified_base 7: mod_base = OTHER; note = 2'-fluorouridine-3'-phosphate
  modified_base 8: mod_base = OTHER; note = 2'-O-methyluridine-3'-phosphate
  modified_base 9: mod_base = OTHER; note = 2'-fluorocytidine-3'-phosphate
  modified_base 10: mod_base = OTHER; note = 2'-fluorouridine-3'-phosphate
  modified_base 11: mod_base = OTHER; note = 2'-fluorouridine-3'-phosphate
  modified_base 12: mod_base = OTHER; note = 2'-O-methyluridine-3'-phosphate
  modified_base 13: mod_base = OTHER; note = 2'-O-methyladenosine-3'-phosphate
  modified_base 14: mod_base = OTHER; note = 2'-O-methylguanosine-3'-phosphate
  modified_base 15: mod_base = OTHER; note = 2'-O-methyluridine-3'-phosphate
  modified_base 16: mod_base = OTHER; note = 2'-O-methyluridine-3'-phosphate
  modified_base 17: mod_base = OTHER; note = 2'-O-methyluridine-3'-phosphate
  modified_base 18: mod_base = OTHER; note = 2'-O-methyladenosine-3'-phosphate
  modified_base 19: mod_base = OTHER; note = 2'-O-methyluridine-3'-phosphorothioate
  modified_base 20: mod_base = OTHER; note = 2'-O-methylguanosine-3'-phosphorothioate
  modified_base 21: mod_base = OTHER; note = 2'-O-methyladenosine-3'-phosphate
ttgggtttctttagtttatga

SEQ ID NO: 3930 - RNA, 21 nt, synthetic construct
  source 1..21: mol_type = other RNA
  modified_base 1: mod_base = OTHER; note = 2'-O-methylcytidine-3'-phosphorothioate
  modified_base 2: mod_base = OTHER; note = 2'-O-methyladenosine-3'-phosphorothioate
  modified_base 3: mod_base = OTHER; note = 2'-O-methylcytidine-3'-phosphate
  modified_base 4: mod_base = OTHER; note = 2'-O-methylcytidine-3'-phosphate
  modified_base 5: mod_base = OTHER; note = 2'-O-methyladenosine-3'-phosphate
  modified_base 6: mod_base = OTHER; note 1-((2R,3R,4R,5R)-3-(docosyloxy)-4-hydroxy-5-(hydroxymethyl) tetrahydrofuran-2-yl)pyrimidine-2,4(1H,3H)-dione
  modified_base 7: mod_base = OTHER; note = 2'-fluoroguanosine-3'-phosphate
  modified_base 8: mod_base = OTHER; note = 2'-O-methyluridine-3'-phosphate
  modified_base 9: mod_base = OTHER; note = 2'-fluoroadenosine-3'-phosphate
  modified_base 10: mod_base = OTHER; note = 2'-fluoroguanosine-3'-phosphate
  modified_base 11: mod_base = OTHER; note = 2'-fluoroguanosine-3'-phosphate
  modified_base 12: mod_base = OTHER; note = 2'-O-methyluridine-3'-phosphate
  modified_base 13: mod_base = OTHER; note = 2'-O-methylcytidine-3'-phosphate
  modified_base 14: mod_base = OTHER; note = 2'-O-methyluridine-3'-phosphate
  modified_base 15: mod_base = OTHER; note = 2'-O-methylcytidine-3'-phosphate
  modified_base 16: mod_base = OTHER; note = 2'-O-methyladenosine-3'-phosphate
  modified_base 17: mod_base = OTHER; note = 2'-O-methylguanosine-3'-phosphate
  modified_base 18: mod_base = OTHER; note = 2'-O-methyladenosine-3'-phosphate
  modified_base 19: mod_base = OTHER; note = 2'-O-methyladenosine-3'-phosphorothioate
  modified_base 20: mod_base = OTHER; note = 2'-O-methylguanosine-3'-phosphorothioate
  modified_base 21: mod_base = OTHER; note = 2'-O-methyladenosine-3'-phosphate
caccatgtaggtctcagaaga

SEQ ID NO: 3931 - RNA, 21 nt, synthetic construct
  source 1..21: mol_type = other RNA
  modified_base 1: mod_base = OTHER; note = 2'-O-methylguanosine-3'-phosphorothioate
  modified_base 2: mod_base = OTHER; note = 2'-O-methyluridine-3'-phosphorothioate
  modified_base 3: mod_base = OTHER; note = 2'-O-methyluridine-3'-phosphate
  modified_base 4: mod_base = OTHER; note = 2'-O-methylguanosine-3'-phosphate
  modified_base 5: mod_base = OTHER; note = 2'-O-methyluridine-3'-phosphate
  modified_base 6: mod_base = OTHER; note 2-amino-9-((2R,3S,4S,5R)-3-(docosyloxy)-4-hydroxy-5-(hydrox ymethyl)tetrahydrofuran-2-yl)-1,9-dihydro-6H-purin-6-one
  modified_base 7: mod_base = OTHER; note = 2'-fluoroguanosine-3'-phosphate
  modified_base 8: mod_base = OTHER; note = 2'-O-methyladenosine-3'-phosphate
  modified_base 9: mod_base = OTHER; note = 2'-fluoroadenosine-3'-phosphate
  modified_base 10: mod_base = OTHER; note = 2'-fluorocytidine-3'-phosphate
  modified_base 11: mod_base = OTHER; note = 2'-fluoroadenosine-3'-phosphate
  modified_base 12: mod_base = OTHER; note = 2'-O-methylguanosine-3'-phosphate
  modified_base 13: mod_base = OTHER; note = 2'-O-methylguanosine-3'-phosphate
  modified_base 14: mod_base = OTHER; note = 2'-O-methyladenosine-3'-phosphate
  modified_base 15: mod_base = OTHER; note = 2'-O-methyladenosine-3'-phosphate
  modified_base 16: mod_base = OTHER; note = 2'-O-methyladenosine-3'-phosphate
  modified_base 17: mod_base = OTHER; note = 2'-O-methyluridine-3'-phosphate
  modified_base 18: mod_base = OTHER; note = 2'-O-methylguanosine-3'-phosphate
  modified_base 19: mod_base = OTHER; note = 2'-O-methyladenosine-3'-phosphorothioate
  modified_base 20: mod_base = OTHER; note = 2'-O-methyladenosine-3'-phosphorothioate
  modified_base 21: mod_base = OTHER; note = 2'-O-methyladenosine-3'-phosphate
gttgtggaacaggaaatgaaa

SEQ ID NO: 3932 - RNA, 21 nt, synthetic construct
  source 1..21: mol_type = other RNA
  modified_base 1: mod_base = OTHER; note = 2'-O-methylguanosine-3'-phosphorothioate
  modified_base 2: mod_base = OTHER; note = 2'-O-methylguanosine-3'-phosphorothioate
  modified_base 3: mod_base = OTHER; note = 2'-O-methyladenosine-3'-phosphate
  modified_base 4: mod_base = OTHER; note = 2'-O-methylguanosine-3'-phosphate
  modified_base 5: mod_base = OTHER; note = 2'-O-methyladenosine-3'-phosphate
  modified_base 6: mod_base = OTHER; note (2R,3S,4S,5R)-5-(6-amino-9H-purin-9-yl)-4-(docosyloxy)-2-(h ydroxymethyl)tetrahydrofuran-3-ol
  modified_base 7: mod_base = OTHER; note = 2'-fluorocytidine-3'-phosphate
  modified_base 8: mod_base = OTHER; note = 2'-O-methyladenosine-3'-phosphate
  modified_base 9: mod_base = OTHER; note = 2'-fluorouridine-3'-phosphate
  modified_base 10: mod_base = OTHER; note = 2'-fluoroadenosine-3'-phosphate
  modified_base 11: mod_base = OTHER; note = 2'-fluorouridine-3'-phosphate
  modified_base 12: mod_base = OTHER; note = 2'-O-methylcytidine-3'-phosphate
  modified_base 13: mod_base = OTHER; note = 2'-O-methyladenosine-3'-phosphate
  modified_base 14: mod_base = OTHER; note = 2'-O-methyluridine-3'-phosphate
  modified_base 15: mod_base = OTHER; note = 2'-O-methyladenosine-3'-phosphate
  modified_base 16: mod_base = OTHER; note = 2'-O-methyluridine-3'-phosphate
  modified_base 17: mod_base = OTHER; note = 2'-O-methyluridine-3'-phosphate
  modified_base 18: mod_base = OTHER; note = 2'-O-methyluridine-3'-phosphate
  modified_base 19: mod_base = OTHER; note = 2'-O-methyluridine-3'-phosphorothioate
  modified_base 20: mod_base = OTHER; note = 2'-O-methylguanosine-3'-phosphorothioate
  modified_base 21: mod_base = OTHER; note = 2'-O-methyladenosine-3'-phosphate
ggagaacatatcatattttga

SEQ ID NO: 3933 - RNA, 21 nt, synthetic construct
  source 1..21: mol_type = other RNA
  modified_base 1: mod_base = OTHER; note = 2'-O-methylcytidine-3'-phosphorothioate
  modified_base 2: mod_base = OTHER; note = 2'-O-methyladenosine-3'-phosphorothioate
  modified_base 3: mod_base = OTHER; note = 2'-O-methylguanosine-3'-phosphate
  modified_base 4: mod_base = OTHER; note = 2'-O-methylcytidine-3'-phosphate
  modified_base 5: mod_base = OTHER; note = 2'-O-methylcytidine-3'-phosphate
  modified_base 6: mod_base = OTHER; note (2R,3S,4S,5R)-5-(6-amino-9H-purin-9-yl)-4-(docosyloxy)-2-(h ydroxymethyl)tetrahydrofuran-3-ol
  modified_base 7: mod_base = OTHER; note = 2'-fluoroadenosine-3'-phosphate
  modified_base 8: mod_base = OTHER; note = 2'-O-methyladenosine-3'-phosphate
  modified_base 9: mod_base = OTHER; note = 2'-fluoroadenosine-3'-phosphate
  modified_base 10: mod_base = OTHER; note = 2'-fluorouridine-3'-phosphate
  modified_base 11: mod_base = OTHER; note = 2'-fluoroguanosine-3'-phosphate
  modified_base 12: mod_base = OTHER; note = 2'-O-methyladenosine-3'-phosphate
  modified_base 13: mod_base = OTHER; note = 2'-O-methyluridine-3'-phosphate
  modified_base 14: mod_base = OTHER; note = 2'-O-methylguanosine-3'-phosphate
  modified_base 15: mod_base = OTHER; note = 2'-O-methylguanosine-3'-phosphate
  modified_base 16: mod_base = OTHER; note = 2'-O-methylcytidine-3'-phosphate
  modified_base 17: mod_base = OTHER; note = 2'-O-methyladenosine-3'-phosphate
  modified_base 18: mod_base = OTHER; note = 2'-O-methyladenosine-3'-phosphate
  modified_base 19: mod_base = OTHER; note = 2'-O-methyladenosine-3'-phosphorothioate
  modified_base 20: mod_base = OTHER; note = 2'-O-methyladenosine-3'-phosphorothioate
  modified_base 21: mod_base = OTHER; note = 2'-O-methyladenosine-3'-phosphate
cagccaaaatgatggcaaaaa

SEQ ID NO: 3934 - RNA, 21 nt, synthetic construct
  source 1..21: mol_type = other RNA
  modified_base 1: mod_base = OTHER; note = 2'-O-methylcytidine-3'-phosphorothioate
  modified_base 2: mod_base = OTHER; note = 2'-O-methylcytidine-3'-phosphorothioate
  modified_base 3: mod_base = OTHER; note = 2'-O-methyladenosine-3'-phosphate
  modified_base 4: mod_base = OTHER; note = 2'-O-methyladenosine-3'-phosphate
  modified_base 5: mod_base = OTHER; note = 2'-O-methyluridine-3'-phosphate
  modified_base 6: mod_base = OTHER; note 1-((2R,3R,4R,5R)-3-(docosyloxy)-4-hydroxy-5-(hydroxymethyl) tetrahydrofuran-2-yl)pyrimidine-2,4(1H,3H)-dione
  modified_base 7: mod_base = OTHER; note = 2'-fluorouridine-3'-phosphate
  modified_base 8: mod_base = OTHER; note = 2'-O-methyluridine-3'-phosphate
  modified_base 9: mod_base = OTHER; note = 2'-fluorouridine-3'-phosphate
  modified_base 10: mod_base = OTHER; note = 2'-fluoroguanosine-3'-phosphate
  modified_base 11: mod_base = OTHER; note = 2'-fluoroadenosine-3'-phosphate
  modified_base 12: mod_base = OTHER; note = 2'-O-methyladenosine-3'-phosphate
  modified_base 13: mod_base = OTHER; note = 2'-O-methylcytidine-3'-phosphate
  modified_base 14: mod_base = OTHER; note = 2'-O-methyluridine-3'-phosphate
  modified_base 15: mod_base = OTHER; note = 2'-O-methyluridine-3'-phosphate
  modified_base 16: mod_base = OTHER; note = 2'-O-methylguanosine-3'-phosphate
  modified_base 17: mod_base = OTHER; note = 2'-O-methyluridine-3'-phosphate
  modified_base 18: mod_base = OTHER; note = 2'-O-methyladenosine-3'-phosphate
  modified_base 19: mod_base = OTHER; note = 2'-O-methylguanosine-3'-phosphorothioate
  modified_base 20: mod_base = OTHER; note = 2'-O-methyladenosine-3'-phosphorothioate
  modified_base 21: mod_base = OTHER; note = 2'-O-methyladenosine-3'-phosphate
ccaatttttgaacttgtagaa

SEQ ID NO: 3935 - RNA, 21 nt, synthetic construct
  source 1..21: mol_type = other RNA
  modified_base 1: mod_base = OTHER; note = 2'-O-methyladenosine-3'-phosphorothioate
  modified_base 2: mod_base = OTHER; note = 2'-O-methyluridine-3'-phosphorothioate
  modified_base 3: mod_base = OTHER; note = 2'-O-methyladenosine-3'-phosphate
  modified_base 4: mod_base = OTHER; note = 2'-O-methylguanosine-3'-phosphate
  modified_base 5: mod_base = OTHER; note = 2'-O-methylguanosine-3'-phosphate
  modified_base 6: mod_base = OTHER; note (2R,3S,4S,5R)-5-(6-amino-9H-purin-9-yl)-4-(docosyloxy)-2-(h ydroxymethyl)tetrahydrofuran-3-ol
  modified_base 7: mod_base = OTHER; note = 2'-fluoroadenosine-3'-phosphate
  modified_base 8: mod_base = OTHER; note = 2'-O-methyluridine-3'-phosphate
  modified_base 9: mod_base = OTHER; note = 2'-fluoroadenosine-3'-phosphate
  modified_base 10: mod_base = OTHER; note = 2'-fluoroguanosine-3'-phosphate
  modified_base 11: mod_base = OTHER; note = 2'-fluorouridine-3'-phosphate
  modified_base 12: mod_base = OTHER; note = 2'-O-methyluridine-3'-phosphate
  modified_base 13: mod_base = OTHER; note = 2'-O-methyluridine-3'-phosphate
  modified_base 14: mod_base = OTHER; note = 2'-O-methylguanosine-3'-phosphate
  modified_base 15: mod_base = OTHER; note = 2'-O-methylcytidine-3'-phosphate
  modified_base 16: mod_base = OTHER; note = 2'-O-methylcytidine-3'-phosphate
  modified_base 17: mod_base = OTHER; note = 2'-O-methyladenosine-3'-phosphate
  modified_base 18: mod_base = OTHER; note = 2'-O-methyladenosine-3'-phosphate
  modified_base 19: mod_base = OTHER; note = 2'-O-methylcytidine-3'-phosphorothioate
  modified_base 20: mod_base = OTHER; note = 2'-O-methyluridine-3'-phosphorothioate
  modified_base 21: mod_base = OTHER; note = 2'-O-methyladenosine-3'-phosphate
ataggaatagtttgccaacta

SEQ ID NO: 3936 - RNA, 21 nt, synthetic construct
  source 1..21: mol_type = other RNA
  modified_base 1: mod_base = OTHER; note = 2'-O-methyluridine-3'-phosphorothioate
  modified_base 2: mod_base = OTHER; note = 2'-O-methyluridine-3'-phosphorothioate
  modified_base 3: mod_base = OTHER; note = 2'-O-methyluridine-3'-phosphate
  modified_base 4: mod_base = OTHER; note = 2'-O-methylguanosine-3'-phosphate
  modified_base 5: mod_base = OTHER; note = 2'-O-methyladenosine-3'-phosphate
  modified_base 6: mod_base = OTHER; note (2R,3S,4S,5R)-5-(6-amino-9H-purin-9-yl)-4-(docosyloxy)-2-(h ydroxymethyl)tetrahydrofuran-3-ol
  modified_base 7: mod_base = OTHER; note = 2'-fluorouridine-3'-phosphate
  modified_base 8: mod_base = OTHER; note = 2'-O-methylguanosine-3'-phosphate
  modified_base 9: mod_base = OTHER; note = 2'-fluorouridine-3'-phosphate
  modified_base 10: mod_base = OTHER; note = 2'-fluorouridine-3'-phosphate
  modified_base 11: mod_base = OTHER; note = 2'-fluorouridine-3'-phosphate
  modified_base 12: mod_base = OTHER; note = 2'-O-methyluridine-3'-phosphate
  modified_base 13: mod_base = OTHER; note = 2'-O-methylguanosine-3'-phosphate
  modified_base 14: mod_base = OTHER; note = 2'-O-methylguanosine-3'-phosphate
  modified_base 15: mod_base = OTHER; note = 2'-O-methyladenosine-3'-phosphate
  modified_base 16: mod_base = OTHER; note = 2'-O-methylguanosine-3'-phosphate
  modified_base 17: mod_base = OTHER; note = 2'-O-methyladenosine-3'-phosphate
  modified_base 18: mod_base = OTHER; note = 2'-O-methyladenosine-3'-phosphate
  modified_base 19: mod_base = OTHER; note = 2'-O-methyladenosine-3'-phosphorothioate
  modified_base 20: mod_base = OTHER; note = 2'-O-methyladenosine-3'-phosphorothioate
  modified_base 21: mod_base = OTHER; note = 2'-O-methyladenosine-3'-phosphate
tttgaatgttttggagaaaaa

SEQ ID NO: 3937 - RNA, 21 nt, synthetic construct
  source 1..21: mol_type = other RNA
  modified_base 1: mod_base = OTHER; note = 2'-O-methylguanosine-3'-phosphorothioate
  modified_base 2: mod_base = OTHER; note = 2'-O-methyluridine-3'-phosphorothioate
  modified_base 3: mod_base = OTHER; note = 2'-O-methylcytidine-3'-phosphate
  modified_base 4: mod_base = OTHER; note = 2'-O-methyladenosine-3'-phosphate
  modified_base 5: mod_base = OTHER; note = 2'-O-methyladenosine-3'-phosphate
  modified_base 6: mod_base = OTHER; note 1-((2R,3R,4R,5R)-3-(docosyloxy)-4-hydroxy-5-(hydroxymethyl) tetrahydrofuran-2-yl)pyrimidine-2,4(1H,3H)-dione
  modified_base 7: mod_base = OTHER; note = 2'-fluoroadenosine-3'-phosphate
  modified_base 8: mod_base = OTHER; note = 2'-O-methyluridine-3'-phosphate
  modified_base 9: mod_base = OTHER; note = 2'-fluorouridine-3'-phosphate
  modified_base 10: mod_base = OTHER; note = 2'-fluorouridine-3'-phosphate
  modified_base 11: mod_base = OTHER; note = 2'-fluoroadenosine-3'-phosphate
  modified_base 12: mod_base = OTHER; note = 2'-O-methyladenosine-3'-phosphate
  modified_base 13: mod_base = OTHER; note = 2'-O-methyluridine-3'-phosphate
  modified_base 14: mod_base = OTHER; note = 2'-O-methylguanosine-3'-phosphate
  modified_base 15: mod_base = OTHER; note = 2'-O-methyladenosine-3'-phosphate
  modified_base 16: mod_base = OTHER; note = 2'-O-methyladenosine-3'-phosphate
  modified_base 17: mod_base = OTHER; note = 2'-O-methyluridine-3'-phosphate
  modified_base 18: mod_base = OTHER; note = 2'-O-methylcytidine-3'-phosphate
  modified_base 19: mod_base = OTHER; note = 2'-O-methyladenosine-3'-phosphorothioate
  modified_base 20: mod_base = OTHER; note = 2'-O-methylcytidine-3'-phosphorothioate
  modified_base 21: mod_base = OTHER; note = 2'-O-methyladenosine-3'-phosphate
gtcaatatttaatgaatcaca

SEQ ID NO: 3938 - RNA, 21 nt, synthetic construct
  source 1..21: mol_type = other RNA
  modified_base 1: mod_base = OTHER; note = 2'-O-methyluridine-3'-phosphorothioate
  modified_base 2: mod_base = OTHER; note = 2'-O-methylguanosine-3'-phosphorothioate
  modified_base 3: mod_base = OTHER; note = 2'-O-methyladenosine-3'-phosphate
  modified_base 4: mod_base = OTHER; note = 2'-O-methylguanosine-3'-phosphate
  modified_base 5: mod_base = OTHER; note = 2'-O-methyladenosine-3'-phosphate
  modified_base 6: mod_base = OTHER; note (2R,3S,4S,5R)-5-(6-amino-9H-purin-9-yl)-4-(docosyloxy)-2-(h ydroxymethyl)tetrahydrofuran-3-ol
  modified_base 7: mod_base = OTHER; note = 2'-fluorouridine-3'-phosphate
  modified_base 8: mod_base = OTHER; note = 2'-O-methyladenosine-3'-phosphate
  modified_base 9: mod_base = OTHER; note = 2'-fluorouridine-3'-phosphate
  modified_base 10: mod_base = OTHER; note = 2'-fluoroadenosine-3'-phosphate
  modified_base 11: mod_base = OTHER; note = 2'-fluorouridine-3'-phosphate
  modified_base 12: mod_base = OTHER; note = 2'-O-methyluridine-3'-phosphate
  modified_base 13: mod_base = OTHER; note = 2'-O-methyladenosine-3'-phosphate
  modified_base 14: mod_base = OTHER; note = 2'-O-methyladenosine-3'-phosphate
  modified_base 15: mod_base = OTHER; note = 2'-O-methyladenosine-3'-phosphate
  modified_base 16: mod_base = OTHER; note = 2'-O-methyluridine-3'-phosphate
  modified_base 17: mod_base = OTHER; note = 2'-O-methylguanosine-3'-phosphate
  modified_base 18: mod_base = OTHER; note = 2'-O-methylcytidine-3'-phosphate
  modified_base 19: mod_base = OTHER; note = 2'-O-methyladenosine-3'-phosphorothioate
  modified_base 20: mod_base = OTHER; note = 2'-O-methylcytidine-3'-phosphorothioate
  modified_base 21: mod_base = OTHER; note = 2'-O-methyladenosine-3'-phosphate
tgagaatatattaaatgcaca

SEQ ID NO: 3939 - RNA, 21 nt, synthetic construct
  source 1..21: mol_type = other RNA
  modified_base 1: mod_base = OTHER; note = 2'-O-methyluridine-3'-phosphorothioate
  modified_base 2: mod_base = OTHER; note = 2'-O-methyladenosine-3'-phosphorothioate
  modified_base 3: mod_base = OTHER; note = 2'-O-methyladenosine-3'-phosphate
  modified_base 4: mod_base = OTHER; note = 2'-O-methylcytidine-3'-phosphate
  modified_base 5: mod_base = OTHER; note = 2'-O-methyladenosine-3'-phosphate
  modified_base 6: mod_base = OTHER; note (2R,3S,4S,5R)-5-(6-amino-9H-purin-9-yl)-4-(docosyloxy)-2-(h ydroxymethyl)tetrahydrofuran-3-ol
  modified_base 7: mod_base = OTHER; note = 2'-fluoroguanosine-3'-phosphate
  modified_base 8: mod_base = OTHER; note = 2'-O-methylguanosine-3'-phosphate
  modified_base 9: mod_base = OTHER; note = 2'-fluoroguanosine-3'-phosphate
  modified_base 10: mod_base = OTHER; note = 2'-fluoroadenosine-3'-phosphate
  modified_base 11: mod_base = OTHER; note = 2'-fluorocytidine-3'-phosphate
  modified_base 12: mod_base = OTHER; note = 2'-O-methyluridine-3'-phosphate
  modified_base 13: mod_base = OTHER; note = 2'-O-methyladenosine-3'-phosphate
  modified_base 14: mod_base = OTHER; note = 2'-O-methyladenosine-3'-phosphate
  modified_base 15: mod_base = OTHER; note = 2'-O-methyladenosine-3'-phosphate
  modified_base 16: mod_base = OTHER; note = 2'-O-methyluridine-3'-phosphate
  modified_base 17: mod_base = OTHER; note = 2'-O-methyladenosine-3'-phosphate
  modified_base 18: mod_base = OTHER; note = 2'-O-methylguanosine-3'-phosphate
  modified_base 19: mod_base = OTHER; note = 2'-O-methylguanosine-3'-phosphorothioate
  modified_base 20: mod_base = OTHER; note = 2'-O-methyladenosine-3'-phosphorothioate
  modified_base 21: mod_base = OTHER; note = 2'-O-methyladenosine-3'-phosphate
taacaagggactaaataggaa

SEQ ID NO: 3940 - RNA, 21 nt, synthetic construct
  source 1..21: mol_type = other RNA
  modified_base 1: mod_base = OTHER; note = 2'-O-methylguanosine-3'-phosphorothioate
  modified_base 2: mod_base = OTHER; note = 2'-O-methylguanosine-3'-phosphorothioate
  modified_base 3: mod_base = OTHER; note = 2'-O-methylcytidine-3'-phosphate
  modified_base 4: mod_base = OTHER; note = 2'-O-methyluridine-3'-phosphate
  modified_base 5: mod_base = OTHER; note = 2'-O-methyluridine-3'-phosphate
  modified_base 6: mod_base = OTHER; note 4-amino-1-((2R,3R,4R,5R)-3-(docosyloxy)-4-hydroxy-5-(hydrox ymethyl)tetrahydrofuran-2-yl)pyrimidin-2(1H)-one
  modified_base 7: mod_base = OTHER; note = 2'-fluorouridine-3'-phosphate
  modified_base 8: mod_base = OTHER; note = 2'-O-methyluridine-3'-phosphate
  modified_base 9: mod_base = OTHER; note = 2'-fluorocytidine-3'-phosphate
  modified_base 10: mod_base = OTHER; note = 2'-fluorouridine-3'-phosphate
  modified_base 11: mod_base = OTHER; note = 2'-fluorouridine-3'-phosphate
  modified_base 12: mod_base = OTHER; note = 2'-O-methylcytidine-3'-phosphate
  modified_base 13: mod_base = OTHER; note = 2'-O-methylcytidine-3'-phosphate
  modified_base 14: mod_base = OTHER; note = 2'-O-methyladenosine-3'-phosphate
  modified_base 15: mod_base = OTHER; note = 2'-O-methylcytidine-3'-phosphate
  modified_base 16: mod_base = OTHER; note = 2'-O-methylcytidine-3'-phosphate
  modified_base 17: mod_base = OTHER; note = 2'-O-methyluridine-3'-phosphate
  modified_base 18: mod_base = OTHER; note = 2'-O-methylcytidine-3'-phosphate
  modified_base 19: mod_base = OTHER; note = 2'-O-methyluridine-3'-phosphorothioate
  modified_base 20: mod_base = OTHER; note = 2'-O-methylguanosine-3'-phosphorothioate
  modified_base 21: mod_base = OTHER; note = 2'-O-methyladenosine-3'-phosphate
ggcttcttcttccacctctga

SEQ ID NO: 3941 - RNA, 21 nt, synthetic construct
  source 1..21: mol_type = other RNA
  modified_base 1: mod_base = OTHER; note = 2'-O-methyluridine-3'-phosphorothioate
  modified_base 2: mod_base = OTHER; note = 2'-O-methyluridine-3'-phosphorothioate
  modified_base 3: mod_base = OTHER; note = 2'-O-methylguanosine-3'-phosphate
  modified_base 4: mod_base = OTHER; note = 2'-O-methylguanosine-3'-phosphate
  modified_base 5: mod_base = OTHER; note = 2'-O-methyladenosine-3'-phosphate
  modified_base 6: mod_base = OTHER; note (2R,3S,4S,5R)-5-(6-amino-9H-purin-9-yl)-4-(docosyloxy)-2-(h ydroxymethyl)tetrahydrofuran-3-ol
  modified_base 7: mod_base = OTHER; note = 2'-fluorocytidine-3'-phosphate
  modified_base 8: mod_base = OTHER; note = 2'-O-methyladenosine-3'-phosphate
  modified_base 9: mod_base = OTHER; note = 2'-fluorouridine-3'-phosphate
  modified_base 10: mod_base = OTHER; note = 2'-fluoroguanosine-3'-phosphate
  modified_base 11: mod_base = OTHER; note = 2'-fluorouridine-3'-phosphate
  modified_base 12: mod_base = OTHER; note = 2'-O-methylguanosine-3'-phosphate
  modified_base 13: mod_base = OTHER; note = 2'-O-methylguanosine-3'-phosphate
  modified_base 14: mod_base = OTHER; note = 2'-O-methyluridine-3'-phosphate
  modified_base 15: mod_base = OTHER; note = 2'-O-methyluridine-3'-phosphate
  modified_base 16: mod_base = OTHER; note = 2'-O-methyladenosine-3'-phosphate
  modified_base 17: mod_base = OTHER; note = 2'-O-methyluridine-3'-phosphate
  modified_base 18: mod_base = OTHER; note = 2'-O-methylcytidine-3'-phosphate
  modified_base 19: mod_base = OTHER; note = 2'-O-methyluridine-3'-phosphorothioate
  modified_base 20: mod_base = OTHER; note = 2'-O-methyluridine-3'-phosphorothioate
  modified_base 21: mod_base = OTHER; note = 2'-O-methyladenosine-3'-phosphate
ttggaacatgtggttatctta

SEQ ID NO: 3942 - RNA, 21 nt, synthetic construct
  source 1..21: mol_type = other RNA
  modified_base 1: mod_base = OTHER; note = 2'-O-methylcytidine-3'-phosphorothioate
  modified_base 2: mod_base = OTHER; note = 2'-O-methyladenosine-3'-phosphorothioate
  modified_base 3: mod_base = OTHER; note = 2'-O-methylguanosine-3'-phosphate
  modified_base 4: mod_base = OTHER; note = 2'-O-methyladenosine-3'-phosphate
  modified_base 5: mod_base = OTHER; note = 2'-O-methylguanosine-3'-phosphate
  modified_base 6: mod_base = OTHER; note (2R,3S,4S,5R)-5-(6-amino-9H-purin-9-yl)-4-(docosyloxy)-2-(h ydroxymethyl)tetrahydrofuran-3-ol
  modified_base 7: mod_base = OTHER; note = 2'-fluoroadenosine-3'-phosphate
  modified_base 8: mod_base = OTHER; note = 2'-O-methylcytidine-3'-phosphate
  modified_base 9: mod_base = OTHER; note = 2'-fluoroadenosine-3'-phosphate
  modified_base 10: mod_base = OTHER; note = 2'-fluoroguanosine-3'-phosphate
  modified_base 11: mod_base = OTHER; note = 2'-fluoroadenosine-3'-phosphate
  modified_base 12: mod_base = OTHER; note = 2'-O-methyluridine-3'-phosphate
  modified_base 13: mod_base = OTHER; note = 2'-O-methylguanosine-3'-phosphate
  modified_base 14: mod_base = OTHER; note = 2'-O-methyladenosine-3'-phosphate
  modified_base 15: mod_base = OTHER; note = 2'-O-methyluridine-3'-phosphate
  modified_base 16: mod_base = OTHER; note = 2'-O-methyluridine-3'-phosphate
  modified_base 17: mod_base = OTHER; note = 2'-O-methylcytidine-3'-phosphate
  modified_base 18: mod_base = OTHER; note = 2'-O-methyluridine-3'-phosphate
  modified_base 19: mod_base = OTHER; note = 2'-O-methyluridine-3'-phosphorothioate
  modified_base 20: mod_base = OTHER; note = 2'-O-methyluridine-3'-phosphorothioate
  modified_base 21: mod_base = OTHER; note = 2'-O-methyladenosine-3'-phosphate
cagagaacagatgattcttta

SEQ ID NO: 3943 - RNA, 21 nt, synthetic construct
  source 1..21: mol_type = other RNA
  modified_base 1: mod_base = OTHER; note = 2'-O-methylcytidine-3'-phosphorothioate
  modified_base 2: mod_base = OTHER; note = 2'-O-methyluridine-3'-phosphorothioate
  modified_base 3: mod_base = OTHER; note = 2'-O-methylguanosine-3'-phosphate
  modified_base 4: mod_base = OTHER; note = 2'-O-methyluridine-3'-phosphate
  modified_base 5: mod_base = OTHER; note = 2'-O-methyluridine-3'-phosphate
  modified_base 6: mod_base = OTHER; note (2R,3S,4S,5R)-5-(6-amino-9H-purin-9-yl)-4-(docosyloxy)-2-(h ydroxymethyl)tetrahydrofuran-3-ol
  modified_base 7: mod_base = OTHER; note = 2'-fluorouridine-3'-phosphate
  modified_base 8: mod_base = OTHER; note = 2'-O-methyluridine-3'-phosphate
  modified_base 9: mod_base = OTHER; note = 2'-fluorouridine-3'-phosphate
  modified_base 10: mod_base = OTHER; note = 2'-fluorouridine-3'-phosphate
  modified_base 11: mod_base = OTHER; note = 2'-fluoroadenosine-3'-phosphate
  modified_base 12: mod_base = OTHER; note = 2'-O-methyluridine-3'-phosphate
  modified_base 13: mod_base = OTHER; note = 2'-O-methyluridine-3'-phosphate
  modified_base 14: mod_base = OTHER; note = 2'-O-methylguanosine-3'-phosphate
  modified_base 15: mod_base = OTHER; note = 2'-O-methylguanosine-3'-phosphate
  modified_base 16: mod_base = OTHER; note = 2'-O-methylguanosine-3'-phosphate
  modified_base 17: mod_base = OTHER; note = 2'-O-methyluridine-3'-phosphate
  modified_base 18: mod_base = OTHER; note = 2'-O-methyluridine-3'-phosphate
  modified_base 19: mod_base = OTHER; note = 2'-O-methyluridine-3'-phosphorothioate
  modified_base 20: mod_base = OTHER; note = 2'-O-methyluridine-3'-phosphorothioate
  modified_base 21: mod_base = OTHER; note = 2'-O-methyladenosine-3'-phosphate
ctgttattttattgggtttta

SEQ ID NO: 3944 - RNA, 21 nt, synthetic construct
  source 1..21: mol_type = other RNA
  modified_base 1: mod_base = OTHER; note = 2'-O-methyladenosine-3'-phosphorothioate
  modified_base 2: mod_base = OTHER; note = 2'-O-methyluridine-3'-phosphorothioate
  modified_base 3: mod_base = OTHER; note = 2'-O-methylguanosine-3'-phosphate
  modified_base 4: mod_base = OTHER; note = 2'-O-methyladenosine-3'-phosphate
  modified_base 5: mod_base = OTHER; note = 2'-O-methyladenosine-3'-phosphate
  modified_base 6: mod_base = OTHER; note 2-amino-9-((2R,3S,4S,5R)-3-(docosyloxy)-4-hydroxy-5-(hydrox ymethyl)tetrahydrofuran-2-yl)-1,9-dihydro-6H-purin-6-one
  modified_base 7: mod_base = OTHER; note = 2'-fluoroadenosine-3'-phosphate
  modified_base 8: mod_base = OTHER; note = 2'-O-methyladenosine-3'-phosphate
  modified_base 9: mod_base = OTHER; note = 2'-fluoroguanosine-3'-phosphate
  modified_base 10: mod_base = OTHER; note = 2'-fluorocytidine-3'-phosphate
  modified_base 11: mod_base = OTHER; note = 2'-fluoroadenosine-3'-phosphate
  modified_base 12: mod_base = OTHER; note = 2'-O-methyladenosine-3'-phosphate
  modified_base 13: mod_base = OTHER; note = 2'-O-methyladenosine-3'-phosphate
  modified_base 14: mod_base = OTHER; note = 2'-O-methyluridine-3'-phosphate
  modified_base 15: mod_base = OTHER; note = 2'-O-methylcytidine-3'-phosphate
  modified_base 16: mod_base = OTHER; note = 2'-O-methyluridine-3'-phosphate
  modified_base 17: mod_base = OTHER; note = 2'-O-methyluridine-3'-phosphate
  modified_base 18: mod_base = OTHER; note = 2'-O-methylguanosine-3'-phosphate
  modified_base 19: mod_base = OTHER; note = 2'-O-methylguanosine-3'-phosphorothioate
  modified_base 20: mod_base = OTHER; note = 2'-O-methyluridine-3'-phosphorothioate
  modified_base 21: mod_base = OTHER; note = 2'-O-methyladenosine-3'-phosphate
atgaagaagcaaatcttggta

SEQ ID NO: 3945 - RNA, 21 nt, synthetic construct
  source 1..21: mol_type = other RNA
  modified_base 1: mod_base = OTHER; note = 2'-O-methyluridine-3'-phosphorothioate
  modified_base 2: mod_base = OTHER; note = 2'-O-methyluridine-3'-phosphorothioate
  modified_base 3: mod_base = OTHER; note = 2'-O-methyluridine-3'-phosphate
  modified_base 4: mod_base = OTHER; note = 2'-O-methylguanosine-3'-phosphate
  modified_base 5: mod_base = OTHER; note = 2'-O-methylguanosine-3'-phosphate
  modified_base 6: mod_base = OTHER; note (2R,3S,4S,5R)-5-(6-amino-9H-purin-9-yl)-4-(docosyloxy)-2-(h ydroxymethyl)tetrahydrofuran-3-ol
  modified_base 7: mod_base = OTHER; note = 2'-fluoroadenosine-3'-phosphate
  modified_base 8: mod_base = OTHER; note = 2'-O-methyluridine-3'-phosphate
  modified_base 9: mod_base = OTHER; note = 2'-fluorocytidine-3'-phosphate
  modified_base 10: mod_base = OTHER; note = 2'-fluoroadenosine-3'-phosphate
  modified_base 11: mod_base = OTHER; note = 2'-fluorouridine-3'-phosphate
  modified_base 12: mod_base = OTHER; note = 2'-O-methylguanosine-3'-phosphate
  modified_base 13: mod_base = OTHER; note = 2'-O-methylcytidine-3'-phosphate
  modified_base 14: mod_base = OTHER; note = 2'-O-methyladenosine-3'-phosphate
  modified_base 15: mod_base = OTHER; note = 2'-O-methyladenosine-3'-phosphate
  modified_base 16: mod_base = OTHER; note = 2'-O-methyluridine-3'-phosphate
  modified_base 17: mod_base = OTHER; note = 2'-O-methyluridine-3'-phosphate
  modified_base 18: mod_base = OTHER; note = 2'-O-methyluridine-3'-phosphate
  modified_base 19: mod_base = OTHER; note = 2'-O-methyluridine-3'-phosphorothioate
  modified_base 20: mod_base = OTHER; note = 2'-O-methylguanosine-3'-phosphorothioate
  modified_base 21: mod_base = OTHER; note = 2'-O-methyladenosine-3'-phosphate
tttggaatcatgcaattttga

SEQ ID NO: 3946 - RNA, 21 nt, synthetic construct
  source 1..21: mol_type = other RNA
  modified_base 1: mod_base = OTHER; note = 2'-O-methylcytidine-3'-phosphorothioate
  modified_base 2: mod_base = OTHER; note = 2'-O-methyladenosine-3'-phosphorothioate
  modified_base 3: mod_base = OTHER; note = 2'-O-methyladenosine-3'-phosphate
  modified_base 4: mod_base = OTHER; note = 2'-O-methyluridine-3'-phosphate
  modified_base 5: mod_base = OTHER; note = 2'-O-methylguanosine-3'-phosphate
  modified_base 6: mod_base = OTHER; note 1-((2R,3R,4R,5R)-3-(docosyloxy)-4-hydroxy-5-(hydroxymethyl) tetrahydrofuran-2-yl)pyrimidine-2,4(1H,3H)-dione
  modified_base 7: mod_base = OTHER; note = 2'-fluorouridine-3'-phosphate
  modified_base 8: mod_base = OTHER; note = 2'-O-methyluridine-3'-phosphate
  modified_base 9: mod_base = OTHER; note = 2'-fluorouridine-3'-phosphate
  modified_base 10: mod_base = OTHER; note = 2'-fluoroguanosine-3'-phosphate
  modified_base 11: mod_base = OTHER; note = 2'-fluorouridine-3'-phosphate
  modified_base 12: mod_base = OTHER; note = 2'-O-methyladenosine-3'-phosphate
  modified_base 13: mod_base = OTHER; note = 2'-O-methyladenosine-3'-phosphate
  modified_base 14: mod_base = OTHER; note = 2'-O-methyladenosine-3'-phosphate
  modified_base 15: mod_base = OTHER; note = 2'-O-methylcytidine-3'-phosphate
  modified_base 16: mod_base = OTHER; note = 2'-O-methyluridine-3'-phosphate
  modified_base 17: mod_base = OTHER; note = 2'-O-methyluridine-3'-phosphate
  modified_base 18: mod_base = OTHER; note = 2'-O-methylguanosine-3'-phosphate
  modified_base 19: mod_base = OTHER; note = 2'-O-methylcytidine-3'-phosphorothioate
  modified_base 20: mod_base = OTHER; note = 2'-O-methyluridine-3'-phosphorothioate
  modified_base 21: mod_base = OTHER; note = 2'-O-methyladenosine-3'-phosphate
caatgttttgtaaacttgcta

SEQ ID NO: 3947 - RNA, 21 nt, synthetic construct
  source 1..21: mol_type = other RNA
  modified_base 1: mod_base = OTHER; note = 2'-O-methylguanosine-3'-phosphorothioate
  modified_base 2: mod_base = OTHER; note = 2'-O-methylguanosine-3'-phosphorothioate
  modified_base 3: mod_base = OTHER; note = 2'-O-methyladenosine-3'-phosphate
  modified_base 4: mod_base = OTHER; note = 2'-O-methyluridine-3'-phosphate
  modified_base 5: mod_base = OTHER; note = 2'-O-methylcytidine-3'-phosphate
  modified_base 6: mod_base = OTHER; note 2-amino-9-((2R,3S,4S,5R)-3-(docosyloxy)-4-hydroxy-5-(hydrox ymethyl)tetrahydrofuran-2-yl)-1,9-dihydro-6H-purin-6-one
  modified_base 7: mod_base = OTHER; note = 2'-fluorouridine-3'-phosphate
  modified_base 8: mod_base = OTHER; note = 2'-O-methyladenosine-3'-phosphate
  modified_base 9: mod_base = OTHER; note = 2'-fluoroadenosine-3'-phosphate
  modified_base 10: mod_base = OTHER; note = 2'-fluorouridine-3'-phosphate
  modified_base 11: mod_base = OTHER; note = 2'-fluoroadenosine-3'-phosphate
  modified_base 12: mod_base = OTHER; note = 2'-O-methyladenosine-3'-phosphate
  modified_base 13: mod_base = OTHER; note = 2'-O-methyluridine-3'-phosphate
  modified_base 14: mod_base = OTHER; note = 2'-O-methylguanosine-3'-phosphate
  modified_base 15: mod_base = OTHER; note = 2'-O-methylguanosine-3'-phosphate
  modified_base 16: mod_base = OTHER; note = 2'-O-methylcytidine-3'-phosphate
  modified_base 17: mod_base = OTHER; note = 2'-O-methyladenosine-3'-phosphate
  modified_base 18: mod_base = OTHER; note = 2'-O-methyladenosine-3'-phosphate
  modified_base 19: mod_base = OTHER; note = 2'-O-methyladenosine-3'-phosphorothioate
  modified_base 20: mod_base = OTHER; note = 2'-O-methyladenosine-3'-phosphorothioate
  modified_base 21: mod_base = OTHER; note = 2'-O-methyladenosine-3'-phosphate
ggatcgtaataatggcaaaaa

SEQ ID NO: 3948 - RNA, 21 nt, synthetic construct
  source 1..21: mol_type = other RNA
  modified_base 1: mod_base = OTHER; note = 2'-O-methylguanosine-3'-phosphorothioate
  modified_base 2: mod_base = OTHER; note = 2'-O-methyluridine-3'-phosphorothioate
  modified_base 3: mod_base = OTHER; note = 2'-O-methylguanosine-3'-phosphate
  modified_base 4: mod_base = OTHER; note = 2'-O-methylcytidine-3'-phosphate
  modified_base 5: mod_base = OTHER; note = 2'-O-methyluridine-3'-phosphate
  modified_base 6: mod_base = OTHER; note 1-((2R,3R,4R,5R)-3-(docosyloxy)-4-hydroxy-5-(hydroxymethyl) tetrahydrofuran-2-yl)pyrimidine-2,4(1H,3H)-dione
  modified_base 7: mod_base = OTHER; note = 2'-fluorouridine-3'-phosphate
  modified_base 8: mod_base = OTHER; note = 2'-O-methylcytidine-3'-phosphate
  modified_base 9: mod_base = OTHER; note = 2'-fluorouridine-3'-phosphate
  modified_base 10: mod_base = OTHER; note = 2'-fluorocytidine-3'-phosphate
  modified_base 11: mod_base = OTHER; note = 2'-fluoroadenosine-3'-phosphate
  modified_base 12: mod_base = OTHER; note = 2'-O-methylguanosine-3'-phosphate
  modified_base 13: mod_base = OTHER; note = 2'-O-methylguanosine-3'-phosphate
  modified_base 14: mod_base = OTHER; note = 2'-O-methyluridine-3'-phosphate
  modified_base 15: mod_base = OTHER; note = 2'-O-methyluridine-3'-phosphate
  modified_base 16: mod_base = OTHER; note = 2'-O-methylcytidine-3'-phosphate
  modified_base 17: mod_base = OTHER; note = 2'-O-methylcytidine-3'-phosphate
  modified_base 18: mod_base = OTHER; note = 2'-O-methyluridine-3'-phosphate
  modified_base 19: mod_base = OTHER; note = 2'-O-methylguanosine-3'-phosphorothioate
  modified_base 20: mod_base = OTHER; note = 2'-O-methyluridine-3'-phosphorothioate
  modified_base 21: mod_base = OTHER; note = 2'-O-methyladenosine-3'-phosphate
gtgctttctcaggttcctgta

SEQ ID NO: 3949 - RNA, 21 nt, synthetic construct
  source 1..21: mol_type = other RNA
  modified_base 1: mod_base = OTHER; note = 2'-O-methyladenosine-3'-phosphorothioate
  modified_base 2: mod_base = OTHER; note = 2'-O-methyluridine-3'-phosphorothioate
  modified_base 3: mod_base = OTHER; note = 2'-O-methylguanosine-3'-phosphate
  modified_base 4: mod_base = OTHER; note = 2'-O-methyladenosine-3'-phosphate
  modified_base 5: mod_base = OTHER; note = 2'-O-methyluridine-3'-phosphate
  modified_base 6: mod_base = OTHER; note (2R,3S,4S,5R)-5-(6-amino-9H-purin-9-yl)-4-(docosyloxy)-2-(h ydroxymethyl)tetrahydrofuran-3-ol
  modified_base 7: mod_base = OTHER; note = 2'-fluorocytidine-3'-phosphate
  modified_base 8: mod_base = OTHER; note = 2'-O-methyluridine-3'-phosphate
  modified_base 9: mod_base = OTHER; note = 2'-fluoroguanosine-3'-phosphate
  modified_base 10: mod_base = OTHER; note = 2'-fluoroadenosine-3'-phosphate
  modified_base 11: mod_base = OTHER; note = 2'-fluoroadenosine-3'-phosphate
  modified_base 12: mod_base = OTHER; note = 2'-O-methyladenosine-3'-phosphate
  modified_base 13: mod_base = OTHER; note = 2'-O-methylguanosine-3'-phosphate
  modified_base 14: mod_base = OTHER; note = 2'-O-methyluridine-3'-phosphate
  modified_base 15: mod_base = OTHER; note = 2'-O-methylguanosine-3'-phosphate
  modified_base 16: mod_base = OTHER; note = 2'-O-methylguanosine-3'-phosphate
  modified_base 17: mod_base = OTHER; note = 2'-O-methyluridine-3'-phosphate
  modified_base 18: mod_base = OTHER; note = 2'-O-methylguanosine-3'-phosphate
  modified_base 19: mod_base = OTHER; note = 2'-O-methyladenosine-3'-phosphorothioate
  modified_base 20: mod_base = OTHER; note = 2'-O-methyluridine-3'-phosphorothioate
  modified_base 21: mod_base = OTHER; note = 2'-O-methyladenosine-3'-phosphate
atgatactgaaagtggtgata

SEQ ID NO: 3950 - RNA, 21 nt, synthetic construct
  source 1..21: mol_type = other RNA
  modified_base 1: mod_base = OTHER; note = 2'-O-methyluridine-3'-phosphorothioate
  modified_base 2: mod_base = OTHER; note = 2'-O-methylcytidine-3'-phosphorothioate
  modified_base 3: mod_base = OTHER; note = 2'-O-methyladenosine-3'-phosphate
  modified_base 4: mod_base = OTHER; note = 2'-O-methylcytidine-3'-phosphate
  modified_base 5: mod_base = OTHER; note = 2'-O-methyluridine-3'-phosphate
  modified_base 6: mod_base = OTHER; note 2-amino-9-((2R,3S,4S,5R)-3-(docosyloxy)-4-hydroxy-5-(hydrox ymethyl)tetrahydrofuran-2-yl)-1,9-dihydro-6H-purin-6-one
  modified_base 7: mod_base = OTHER; note = 2'-fluoroguanosine-3'-phosphate
  modified_base 8: mod_base = OTHER; note = 2'-O-methyladenosine-3'-phosphate
  modified_base 9: mod_base = OTHER; note = 2'-fluorocytidine-3'-phosphate
  modified_base 10: mod_base = OTHER; note = 2'-fluorocytidine-3'-phosphate
  modified_base 11: mod_base = OTHER; note = 2'-fluorouridine-3'-phosphate
  modified_base 12: mod_base = OTHER; note = 2'-O-methylguanosine-3'-phosphate
  modified_base 13: mod_base = OTHER; note = 2'-O-methyladenosine-3'-phosphate
  modified_base 14: mod_base = OTHER; note = 2'-O-methyluridine-3'-phosphate
  modified_base 15: mod_base = OTHER; note = 2'-O-methyluridine-3'-phosphate
  modified_base 16: mod_base = OTHER; note = 2'-O-methyluridine-3'-phosphate
  modified_base 17: mod_base = OTHER; note = 2'-O-methyluridine-3'-phosphate
  modified_base 18: mod_base = OTHER; note = 2'-O-methyladenosine-3'-phosphate
  modified_base 19: mod_base = OTHER; note = 2'-O-methylguanosine-3'-phosphorothioate
  modified_base 20: mod_base = OTHER; note = 2'-O-methyluridine-3'-phosphorothioate
  modified_base 21: mod_base = OTHER; note = 2'-O-methyladenosine-3'-phosphate
tcactggacctgattttagta

SEQ ID NO: 3951 - RNA, 21 nt, synthetic construct
  source 1..21: mol_type = other RNA
  modified_base 1: mod_base = OTHER; note = 2'-O-methylguanosine-3'-phosphorothioate
  modified_base 2: mod_base = OTHER; note = 2'-O-methyladenosine-3'-phosphorothioate
  modified_base 3: mod_base = OTHER; note = 2'-O-methyladenosine-3'-phosphate
  modified_base 4: mod_base = OTHER; note = 2'-O-methylcytidine-3'-phosphate
  modified_base 5: mod_base = OTHER; note = 2'-O-methyluridine-3'-phosphate
  modified_base 6: mod_base = OTHER; note 1-((2R,3R,4R,5R)-3-(docosyloxy)-4-hydroxy-5-(hydroxymethyl) tetrahydrofuran-2-yl)pyrimidine-2,4(1H,3H)-dione
  modified_base 7: mod_base = OTHER; note = 2'-fluorouridine-3'-phosphate
  modified_base 8: mod_base = OTHER; note = 2'-O-methyluridine-3'-phosphate
  modified_base 9: mod_base = OTHER; note = 2'-fluorouridine-3'-phosphate
  modified_base 10: mod_base = OTHER; note = 2'-fluoroguanosine-3'-phosphate
  modified_base 11: mod_base = OTHER; note = 2'-fluorocytidine-3'-phosphate
  modified_base 12: mod_base = OTHER; note = 2'-O-methyluridine-3'-phosphate
  modified_base 13: mod_base = OTHER; note = 2'-O-methyluridine-3'-phosphate
  modified_base 14: mod_base = OTHER; note = 2'-O-methyluridine-3'-phosphate
  modified_base 15: mod_base = OTHER; note = 2'-O-methyluridine-3'-phosphate
  modified_base 16: mod_base = OTHER; note = 2'-O-methyladenosine-3'-phosphate
  modified_base 17: mod_base = OTHER; note = 2'-O-methyluridine-3'-phosphate
  modified_base 18: mod_base = OTHER; note = 2'-O-methylguanosine-3'-phosphate
  modified_base 19: mod_base = OTHER; note = 2'-O-methyladenosine-3'-phosphorothioate
  modified_base 20: mod_base = OTHER; note = 2'-O-methyladenosine-3'-phosphorothioate
  modified_base 21: mod_base = OTHER; note = 2'-O-methyladenosine-3'-phosphate
gaactttttgcttttatgaaa

SEQ ID NO: 3952 - RNA, 21 nt, synthetic construct
  source 1..21: mol_type = other RNA
  modified_base 1: mod_base = OTHER; note = 2'-O-methylguanosine-3'-phosphorothioate
  modified_base 2: mod_base = OTHER; note = 2'-O-methyladenosine-3'-phosphorothioate
  modified_base 3: mod_base = OTHER; note = 2'-O-methyladenosine-3'-phosphate
  modified_base 4: mod_base = OTHER; note = 2'-O-methylcytidine-3'-phosphate
  modified_base 5: mod_base = OTHER; note = 2'-O-methyladenosine-3'-phosphate
  modified_base 6: mod_base = OTHER; note 4-amino-1-((2R,3R,4R,5R)-3-(docosyloxy)-4-hydroxy-5-(hydrox ymethyl)tetrahydrofuran-2-yl)pyrimidin-2(1H)-one
  modified_base 7: mod_base = OTHER; note = 2'-fluoroadenosine-3'-phosphate
  modified_base 8: mod_base = OTHER; note = 2'-O-methylguanosine-3'-phosphate
  modified_base 9: mod_base = OTHER; note = 2'-fluorocytidine-3'-phosphate
  modified_base 10: mod_base = OTHER; note = 2'-fluoroadenosine-3'-phosphate
  modified_base 11: mod_base = OTHER; note = 2'-fluorocytidine-3'-phosphate
  modified_base 12: mod_base = OTHER; note = 2'-O-methyladenosine-3'-phosphate
  modified_base 13: mod_base = OTHER; note = 2'-O-methylguanosine-3'-phosphate
  modified_base 14: mod_base = OTHER; note = 2'-O-methyladenosine-3'-phosphate
  modified_base 15: mod_base = OTHER; note = 2'-O-methyluridine-3'-phosphate
  modified_base 16: mod_base = OTHER; note = 2'-O-methyluridine-3'-phosphate
  modified_base 17: mod_base = OTHER; note = 2'-O-methyluridine-3'-phosphate
  modified_base 18: mod_base = OTHER; note = 2'-O-methylguanosine-3'-phosphate
  modified_base 19: mod_base = OTHER; note = 2'-O-methyluridine-3'-phosphorothioate
  modified_base 20: mod_base = OTHER; note = 2'-O-methyluridine-3'-phosphorothioate
  modified_base 21: mod_base = OTHER; note = 2'-O-methyladenosine-3'-phosphate
gaacacagcacagatttgtta

SEQ ID NO: 3953 - RNA, 21 nt, synthetic construct
  source 1..21: mol_type = other RNA
  modified_base 1: mod_base = OTHER; note = 2'-O-methyladenosine-3'-phosphorothioate
  modified_base 2: mod_base = OTHER; note = 2'-O-methyluridine-3'-phosphorothioate
  modified_base 3: mod_base = OTHER; note = 2'-O-methyladenosine-3'-phosphate
  modified_base 4: mod_base = OTHER; note = 2'-O-methyluridine-3'-phosphate
  modified_base 5: mod_base = OTHER; note = 2'-O-methylguanosine-3'-phosphate
  modified_base 6: mod_base = OTHER; note 2-amino-9-((2R,3S,4S,5R)-3-(docosyloxy)-4-hydroxy-5-(hydrox ymethyl)tetrahydrofuran-2-yl)-1,9-dihydro-6H-purin-6-one
  modified_base 7: mod_base = OTHER; note = 2'-fluoroadenosine-3'-phosphate
  modified_base 8: mod_base = OTHER; note = 2'-O-methyladenosine-3'-phosphate
  modified_base 9: mod_base = OTHER; note = 2'-fluoroguanosine-3'-phosphate
  modified_base 10: mod_base = OTHER; note = 2'-fluoroguanosine-3'-phosphate
  modified_base 11: mod_base = OTHER; note = 2'-fluoroadenosine-3'-phosphate
  modified_base 12: mod_base = OTHER; note = 2'-O-methyladenosine-3'-phosphate
  modified_base 13: mod_base = OTHER; note = 2'-O-methyladenosine-3'-phosphate
  modified_base 14: mod_base = OTHER; note = 2'-O-methyluridine-3'-phosphate
  modified_base 15: mod_base = OTHER; note = 2'-O-methylcytidine-3'-phosphate
  modified_base 16: mod_base = OTHER; note = 2'-O-methylguanosine-3'-phosphate
  modified_base 17: mod_base = OTHER; note = 2'-O-methyluridine-3'-phosphate
  modified_base 18: mod_base = OTHER; note = 2'-O-methyladenosine-3'-phosphate
  modified_base 19: mod_base = OTHER; note = 2'-O-methylguanosine-3'-phosphorothioate
  modified_base 20: mod_base = OTHER; note = 2'-O-methyladenosine-3'-phosphorothioate
  modified_base 21: mod_base = OTHER; note = 2'-O-methyladenosine-3'-phosphate
atatggaaggaaatcgtagaa

SEQ ID NO: 3954 - RNA, 21 nt, synthetic construct
  source 1..21: mol_type = other RNA
  modified_base 1: mod_base = OTHER; note = 2'-O-methylguanosine-3'-phosphorothioate
  modified_base 2: mod_base = OTHER; note = 2'-O-methylcytidine-3'-phosphorothioate
  modified_base 3: mod_base = OTHER; note = 2'-O-methyluridine-3'-phosphate
  modified_base 4: mod_base = OTHER; note = 2'-O-methyladenosine-3'-phosphate
  modified_base 5: mod_base = OTHER; note = 2'-O-methyluridine-3'-phosphate
  modified_base 6: mod_base = OTHER; note 4-amino-1-((2R,3R,4R,5R)-3-(docosyloxy)-4-hydroxy-5-(hydrox ymethyl)tetrahydrofuran-2-yl)pyrimidin-2(1H)-one
  modified_base 7: mod_base = OTHER; note = 2'-fluorouridine-3'-phosphate
  modified_base 8: mod_base = OTHER; note = 2'-O-methyladenosine-3'-phosphate
  modified_base 9: mod_base = OTHER; note = 2'-fluoroadenosine-3'-phosphate
  modified_base 10: mod_base = OTHER; note = 2'-fluoroadenosine-3'-phosphate
  modified_base 11: mod_base = OTHER; note = 2'-fluorouridine-3'-phosphate
  modified_base 12: mod_base = OTHER; note = 2'-O-methylguanosine-3'-phosphate
  modified_base 13: mod_base = OTHER; note = 2'-O-methylguanosine-3'-phosphate
  modified_base 14: mod_base = OTHER; note = 2'-O-methylguanosine-3'-phosphate
  modified_base 15: mod_base = OTHER; note = 2'-O-methylcytidine-3'-phosphate
  modified_base 16: mod_base = OTHER; note = 2'-O-methylcytidine-3'-phosphate
  modified_base 17: mod_base = OTHER; note = 2'-O-methyluridine-3'-phosphate
  modified_base 18: mod_base = OTHER; note = 2'-O-methyluridine-3'-phosphate
  modified_base 19: mod_base = OTHER; note = 2'-O-methyluridine-3'-phosphorothioate
  modified_base 20: mod_base = OTHER; note = 2'-O-methyluridine-3'-phosphorothioate
  modified_base 21: mod_base = OTHER; note = 2'-O-methyladenosine-3'-phosphate
gctatctaaatgggcctttta

SEQ ID NO: 3955 - RNA, 21 nt, synthetic construct
  source 1..21: mol_type = other RNA
  modified_base 1: mod_base = OTHER; note = 2'-O-methylcytidine-3'-phosphorothioate
  modified_base 2: mod_base = OTHER; note = 2'-O-methyladenosine-3'-phosphorothioate
  modified_base 3: mod_base = OTHER; note = 2'-O-methyladenosine-3'-phosphate
  modified_base 4: mod_base = OTHER; note = 2'-O-methyladenosine-3'-phosphate
  modified_base 5: mod_base = OTHER; note = 2'-O-methyladenosine-3'-phosphate
  modified_base 6: mod_base = OTHER; note 4-amino-1-((2R,3R,4R,5R)-3-(docosyloxy)-4-hydroxy-5-(hydrox ymethyl)tetrahydrofuran-2-yl)pyrimidin-2(1H)-one
  modified_base 7: mod_base = OTHER; note = 2'-fluorocytidine-3'-phosphate
  modified_base 8: mod_base = OTHER; note = 2'-O-methyladenosine-3'-phosphate
  modified_base 9: mod_base = OTHER; note = 2'-fluorocytidine-3'-phosphate
  modified_base 10: mod_base = OTHER; note = 2'-fluorocytidine-3'-phosphate
  modified_base 11: mod_base = OTHER; note = 2'-fluoroadenosine-3'-phosphate
  modified_base 12: mod_base = OTHER; note = 2'-O-methyladenosine-3'-phosphate
  modified_base 13: mod_base = OTHER; note = 2'-O-methylguanosine-3'-phosphate
  modified_base 14: mod_base = OTHER; note = 2'-O-methyladenosine-3'-phosphate
  modified_base 15: mod_base = OTHER; note = 2'-O-methyladenosine-3'-phosphate
  modified_base 16: mod_base = OTHER; note = 2'-O-methylguanosine-3'-phosphate
  modified_base 17: mod_base = OTHER; note = 2'-O-methylguanosine-3'-phosphate
  modified_base 18: mod_base = OTHER; note = 2'-O-methyladenosine-3'-phosphate
  modified_base 19: mod_base = OTHER; note = 2'-O-methyladenosine-3'-phosphorothioate
  modified_base 20: mod_base = OTHER; note = 2'-O-methyladenosine-3'-phosphorothioate
  modified_base 21: mod_base = OTHER; note = 2'-O-methyladenosine-3'-phosphate
caaaaccaccaagaaggaaaa

SEQ ID NO: 3956 - RNA, 21 nt, synthetic construct
  source 1..21: mol_type = other RNA
  modified_base 1: mod_base = OTHER; note = 2'-O-methylcytidine-3'-phosphorothioate
  modified_base 2: mod_base = OTHER; note = 2'-O-methylcytidine-3'-phosphorothioate
  modified_base 3: mod_base = OTHER; note = 2'-O-methyladenosine-3'-phosphate
  modified_base 4: mod_base = OTHER; note = 2'-O-methylcytidine-3'-phosphate
  modified_base 5: mod_base = OTHER; note = 2'-O-methyladenosine-3'-phosphate
  modified_base 6: mod_base = OTHER; note 2-amino-9-((2R,3S,4S,5R)-3-(docosyloxy)-4-hydroxy-5-(hydrox ymethyl)tetrahydrofuran-2-yl)-1,9-dihydro-6H-purin-6-one
  modified_base 7: mod_base = OTHER; note = 2'-fluoroadenosine-3'-phosphate
  modified_base 8: mod_base = OTHER; note = 2'-O-methyluridine-3'-phosphate
  modified_base 9: mod_base = OTHER; note = 2'-fluoroguanosine-3'-phosphate
  modified_base 10: mod_base = OTHER; note = 2'-fluorouridine-3'-phosphate
  modified_base 11: mod_base = OTHER; note = 2'-fluoroguanosine-3'-phosphate
  modified_base 12: mod_base = OTHER; note = 2'-O-methylcytidine-3'-phosphate
  modified_base 13: mod_base = OTHER; note = 2'-O-methyluridine-3'-phosphate
  modified_base 14: mod_base = OTHER; note = 2'-O-methyladenosine-3'-phosphate
  modified_base 15: mod_base = OTHER; note = 2'-O-methylcytidine-3'-phosphate
  modified_base 16: mod_base = OTHER; note = 2'-O-methyladenosine-3'-phosphate
  modified_base 17: mod_base = OTHER; note = 2'-O-methyluridine-3'-phosphate
  modified_base 18: mod_base = OTHER; note = 2'-O-methylguanosine-3'-phosphate
  modified_base 19: mod_base = OTHER; note = 2'-O-methylcytidine-3'-phosphorothioate
  modified_base 20: mod_base = OTHER; note = 2'-O-methyladenosine-3'-phosphorothioate
  modified_base 21: mod_base = OTHER; note = 2'-O-methyladenosine-3'-phosphate
ccacagatgtgctacatgcaa

SEQ ID NO: 3957 - RNA, 21 nt, synthetic construct
  source 1..21: mol_type = other RNA
  modified_base 1: mod_base = OTHER; note = 2'-O-methyladenosine-3'-phosphorothioate
  modified_base 2: mod_base = OTHER; note = 2'-O-methyladenosine-3'-phosphorothioate
  modified_base 3: mod_base = OTHER; note = 2'-O-methyladenosine-3'-phosphate
  modified_base 4: mod_base = OTHER; note = 2'-O-methylguanosine-3'-phosphate
  modified_base 5: mod_base = OTHER; note = 2'-O-methyluridine-3'-phosphate
  modified_base 6: mod_base = OTHER; note 4-amino-1-((2R,3R,4R,5R)-3-(docosyloxy)-4-hydroxy-5-(hydrox ymethyl)tetrahydrofuran-2-yl)pyrimidin-2(1H)-one
  modified_base 7: mod_base = OTHER; note = 2'-fluoroadenosine-3'-phosphate
  modified_base 8: mod_base = OTHER; note = 2'-O-methyluridine-3'-phosphate
  modified_base 9: mod_base = OTHER; note = 2'-fluoroadenosine-3'-phosphate
  modified_base 10: mod_base = OTHER; note = 2'-fluorocytidine-3'-phosphate
  modified_base 11: mod_base = OTHER; note = 2'-fluoroadenosine-3'-phosphate
  modified_base 12: mod_base = OTHER; note = 2'-O-methyluridine-3'-phosphate
  modified_base 13: mod_base = OTHER; note = 2'-O-methylguanosine-3'-phosphate
  modified_base 14: mod_base = OTHER; note = 2'-O-methyluridine-3'-phosphate
  modified_base 15: mod_base = OTHER; note = 2'-O-methyladenosine-3'-phosphate
  modified_base 16: mod_base = OTHER; note = 2'-O-methylcytidine-3'-phosphate
  modified_base 17: mod_base = OTHER; note = 2'-O-methyladenosine-3'-phosphate
  modified_base 18: mod_base = OTHER; note = 2'-O-methyladenosine-3'-phosphate
  modified_base 19: mod_base = OTHER; note = 2'-O-methylguanosine-3'-phosphorothioate
  modified_base 20: mod_base = OTHER; note = 2'-O-methylcytidine-3'-phosphorothioate
  modified_base 21: mod_base = OTHER; note = 2'-O-methyladenosine-3'-phosphate
aaagtcatacatgtacaagca

SEQ ID NO: 3958 - RNA, 21 nt, synthetic construct
  source 1..21: mol_type = other RNA
  modified_base 1: mod_base = OTHER; note = 2'-O-methyluridine-3'-phosphorothioate
  modified_base 2: mod_base = OTHER; note = 2'-O-methyladenosine-3'-phosphorothioate
  modified_base 3: mod_base = OTHER; note = 2'-O-methylguanosine-3'-phosphate
  modified_base 4: mod_base = OTHER; note = 2'-O-methyladenosine-3'-phosphate
  modified_base 5: mod_base = OTHER; note = 2'-O-methyladenosine-3'-phosphate
  modified_base 6: mod_base = OTHER; note 2-amino-9-((2R,3S,4S,5R)-3-(docosyloxy)-4-hydroxy-5-(hydrox ymethyl)tetrahydrofuran-2-yl)-1,9-dihydro-6H-purin-6-one
  modified_base 7: mod_base = OTHER; note = 2'-fluorocytidine-3'-phosphate
  modified_base 8: mod_base = OTHER; note = 2'-O-methyladenosine-3'-phosphate
  modified_base 9: mod_base = OTHER; note = 2'-fluoroguanosine-3'-phosphate
  modified_base 10: mod_base = OTHER; note = 2'-fluoroadenosine-3'-phosphate
  modified_base 11: mod_base = OTHER; note = 2'-fluoroadenosine-3'-phosphate
  modified_base 12: mod_base = OTHER; note = 2'-O-methylguanosine-3'-phosphate
  modified_base 13: mod_base = OTHER; note = 2'-O-methyladenosine-3'-phosphate
  modified_base 14: mod_base = OTHER; note = 2'-O-methylguanosine-3'-phosphate
  modified_base 15: mod_base = OTHER; note = 2'-O-methylguanosine-3'-phosphate
  modified_base 16: mod_base = OTHER; note = 2'-O-methyladenosine-3'-phosphate
  modified_base 17: mod_base = OTHER; note = 2'-O-methyluridine-3'-phosphate
  modified_base 18: mod_base = OTHER; note = 2'-O-methyladenosine-3'-phosphate
  modified_base 19: mod_base = OTHER; note = 2'-O-methyladenosine-3'-phosphorothioate
  modified_base 20: mod_base = OTHER; note = 2'-O-methyluridine-3'-phosphorothioate
  modified_base 21: mod_base = OTHER; note = 2'-O-methyladenosine-3'-phosphate
tagaagcagaagaggataata

SEQ ID NO: 3959 - RNA, 21 nt, synthetic construct
  source 1..21: mol_type = other RNA
  modified_base 1: mod_base = OTHER; note = 2'-O-methylcytidine-3'-phosphorothioate
  modified_base 2: mod_base = OTHER; note = 2'-O-methylguanosine-3'-phosphorothioate
  modified_base 3: mod_base = OTHER; note = 2'-O-methyluridine-3'-phosphate
  modified_base 4: mod_base = OTHER; note = 2'-O-methylguanosine-3'-phosphate
  modified_base 5: mod_base = OTHER; note = 2'-O-methyluridine-3'-phosphate
  modified_base 6: mod_base = OTHER; note 2-amino-9-((2R,3S,4S,5R)-3-(docosyloxy)-4-hydroxy-5-(hydrox ymethyl)tetrahydrofuran-2-yl)-1,9-dihydro-6H-purin-6-one
  modified_base 7: mod_base = OTHER; note = 2'-fluorouridine-3'-phosphate
  modified_base 8: mod_base = OTHER; note = 2'-O-methyluridine-3'-phosphate
  modified_base 9: mod_base = OTHER; note = 2'-fluorocytidine-3'-phosphate
  modified_base 10: mod_base = OTHER; note = 2'-fluoroguanosine-3'-phosphate
  modified_base 11: mod_base = OTHER; note = 2'-fluorocytidine-3'-phosphate
  modified_base 12: mod_base = OTHER; note = 2'-O-methyladenosine-3'-phosphate
  modified_base 13: mod_base = OTHER; note = 2'-O-methylcytidine-3'-phosphate
  modified_base 14: mod_base = OTHER; note = 2'-O-methyladenosine-3'-phosphate
  modified_base 15: mod_base = OTHER; note = 2'-O-methylguanosine-3'-phosphate
  modified_base 16: mod_base = OTHER; note = 2'-O-methylcytidine-3'-phosphate
  modified_base 17: mod_base = OTHER; note = 2'-O-methyluridine-3'-phosphate
  modified_base 18: mod_base = OTHER; note = 2'-O-methyluridine-3'-phosphate
  modified_base 19: mod_base = OTHER; note = 2'-O-methylguanosine-3'-phosphorothioate
  modified_base 20: mod_base = OTHER; note = 2'-O-methyladenosine-3'-phosphorothioate
  modified_base 21: mod_base = OTHER; note = 2'-O-methyladenosine-3'-phosphate
cgtgtgttcgcacagcttgaa

SEQ ID NO: 3960 - RNA, 21 nt, synthetic construct
  source 1..21: mol_type = other RNA
  modified_base 1: mod_base = OTHER; note = 2'-O-methylguanosine-3'-phosphorothioate
  modified_base 2: mod_base = OTHER; note = 2'-O-methylcytidine-3'-phosphorothioate
  modified_base 3: mod_base = OTHER; note = 2'-O-methyluridine-3'-phosphate
  modified_base 4: mod_base = OTHER; note = 2'-O-methylguanosine-3'-phosphate
  modified_base 5: mod_base = OTHER; note = 2'-O-methylguanosine-3'-phosphate
  modified_base 6: mod_base = OTHER; note 1-((2R,3R,4R,5R)-3-(docosyloxy)-4-hydroxy-5-(hydroxymethyl) tetrahydrofuran-2-yl)pyrimidine-2,4(1H,3H)-dione
  modified_base 7: mod_base = OTHER; note = 2'-fluoroguanosine-3'-phosphate
  modified_base 8: mod_base = OTHER; note = 2'-O-methyluridine-3'-phosphate
  modified_base 9: mod_base = OTHER; note = 2'-fluorouridine-3'-phosphate
  modified_base 10: mod_base = OTHER; note = 2'-fluorouridine-3'-phosphate
  modified_base 11: mod_base = OTHER; note = 2'-fluorouridine-3'-phosphate
  modified_base 12: mod_base = OTHER; note = 2'-O-methylguanosine-3'-phosphate
  modified_base 13: mod_base = OTHER; note = 2'-O-methyluridine-3'-phosphate
  modified_base 14: mod_base = OTHER; note = 2'-O-methylcytidine-3'-phosphate
  modified_base 15: mod_base = OTHER; note = 2'-O-methylcytidine-3'-phosphate
  modified_base 16: mod_base = OTHER; note = 2'-O-methyladenosine-3'-phosphate
  modified_base 17: mod_base = OTHER; note = 2'-O-methylguanosine-3'-phosphate
  modified_base 18: mod_base = OTHER; note = 2'-O-methyluridine-3'-phosphate
  modified_base 19: mod_base = OTHER; note = 2'-O-methylcytidine-3'-phosphorothioate
  modified_base 20: mod_base = OTHER; note = 2'-O-methyluridine-3'-phosphorothioate
  modified_base 21: mod_base = OTHER; note = 2'-O-methyladenosine-3'-phosphate
gctggtgttttgtccagtcta

SEQ ID NO: 3961 - RNA, 21 nt, synthetic construct
  source 1..21: mol_type = other RNA
  modified_base 1: mod_base = OTHER; note = 2'-O-methyladenosine-3'-phosphorothioate
  modified_base 2: mod_base = OTHER; note = 2'-O-methyluridine-3'-phosphorothioate
  modified_base 3: mod_base = OTHER; note = 2'-O-methylguanosine-3'-phosphate
  modified_base 4: mod_base = OTHER; note = 2'-O-methylguanosine-3'-phosphate
  modified_base 5: mod_base = OTHER; note = 2'-O-methyladenosine-3'-phosphate
  modified_base 6: mod_base = OTHER; note (2R,3S,4S,5R)-5-(6-amino-9H-purin-9-yl)-4-(docosyloxy)-2-(h ydroxymethyl)tetrahydrofuran-3-ol
  modified_base 7: mod_base = OTHER; note = 2'-fluoroadenosine-3'-phosphate
  modified_base 8: mod_base = OTHER; note = 2'-O-methyladenosine-3'-phosphate
  modified_base 9: mod_base = OTHER; note = 2'-fluorocytidine-3'-phosphate
  modified_base 10: mod_base = OTHER; note = 2'-fluoroadenosine-3'-phosphate
  modified_base 11: mod_base = OTHER; note = 2'-fluoroadenosine-3'-phosphate
  modified_base 12: mod_base = OTHER; note = 2'-O-methyluridine-3'-phosphate
  modified_base 13: mod_base = OTHER; note = 2'-O-methylcytidine-3'-phosphate
  modified_base 14: mod_base = OTHER; note = 2'-O-methyluridine-3'-phosphate
  modified_base 15: mod_base = OTHER; note = 2'-O-methyladenosine-3'-phosphate
  modified_base 16: mod_base = OTHER; note = 2'-O-methyladenosine-3'-phosphate
  modified_base 17: mod_base = OTHER; note = 2'-O-methyladenosine-3'-phosphate
  modified_base 18: mod_base = OTHER; note = 2'-O-methyluridine-3'-phosphate
  modified_base 19: mod_base = OTHER; note = 2'-O-methylcytidine-3'-phosphorothioate
  modified_base 20: mod_base = OTHER; note = 2'-O-methylcytidine-3'-phosphorothioate
  modified_base 21: mod_base = OTHER; note = 2'-O-methyladenosine-3'-phosphate
atggaaaacaatctaaatcca

SEQ ID NO: 3962 - RNA, 21 nt, synthetic construct
  source 1..21: mol_type = other RNA
  modified_base 1: mod_base = OTHER; note = 2'-O-methylcytidine-3'-phosphorothioate
  modified_base 2: mod_base = OTHER; note = 2'-O-methyladenosine-3'-phosphorothioate
  modified_base 3: mod_base = OTHER; note = 2'-O-methyluridine-3'-phosphate
  modified_base 4: mod_base = OTHER; note = 2'-O-methyluridine-3'-phosphate
  modified_base 5: mod_base = OTHER; note = 2'-O-methyladenosine-3'-phosphate
  modified_base 6: mod_base = OTHER; note 2-amino-9-((2R,3S,4S,5R)-3-(docosyloxy)-4-hydroxy-5-(hydrox ymethyl)tetrahydrofuran-2-yl)-1,9-dihydro-6H-purin-6-one
  modified_base 7: mod_base = OTHER; note = 2'-fluoroadenosine-3'-phosphate
  modified_base 8: mod_base = OTHER; note = 2'-O-methyladenosine-3'-phosphate
  modified_base 9: mod_base = OTHER; note = 2'-fluoroadenosine-3'-phosphate
  modified_base 10: mod_base = OTHER; note = 2'-fluoroadenosine-3'-phosphate
  modified_base 11: mod_base = OTHER; note = 2'-fluorouridine-3'-phosphate
  modified_base 12: mod_base = OTHER; note = 2'-O-methylguanosine-3'-phosphate
  modified_base 13: mod_base = OTHER; note = 2'-O-methylguanosine-3'-phosphate
  modified_base 14: mod_base = OTHER; note = 2'-O-methylcytidine-3'-phosphate
  modified_base 15: mod_base = OTHER; note = 2'-O-methyluridine-3'-phosphate
  modified_base 16: mod_base = OTHER; note = 2'-O-methyladenosine-3'-phosphate
  modified_base 17: mod_base = OTHER; note = 2'-O-methyluridine-3'-phosphate
  modified_base 18: mod_base = OTHER; note = 2'-O-methylcytidine-3'-phosphate
  modified_base 19: mod_base = OTHER; note = 2'-O-methylguanosine-3'-phosphorothioate
  modified_base 20: mod_base = OTHER; note = 2'-O-methyladenosine-3'-phosphorothioate
  modified_base 21: mod_base = OTHER; note = 2'-O-methyladenosine-3'-phosphate
cattagaaaatggctatcgaa

SEQ ID NO: 3963 - RNA, 21 nt, synthetic construct
  source 1..21: mol_type = other RNA
  modified_base 1: mod_base = OTHER; note = 2'-O-methyladenosine-3'-phosphorothioate
  modified_base 2: mod_base = OTHER; note = 2'-O-methyluridine-3'-phosphorothioate
  modified_base 3: mod_base = OTHER; note = 2'-O-methylguanosine-3'-phosphate
  modified_base 4: mod_base = OTHER; note = 2'-O-methylguanosine-3'-phosphate
  modified_base 5: mod_base = OTHER; note = 2'-O-methyladenosine-3'-phosphate
  modified_base 6: mod_base = OTHER; note 4-amino-1-((2R,3R,4R,5R)-3-(docosyloxy)-4-hydroxy-5-(hydrox ymethyl)tetrahydrofuran-2-yl)pyrimidin-2(1H)-one
  modified_base 7: mod_base = OTHER; note = 2'-fluoroadenosine-3'-phosphate
  modified_base 8: mod_base = OTHER; note = 2'-O-methylguanosine-3'-phosphate
  modified_base 9: mod_base = OTHER; note = 2'-fluoroadenosine-3'-phosphate
  modified_base 10: mod_base = OTHER; note = 2'-fluoroadenosine-3'-phosphate
  modified_base 11: mod_base = OTHER; note = 2'-fluoroguanosine-3'-phosphate
  modified_base 12: mod_base = OTHER; note = 2'-O-methylguanosine-3'-phosphate
  modified_base 13: mod_base = OTHER; note = 2'-O-methylcytidine-3'-phosphate
  modified_base 14: mod_base = OTHER; note = 2'-O-methyladenosine-3'-phosphate
  modified_base 15: mod_base = OTHER; note = 2'-O-methyluridine-3'-phosphate
  modified_base 16: mod_base = OTHER; note = 2'-O-methyluridine-3'-phosphate
  modified_base 17: mod_base = OTHER; note = 2'-O-methylguanosine-3'-phosphate
  modified_base 18: mod_base = OTHER; note = 2'-O-methyluridine-3'-phosphate
  modified_base 19: mod_base = OTHER; note = 2'-O-methylcytidine-3'-phosphorothioate
  modified_base 20: mod_base = OTHER; note = 2'-O-methyladenosine-3'-phosphorothioate
  modified_base 21: mod_base = OTHER; note = 2'-O-methyladenosine-3'-phosphate
atggacagaaggcattgtcaa

SEQ ID NO: 3964 - RNA, 21 nt, synthetic construct
  source 1..21: mol_type = other RNA
  modified_base 1: mod_base = OTHER; note = 2'-O-methylcytidine-3'-phosphorothioate
  modified_base 2: mod_base = OTHER; note = 2'-O-methyladenosine-3'-phosphorothioate
  modified_base 3: mod_base = OTHER; note = 2'-O-methylguanosine-3'-phosphate
  modified_base 4: mod_base = OTHER; note = 2'-O-methyladenosine-3'-phosphate
  modified_base 5: mod_base = OTHER; note = 2'-O-methyluridine-3'-phosphate
  modified_base 6: mod_base = OTHER; note 1-((2R,3R,4R,5R)-3-(docosyloxy)-4-hydroxy-5-(hydroxymethyl) tetrahydrofuran-2-yl)pyrimidine-2,4(1H,3H)-dione
  modified_base 7: mod_base = OTHER; note = 2'-fluoroguanosine-3'-phosphate
  modified_base 8: mod_base = OTHER; note = 2'-O-methylcytidine-3'-phosphate
  modified_base 9: mod_base = OTHER; note = 2'-fluorouridine-3'-phosphate
  modified_base 10: mod_base = OTHER; note = 2'-fluoroguanosine-3'-phosphate
  modified_base 11: mod_base = OTHER; note = 2'-fluorocytidine-3'-phosphate
  modified_base 12: mod_base = OTHER; note = 2'-O-methyladenosine-3'-phosphate
  modified_base 13: mod_base = OTHER; note = 2'-O-methylguanosine-3'-phosphate
  modified_base 14: mod_base = OTHER; note = 2'-O-methyluridine-3'-phosphate
  modified_base 15: mod_base = OTHER; note = 2'-O-methylguanosine-3'-phosphate
  modified_base 16: mod_base = OTHER; note = 2'-O-methylguanosine-3'-phosphate
  modified_base 17: mod_base = OTHER; note = 2'-O-methyladenosine-3'-phosphate
  modified_base 18: mod_base = OTHER; note = 2'-O-methyladenosine-3'-phosphate
  modified_base 19: mod_base = OTHER; note = 2'-O-methyladenosine-3'-phosphorothioate
  modified_base 20: mod_base = OTHER; note = 2'-O-methyladenosine-3'-phosphorothioate
  modified_base 21: mod_base = OTHER; note = 2'-O-methyladenosine-3'-phosphate
cagattgctgcagtggaaaaa

SEQ ID NO: 3965 - RNA, 21 nt, synthetic construct
  source 1..21: mol_type = other RNA
  modified_base 1: mod_base = OTHER; note = 2'-O-methyladenosine-3'-phosphorothioate
  modified_base 2: mod_base = OTHER; note = 2'-O-methylguanosine-3'-phosphorothioate
  modified_base 3: mod_base = OTHER; note = 2'-O-methylguanosine-3'-phosphate
  modified_base 4: mod_base = OTHER; note = 2'-O-methyluridine-3'-phosphate
  modified_base 5: mod_base = OTHER; note = 2'-O-methylguanosine-3'-phosphate
  modified_base 6: mod_base = OTHER; note 2-amino-9-((2R,3S,4S,5R)-3-(docosyloxy)-4-hydroxy-5-(hydrox ymethyl)tetrahydrofuran-2-yl)-1,9-dihydro-6H-purin-6-one
  modified_base 7: mod_base = OTHER; note = 2'-fluoroadenosine-3'-phosphate
  modified_base 8: mod_base = OTHER; note = 2'-O-methyladenosine-3'-phosphate
  modified_base 9: mod_base = OTHER; note = 2'-fluoroadenosine-3'-phosphate
  modified_base 10: mod_base = OTHER; note = 2'-fluorouridine-3'-phosphate
  modified_base 11: mod_base = OTHER; note = 2'-fluoroguanosine-3'-phosphate
  modified_base 12: mod_base = OTHER; note = 2'-O-methylguanosine-3'-phosphate
  modified_base 13: mod_base = OTHER; note = 2'-O-methyladenosine-3'-phosphate
  modified_base 14: mod_base = OTHER; note = 2'-O-methylguanosine-3'-phosphate
  modified_base 15: mod_base = OTHER; note = 2'-O-methyluridine-3'-phosphate
  modified_base 16: mod_base = OTHER; note = 2'-O-methyluridine-3'-phosphate
  modified_base 17: mod_base = OTHER; note = 2'-O-methylguanosine-3'-phosphate
  modified_base 18: mod_base = OTHER; note = 2'-O-methyladenosine-3'-phosphate
  modified_base 19: mod_base = OTHER; note = 2'-O-methyluridine-3'-phosphorothioate
  modified_base 20: mod_base = OTHER; note = 2'-O-methylcytidine-3'-phosphorothioate
  modified_base 21: mod_base = OTHER; note = 2'-O-methyladenosine-3'-phosphate
aggtggaaatggagttgatca

SEQ ID NO: 3966 - RNA, 21 nt, synthetic construct
  source 1..21: mol_type = other RNA
  modified_base 1: mod_base = OTHER; note = 2'-O-methylcytidine-3'-phosphorothioate
  modified_base 2: mod_base = OTHER; note = 2'-O-methyluridine-3'-phosphorothioate
  modified_base 3: mod_base = OTHER; note = 2'-O-methylguanosine-3'-phosphate
  modified_base 4: mod_base = OTHER; note = 2'-O-methylguanosine-3'-phosphate
  modified_base 5: mod_base = OTHER; note = 2'-O-methylguanosine-3'-phosphate
  modified_base 6: mod_base = OTHER; note 4-amino-1-((2R,3R,4R,5R)-3-(docosyloxy)-4-hydroxy-5-(hydrox ymethyl)tetrahydrofuran-2-yl)pyrimidin-2(1H)-one
  modified_base 7: mod_base = OTHER; note = 2'-fluoroadenosine-3'-phosphate
  modified_base 8: mod_base = OTHER; note = 2'-O-methyladenosine-3'-phosphate
  modified_base 9: mod_base = OTHER; note = 2'-fluorouridine-3'-phosphate
  modified_base 10: mod_base = OTHER; note = 2'-fluoroguanosine-3'-phosphate
  modified_base 11: mod_base = OTHER; note = 2'-fluorocytidine-3'-phosphate
  modified_base 12: mod_base = OTHER; note = 2'-O-methyladenosine-3'-phosphate
  modified_base 13: mod_base = OTHER; note = 2'-O-methylcytidine-3'-phosphate
  modified_base 14: mod_base = OTHER; note = 2'-O-methylcytidine-3'-phosphate
  modified_base 15: mod_base = OTHER; note = 2'-O-methyluridine-3'-phosphate
  modified_base 16: mod_base = OTHER; note = 2'-O-methyladenosine-3'-phosphate
  modified_base 17: mod_base = OTHER; note = 2'-O-methyladenosine-3'-phosphate
  modified_base 18: mod_base = OTHER; note = 2'-O-methyluridine-3'-phosphate
  modified_base 19: mod_base = OTHER; note = 2'-O-methyladenosine-3'-phosphorothioate
  modified_base 20: mod_base = OTHER; note = 2'-O-methylcytidine-3'-phosphorothioate
  modified_base 21: mod_base = OTHER; note = 2'-O-methyladenosine-3'-phosphate
ctgggcaatgcacctaataca

SEQ ID NO: 3967 - RNA, 21 nt, synthetic construct
  source 1..21: mol_type = other RNA
  modified_base 1: mod_base = OTHER; note = 2'-O-methyladenosine-3'-phosphorothioate
  modified_base 2: mod_base = OTHER; note = 2'-O-methyluridine-3'-phosphorothioate
  modified_base 3: mod_base = OTHER; note = 2'-O-methyluridine-3'-phosphate
  modified_base 4: mod_base = OTHER; note = 2'-O-methyluridine-3'-phosphate
  modified_base 5: mod_base = OTHER; note = 2'-O-methylcytidine-3'-phosphate
  modified_base 6: mod_base = OTHER; note 4-amino-1-((2R,3R,4R,5R)-3-(docosyloxy)-4-hydroxy-5-(hydrox ymethyl)tetrahydrofuran-2-yl)pyrimidin-2(1H)-one
  modified_base 7: mod_base = OTHER; note = 2'-fluorocytidine-3'-phosphate
  modified_base 8: mod_base = OTHER; note = 2'-O-methyluridine-3'-phosphate
  modified_base 9: mod_base = OTHER; note = 2'-fluorocytidine-3'-phosphate
  modified_base 10: mod_base = OTHER; note = 2'-fluorouridine-3'-phosphate
  modified_base 11: mod_base = OTHER; note = 2'-fluoroguanosine-3'-phosphate
  modified_base 12: mod_base = OTHER; note = 2'-O-methylcytidine-3'-phosphate
  modified_base 13: mod_base = OTHER; note = 2'-O-methylcytidine-3'-phosphate
  modified_base 14: mod_base = OTHER; note = 2'-O-methyluridine-3'-phosphate
  modified_base 15: mod_base = OTHER; note = 2'-O-methyladenosine-3'-phosphate
  modified_base 16: mod_base = OTHER; note = 2'-O-methyladenosine-3'-phosphate
  modified_base 17: mod_base = OTHER; note = 2'-O-methyladenosine-3'-phosphate
  modified_base 18: mod_base = OTHER; note = 2'-O-methylguanosine-3'-phosphate
  modified_base 19: mod_base = OTHER; note = 2'-O-methyladenosine-3'-phosphorothioate
  modified_base 20: mod_base = OTHER; note = 2'-O-methylcytidine-3'-phosphorothioate
  modified_base 21: mod_base = OTHER; note = 2'-O-methyladenosine-3'-phosphate
atttccctctgcctaaagaca

SEQ ID NO: 3968 - RNA, 21 nt, synthetic construct
  source 1..21: mol_type = other RNA
  modified_base 1: mod_base = OTHER; note = 2'-O-methylcytidine-3'-phosphorothioate
  modified_base 2: mod_base = OTHER; note = 2'-O-methylguanosine-3'-phosphorothioate
  modified_base 3: mod_base = OTHER; note = 2'-O-methylcytidine-3'-phosphate
  modified_base 4: mod_base = OTHER; note = 2'-O-methyluridine-3'-phosphate
  modified_base 5: mod_base = OTHER; note = 2'-O-methyluridine-3'-phosphate
  modified_base 6: mod_base = OTHER; note 4-amino-1-((2R,3R,4R,5R)-3-(docosyloxy)-4-hydroxy-5-(hydrox ymethyl)tetrahydrofuran-2-yl)pyrimidin-2(1H)-one
  modified_base 7: mod_base = OTHER; note = 2'-fluorouridine-3'-phosphate
  modified_base 8: mod_base = OTHER; note = 2'-O-methylguanosine-3'-phosphate
  modified_base 9: mod_base = OTHER; note = 2'-fluorocytidine-3'-phosphate
  modified_base 10: mod_base = OTHER; note = 2'-fluoroadenosine-3'-phosphate
  modified_base 11: mod_base = OTHER; note = 2'-fluoroadenosine-3'-phosphate
  modified_base 12: mod_base = OTHER; note = 2'-O-methylcytidine-3'-phosphate
  modified_base 13: mod_base = OTHER; note = 2'-O-methylguanosine-3'-phosphate
  modified_base 14: mod_base = OTHER; note = 2'-O-methyluridine-3'-phosphate
  modified_base 15: mod_base = OTHER; note = 2'-O-methylguanosine-3'-phosphate
  modified_base 16: mod_base = OTHER; note = 2'-O-methylguanosine-3'-phosphate
  modified_base 17: mod_base = OTHER; note = 2'-O-methyladenosine-3'-phosphate
  modified_base 18: mod_base = OTHER; note = 2'-O-methylguanosine-3'-phosphate
  modified_base 19: mod_base = OTHER; note = 2'-O-methylcytidine-3'-phosphorothioate
  modified_base 20: mod_base = OTHER; note = 2'-O-methyluridine-3'-phosphorothioate
  modified_base 21: mod_base = OTHER; note = 2'-O-methyladenosine-3'-phosphate
cgcttctgcaacgtggagcta

SEQ ID NO: 3969 - RNA, 21 nt, synthetic construct
  source 1..21: mol_type = other RNA
  modified_base 1: mod_base = OTHER; note = 2'-O-methyladenosine-3'-phosphorothioate
  modified_base 2: mod_base = OTHER; note = 2'-O-methylguanosine-3'-phosphorothioate
  modified_base 3: mod_base = OTHER; note = 2'-O-methyladenosine-3'-phosphate
  modified_base 4: mod_base = OTHER; note = 2'-O-methyluridine-3'-phosphate
  modified_base 5: mod_base = OTHER; note = 2'-O-methyluridine-3'-phosphate
  modified_base 6: mod_base = OTHER; note 4-amino-1-((2R,3R,4R,5R)-3-(docosyloxy)-4-hydroxy-5-(hydrox ymethyl)tetrahydrofuran-2-yl)pyrimidin-2(1H)-one
  modified_base 7: mod_base = OTHER; note = 2'-fluoroadenosine-3'-phosphate
  modified_base 8: mod_base = OTHER; note = 2'-O-methyluridine-3'-phosphate
  modified_base 9: mod_base = OTHER; note = 2'-fluoroadenosine-3'-phosphate
  modified_base 10: mod_base = OTHER; note = 2'-fluorouridine-3'-phosphate
  modified_base 11: mod_base = OTHER; note = 2'-fluorouridine-3'-phosphate
  modified_base 12: mod_base = OTHER; note = 2'-O-methylguanosine-3'-phosphate
  modified_base 13: mod_base = OTHER; note = 2'-O-methyluridine-3'-phosphate
  modified_base 14: mod_base = OTHER; note = 2'-O-methyladenosine-3'-phosphate
  modified_base 15: mod_base = OTHER; note = 2'-O-methyluridine-3'-phosphate
  modified_base 16: mod_base = OTHER; note = 2'-O-methyluridine-3'-phosphate
  modified_base 17: mod_base = OTHER; note = 2'-O-methyluridine-3'-phosphate
  modified_base 18: mod_base = OTHER; note = 2'-O-methylcytidine-3'-phosphate
  modified_base 19: mod_base = OTHER; note = 2'-O-methylcytidine-3'-phosphorothioate
  modified_base 20: mod_base = OTHER; note = 2'-O-methylcytidine-3'-phosphorothioate
  modified_base 21: mod_base = OTHER; note = 2'-O-methyladenosine-3'-phosphate
agattcatattgtatttccca

SEQ ID NO: 3970 - RNA, 21 nt, synthetic construct
  source 1..21: mol_type = other RNA
  modified_base 1: mod_base = OTHER; note = 2'-O-methyladenosine-3'-phosphorothioate
  modified_base 2: mod_base = OTHER; note = 2'-O-methylguanosine-3'-phosphorothioate
  modified_base 3: mod_base = OTHER; note = 2'-O-methylguanosine-3'-phosphate
  modified_base 4: mod_base = OTHER; note = 2'-O-methyladenosine-3'-phosphate
  modified_base 5: mod_base = OTHER; note = 2'-O-methylcytidine-3'-phosphate
  modified_base 6: mod_base = OTHER; note (2R,3S,4S,5R)-5-(6-amino-9H-purin-9-yl)-4-(docosyloxy)-2-(h ydroxymethyl)tetrahydrofuran-3-ol
  modified_base 7: mod_base = OTHER; note = 2'-fluoroadenosine-3'-phosphate
  modified_base 8: mod_base = OTHER; note = 2'-O-methyladenosine-3'-phosphate
  modified_base 9: mod_base = OTHER; note = 2'-fluorouridine-3'-phosphate
  modified_base 10: mod_base = OTHER; note = 2'-fluoroguanosine-3'-phosphate
  modified_base 11: mod_base = OTHER; note = 2'-fluorocytidine-3'-phosphate
  modified_base 12: mod_base = OTHER; note = 2'-O-methyladenosine-3'-phosphate
  modified_base 13: mod_base = OTHER; note = 2'-O-methyluridine-3'-phosphate
  modified_base 14: mod_base = OTHER; note = 2'-O-methyluridine-3'-phosphate
  modified_base 15: mod_base = OTHER; note = 2'-O-methyluridine-3'-phosphate
  modified_base 16: mod_base = OTHER; note = 2'-O-methylcytidine-3'-phosphate
  modified_base 17: mod_base = OTHER; note = 2'-O-methyluridine-3'-phosphate
  modified_base 18: mod_base = OTHER; note = 2'-O-methyladenosine-3'-phosphate
  modified_base 19: mod_base = OTHER; note = 2'-O-methylguanosine-3'-phosphorothioate
  modified_base 20: mod_base = OTHER; note = 2'-O-methyluridine-3'-phosphorothioate
  modified_base 21: mod_base = OTHER; note = 2'-O-methyladenosine-3'-phosphate
aggacaaatgcatttctagta

SEQ ID NO: 3971 - RNA, 21 nt, synthetic construct
  source 1..21: mol_type = other RNA
  modified_base 1: mod_base = OTHER; note = 2'-O-methyluridine-3'-phosphorothioate
  modified_base 2: mod_base = OTHER; note = 2'-O-methyluridine-3'-phosphorothioate
  modified_base 3: mod_base = OTHER; note = 2'-O-methyladenosine-3'-phosphate
  modified_base 4: mod_base = OTHER; note = 2'-O-methylguanosine-3'-phosphate
  modified_base 5: mod_base = OTHER; note = 2'-O-methyladenosine-3'-phosphate
  modified_base 6: mod_base = OTHER; note 4-amino-1-((2R,3R,4R,5R)-3-(docosyloxy)-4-hydroxy-5-(hydrox ymethyl)tetrahydrofuran-2-yl)pyrimidin-2(1H)-one
  modified_base 7: mod_base = OTHER; note = 2'-fluoroguanosine-3'-phosphate
  modified_base 8: mod_base = OTHER; note = 2'-O-methyluridine-3'-phosphate
  modified_base 9: mod_base = OTHER; note = 2'-fluoroguanosine-3'-phosphate
  modified_base 10: mod_base = OTHER; note = 2'-fluorouridine-3'-phosphate
  modified_base 11: mod_base = OTHER; note = 2'-fluorouridine-3'-phosphate
  modified_base 12: mod_base = OTHER; note = 2'-O-methylguanosine-3'-phosphate
  modified_base 13: mod_base = OTHER; note = 2'-O-methyladenosine-3'-phosphate
  modified_base 14: mod_base = OTHER; note = 2'-O-methylguanosine-3'-phosphate
  modified_base 15: mod_base = OTHER; note = 2'-O-methyluridine-3'-phosphate
  modified_base 16: mod_base = OTHER; note = 2'-O-methylguanosine-3'-phosphate
  modified_base 17: mod_base = OTHER; note = 2'-O-methyladenosine-3'-phosphate
  modified_base 18: mod_base = OTHER; note = 2'-O-methylguanosine-3'-phosphate
  modified_base 19: mod_base = OTHER; note = 2'-O-methyluridine-3'-phosphorothioate
  modified_base 20: mod_base = OTHER; note = 2'-O-methylguanosine-3'-phosphorothioate
  modified_base 21: mod_base = OTHER; note = 2'-O-methyladenosine-3'-phosphate
ttagacgtgttgagtgagtga

SEQ ID NO: 3972 - RNA, 21 nt, synthetic construct
  source 1..21: mol_type = other RNA
  modified_base 1: mod_base = OTHER; note = 2'-O-methylcytidine-3'-phosphorothioate
  modified_base 2: mod_base = OTHER; note = 2'-O-methyluridine-3'-phosphorothioate
  modified_base 3: mod_base = OTHER; note = 2'-O-methylguanosine-3'-phosphate
  modified_base 4: mod_base = OTHER; note = 2'-O-methyluridine-3'-phosphate
  modified_base 5: mod_base = OTHER; note = 2'-O-methylguanosine-3'-phosphate
  modified_base 6: mod_base = OTHER; note 2-amino-9-((2R,3S,4S,5R)-3-(docosyloxy)-4-hydroxy-5-(hydrox ymethyl)tetrahydrofuran-2-yl)-1,9-dihydro-6H-purin-6-one
  modified_base 7: mod_base = OTHER; note = 2'-fluoroadenosine-3'-phosphate
  modified_base 8: mod_base = OTHER; note = 2'-O-methylcytidine-3'-phosphate
  modified_base 9: mod_base = OTHER; note = 2'-fluoroadenosine-3'-phosphate
  modified_base 10: mod_base = OTHER; note = 2'-fluorouridine-3'-phosphate
  modified_base 11: mod_base = OTHER; note = 2'-fluorocytidine-3'-phosphate
  modified_base 12: mod_base = OTHER; note = 2'-O-methyladenosine-3'-phosphate
  modified_base 13: mod_base = OTHER; note = 2'-O-methyladenosine-3'-phosphate
  modified_base 14: mod_base = OTHER; note = 2'-O-methyladenosine-3'-phosphate
  modified_base 15: mod_base = OTHER; note = 2'-O-methyluridine-3'-phosphate
  modified_base 16: mod_base = OTHER; note = 2'-O-methylguanosine-3'-phosphate
  modified_base 17: mod_base = OTHER; note = 2'-O-methylcytidine-3'-phosphate
  modified_base 18: mod_base = OTHER; note = 2'-O-methyluridine-3'-phosphate
  modified_base 19: mod_base = OTHER; note = 2'-O-methylguanosine-3'-phosphorothioate
  modified_base 20: mod_base = OTHER; note = 2'-O-methyladenosine-3'-phosphorothioate
  modified_base 21: mod_base = OTHER; note = 2'-O-methyladenosine-3'-phosphate
ctgtggacatcaaatgctgaa

SEQ ID NO: 3973 - RNA, 21 nt, synthetic construct
  source 1..21: mol_type = other RNA
  modified_base 1: mod_base = OTHER; note = 2'-O-methyladenosine-3'-phosphorothioate
  modified_base 2: mod_base = OTHER; note = 2'-O-methylguanosine-3'-phosphorothioate
  modified_base 3: mod_base = OTHER; note = 2'-O-methylguanosine-3'-phosphate
  modified_base 4: mod_base = OTHER; note = 2'-O-methylcytidine-3'-phosphate
  modified_base 5: mod_base = OTHER; note = 2'-O-methylcytidine-3'-phosphate
  modified_base 6: mod_base = OTHER; note 1-((2R,3R,4R,5R)-3-(docosyloxy)-4-hydroxy-5-(hydroxymethyl) tetrahydrofuran-2-yl)pyrimidine-2,4(1H,3H)-dione
  modified_base 7: mod_base = OTHER; note = 2'-fluorouridine-3'-phosphate
  modified_base 8: mod_base = OTHER; note = 2'-O-methyladenosine-3'-phosphate
  modified_base 9: mod_base = OTHER; note = 2'-fluoroadenosine-3'-phosphate
  modified_base 10: mod_base = OTHER; note = 2'-fluorouridine-3'-phosphate
  modified_base 11: mod_base = OTHER; note = 2'-fluoroadenosine-3'-phosphate
  modified_base 12: mod_base = OTHER; note = 2'-O-methylcytidine-3'-phosphate
  modified_base 13: mod_base = OTHER; note = 2'-O-methyluridine-3'-phosphate
  modified_base 14: mod_base = OTHER; note = 2'-O-methylguanosine-3'-phosphate
  modified_base 15: mod_base = OTHER; note = 2'-O-methyluridine-3'-phosphate
  modified_base 16: mod_base = OTHER; note = 2'-O-methylguanosine-3'-phosphate
  modified_base 17: mod_base = OTHER; note = 2'-O-methyladenosine-3'-phosphate
  modified_base 18: mod_base = OTHER; note = 2'-O-methylguanosine-3'-phosphate
  modified_base 19: mod_base = OTHER; note = 2'-O-methyladenosine-3'-phosphorothioate
  modified_base 20: mod_base = OTHER; note = 2'-O-methylguanosine-3'-phosphorothioate
  modified_base 21: mod_base = OTHER; note = 2'-O-methyladenosine-3'-phosphate
aggccttaatactgtgagaga

SEQ ID NO: 3974 - RNA, 21 nt, synthetic construct
  source 1..21: mol_type = other RNA
  modified_base 1: mod_base = OTHER; note = 2'-O-methyladenosine-3'-phosphorothioate
  modified_base 2: mod_base = OTHER; note = 2'-O-methylguanosine-3'-phosphorothioate
  modified_base 3: mod_base = OTHER; note = 2'-O-methyladenosine-3'-phosphate
  modified_base 4: mod_base = OTHER; note = 2'-O-methyladenosine-3'-phosphate
  modified_base 5: mod_base = OTHER; note = 2'-O-methyladenosine-3'-phosphate
  modified_base 6: mod_base = OTHER; note 1-((2R,3R,4R,5R)-3-(docosyloxy)-4-hydroxy-5-(hydroxymethyl) tetrahydrofuran-2-yl)pyrimidine-2,4(1H,3H)-dione
  modified_base 7: mod_base = OTHER; note = 2'-fluorocytidine-3'-phosphate
  modified_base 8: mod_base = OTHER; note = 2'-O-methyladenosine-3'-phosphate
  modified_base 9: mod_base = OTHER; note = 2'-fluorouridine-3'-phosphate
  modified_base 10: mod_base = OTHER; note = 2'-fluorouridine-3'-phosphate
  modified_base 11: mod_base = OTHER; note = 2'-fluoroguanosine-3'-phosphate
  modified_base 12: mod_base = OTHER; note = 2'-O-methylcytidine-3'-phosphate
  modified_base 13: mod_base = OTHER; note = 2'-O-methylcytidine-3'-phosphate
  modified_base 14: mod_base = OTHER; note = 2'-O-methyluridine-3'-phosphate
  modified_base 15: mod_base = OTHER; note = 2'-O-methyladenosine-3'-phosphate
  modified_base 16: mod_base = OTHER; note = 2'-O-methylguanosine-3'-phosphate
  modified_base 17: mod_base = OTHER; note = 2'-O-methyluridine-3'-phosphate
  modified_base 18: mod_base = OTHER; note = 2'-O-methylguanosine-3'-phosphate
  modified_base 19: mod_base = OTHER; note = 2'-O-methyluridine-3'-phosphorothioate
  modified_base 20: mod_base = OTHER; note = 2'-O-methyluridine-3'-phosphorothioate
  modified_base 21: mod_base = OTHER; note = 2'-O-methyladenosine-3'-phosphate
agaaatcattgcctagtgtta

SEQ ID NO: 3975 - RNA, 21 nt, synthetic construct
  source 1..21: mol_type = other RNA
  modified_base 1: mod_base = OTHER; note = 2'-O-methyluridine-3'-phosphorothioate
  modified_base 2: mod_base = OTHER; note = 2'-O-methylguanosine-3'-phosphorothioate
  modified_base 3: mod_base = OTHER; note = 2'-O-methyladenosine-3'-phosphate
  modified_base 4: mod_base = OTHER; note = 2'-O-methylguanosine-3'-phosphate
  modified_base 5: mod_base = OTHER; note = 2'-O-methyluridine-3'-phosphate
  modified_base 6: mod_base = OTHER; note 2-amino-9-((2R,3S,4S,5R)-3-(docosyloxy)-4-hydroxy-5-(hydrox ymethyl)tetrahydrofuran-2-yl)-1,9-dihydro-6H-purin-6-one
  modified_base 7: mod_base = OTHER; note = 2'-fluorocytidine-3'-phosphate
  modified_base 8: mod_base = OTHER; note = 2'-O-methyluridine-3'-phosphate
  modified_base 9: mod_base = OTHER; note = 2'-fluoroguanosine-3'-phosphate
  modified_base 10: mod_base = OTHER; note = 2'-fluoroadenosine-3'-phosphate
  modified_base 11: mod_base = OTHER; note = 2'-fluoroguanosine-3'-phosphate
  modified_base 12: mod_base = OTHER; note = 2'-O-methyluridine-3'-phosphate
  modified_base 13: mod_base = OTHER; note = 2'-O-methyluridine-3'-phosphate
  modified_base 14: mod_base = OTHER; note = 2'-O-methylcytidine-3'-phosphate
  modified_base 15: mod_base = OTHER; note = 2'-O-methylcytidine-3'-phosphate
  modified_base 16: mod_base = OTHER; note = 2'-O-methyluridine-3'-phosphate
  modified_base 17: mod_base = OTHER; note = 2'-O-methyluridine-3'-phosphate
  modified_base 18: mod_base = OTHER; note = 2'-O-methylguanosine-3'-phosphate
  modified_base 19: mod_base = OTHER; note = 2'-O-methylcytidine-3'-phosphorothioate
  modified_base 20: mod_base = OTHER; note = 2'-O-methyluridine-3'-phosphorothioate
  modified_base 21: mod_base = OTHER; note = 2'-O-methyladenosine-3'-phosphate
tgagtgctgagttccttgcta

SEQ ID NO: 3976 - RNA, 21 nt, synthetic construct
  source 1..21: mol_type = other RNA
  modified_base 1: mod_base = OTHER; note = 2'-O-methylguanosine-3'-phosphorothioate
  modified_base 2: mod_base = OTHER; note = 2'-O-methylcytidine-3'-phosphorothioate
  modified_base 3: mod_base = OTHER; note = 2'-O-methylcytidine-3'-phosphate
  modified_base 4: mod_base = OTHER; note = 2'-O-methyladenosine-3'-phosphate
  modified_base 5: mod_base = OTHER; note = 2'-O-methyluridine-3'-phosphate
  modified_base 6: mod_base = OTHER; note 2-amino-9-((2R,3S,4S,5R)-3-(docosyloxy)-4-hydroxy-5-(hydrox ymethyl)tetrahydrofuran-2-yl)-1,9-dihydro-6H-purin-6-one
  modified_base 7: mod_base = OTHER; note = 2'-fluorocytidine-3'-phosphate
  modified_base 8: mod_base = OTHER; note = 2'-O-methyladenosine-3'-phosphate
  modified_base 9: mod_base = OTHER; note = 2'-fluorouridine-3'-phosphate
  modified_base 10: mod_base = OTHER; note = 2'-fluoroguanosine-3'-phosphate
  modified_base 11: mod_base = OTHER; note = 2'-fluoroadenosine-3'-phosphate
  modified_base 12: mod_base = OTHER; note = 2'-O-methyluridine-3'-phosphate
  modified_base 13: mod_base = OTHER; note = 2'-O-methyluridine-3'-phosphate
  modified_base 14: mod_base = OTHER; note = 2'-O-methyladenosine-3'-phosphate
  modified_base 15: mod_base = OTHER; note = 2'-O-methyluridine-3'-phosphate
  modified_base 16: mod_base = OTHER; note = 2'-O-methylguanosine-3'-phosphate
  modified_base 17: mod_base = OTHER; note = 2'-O-methyladenosine-3'-phosphate
  modified_base 18: mod_base = OTHER; note = 2'-O-methyluridine-3'-phosphate
  modified_base 19: mod_base = OTHER; note = 2'-O-methylcytidine-3'-phosphorothioate
  modified_base 20: mod_base = OTHER; note = 2'-O-methyladenosine-3'-phosphorothioate
  modified_base 21: mod_base = OTHER; note = 2'-O-methyladenosine-3'-phosphate
gccatgcatgattatgatcaa

SEQ ID NO: 3977 - RNA, 21 nt, synthetic construct
  source 1..21: mol_type = other RNA
  modified_base 1: mod_base = OTHER; note = 2'-O-methyluridine-3'-phosphorothioate
  modified_base 2: mod_base = OTHER; note = 2'-O-methylguanosine-3'-phosphorothioate
  modified_base 3: mod_base = OTHER; note = 2'-O-methylcytidine-3'-phosphate
  modified_base 4: mod_base = OTHER; note = 2'-O-methyluridine-3'-phosphate
  modified_base 5: mod_base = OTHER; note = 2'-O-methylguanosine-3'-phosphate
  modified_base 6: mod_base = OTHER; note 4-amino-1-((2R,3R,4R,5R)-3-(docosyloxy)-4-hydroxy-5-(hydrox ymethyl)tetrahydrofuran-2-yl)pyrimidin-2(1H)-one
  modified_base 7: mod_base = OTHER; note = 2'-fluorouridine-3'-phosphate
  modified_base 8: mod_base = OTHER; note = 2'-O-methylguanosine-3'-phosphate
  modified_base 9: mod_base = OTHER; note = 2'-fluoroguanosine-3'-phosphate
  modified_base 10: mod_base = OTHER; note = 2'-fluorouridine-3'-phosphate
  modified_base 11: mod_base = OTHER; note = 2'-fluorouridine-3'-phosphate
  modified_base 12: mod_base = OTHER; note = 2'-O-methyluridine-3'-phosphate
  modified_base 13: mod_base = OTHER; note = 2'-O-methylguanosine-3'-phosphate
  modified_base 14: mod_base = OTHER; note = 2'-O-methylcytidine-3'-phosphate
  modified_base 15: mod_base = OTHER; note = 2'-O-methyluridine-3'-phosphate
  modified_base 16: mod_base = OTHER; note = 2'-O-methyladenosine-3'-phosphate
  modified_base 17: mod_base = OTHER; note = 2'-O-methylcytidine-3'-phosphate
  modified_base 18: mod_base = OTHER; note = 2'-O-methylcytidine-3'-phosphate
  modified_base 19: mod_base = OTHER; note = 2'-O-methyladenosine-3'-phosphorothioate
  modified_base 20: mod_base = OTHER; note = 2'-O-methylguanosine-3'-phosphorothioate
  modified_base 21: mod_base = OTHER; note = 2'-O-methyladenosine-3'-phosphate
tgctgctggtttgctaccaga

SEQ ID NO: 3978 - RNA, 21 nt, synthetic construct
  source 1..21: mol_type = other RNA
  modified_base 1: mod_base = OTHER; note = 2'-O-methylcytidine-3'-phosphorothioate
  modified_base 2: mod_base = OTHER; note = 2'-O-methyladenosine-3'-phosphorothioate
  modified_base 3: mod_base = OTHER; note = 2'-O-methylguanosine-3'-phosphate
  modified_base 4: mod_base = OTHER; note = 2'-O-methyladenosine-3'-phosphate
  modified_base 5: mod_base = OTHER; note = 2'-O-methyluridine-3'-phosphate
  modified_base 6: mod_base = OTHER; note 2-amino-9-((2R,3S,4S,5R)-3-(docosyloxy)-4-hydroxy-5-(hydrox ymethyl)tetrahydrofuran-2-yl)-1,9-dihydro-6H-purin-6-one
  modified_base 7: mod_base = OTHER; note = 2'-fluoroadenosine-3'-phosphate
  modified_base 8: mod_base = OTHER; note = 2'-O-methyladenosine-3'-phosphate
  modified_base 9: mod_base = OTHER; note = 2'-fluoroguanosine-3'-phosphate
  modified_base 10: mod_base = OTHER; note = 2'-fluoroadenosine-3'-phosphate
  modified_base 11: mod_base = OTHER; note = 2'-fluoroguanosine-3'-phosphate
  modified_base 12: mod_base = OTHER; note = 2'-O-methylguanosine-3'-phosphate
  modified_base 13: mod_base = OTHER; note = 2'-O-methyladenosine-3'-phosphate
  modified_base 14: mod_base = OTHER; note = 2'-O-methyladenosine-3'-phosphate
  modified_base 15: mod_base = OTHER; note = 2'-O-methyluridine-3'-phosphate
  modified_base 16: mod_base = OTHER; note = 2'-O-methyladenosine-3'-phosphate
  modified_base 17: mod_base = OTHER; note = 2'-O-methylguanosine-3'-phosphate
  modified_base 18: mod_base = OTHER; note = 2'-O-methylcytidine-3'-phosphate
  modified_base 19: mod_base = OTHER; note = 2'-O-methylguanosine-3'-phosphorothioate
  modified_base 20: mod_base = OTHER; note = 2'-O-methyladenosine-3'-phosphorothioate
  modified_base 21: mod_base = OTHER; note = 2'-O-methyladenosine-3'-phosphate
cagatgaagaggaatagcgaa

SEQ ID NO: 3979 - RNA, 21 nt, synthetic construct
  source 1..21: mol_type = other RNA
  modified_base 1: mod_base = OTHER; note = 2'-O-methyladenosine-3'-phosphorothioate
  modified_base 2: mod_base = OTHER; note = 2'-O-methyluridine-3'-phosphorothioate
  modified_base 3: mod_base = OTHER; note = 2'-O-methylcytidine-3'-phosphate
  modified_base 4: mod_base = OTHER; note = 2'-O-methylcytidine-3'-phosphate
  modified_base 5: mod_base = OTHER; note = 2'-O-methyladenosine-3'-phosphate
  modified_base 6: mod_base = OTHER; note 2-amino-9-((2R,3S,4S,5R)-3-(docosyloxy)-4-hydroxy-5-(hydrox ymethyl)tetrahydrofuran-2-yl)-1,9-dihydro-6H-purin-6-one
  modified_base 7: mod_base = OTHER; note = 2'-fluoroguanosine-3'-phosphate
  modified_base 8: mod_base = OTHER; note = 2'-O-methyluridine-3'-phosphate
  modified_base 9: mod_base = OTHER; note = 2'-fluoroguanosine-3'-phosphate
  modified_base 10: mod_base = OTHER; note = 2'-fluorocytidine-3'-phosphate
  modified_base 11: mod_base = OTHER; note = 2'-fluoroadenosine-3'-phosphate
  modified_base 12: mod_base = OTHER; note = 2'-O-methyluridine-3'-phosphate
  modified_base 13: mod_base = OTHER; note = 2'-O-methylcytidine-3'-phosphate
  modified_base 14: mod_base = OTHER; note = 2'-O-methyladenosine-3'-phosphate
  modified_base 15: mod_base = OTHER; note = 2'-O-methyladenosine-3'-phosphate
  modified_base 16: mod_base = OTHER; note = 2'-O-methyluridine-3'-phosphate
  modified_base 17: mod_base = OTHER; note = 2'-O-methyluridine-3'-phosphate
  modified_base 18: mod_base = OTHER; note = 2'-O-methyluridine-3'-phosphate
  modified_base 19: mod_base = OTHER; note = 2'-O-methylcytidine-3'-phosphorothioate
  modified_base 20: mod_base = OTHER; note = 2'-O-methyluridine-3'-phosphorothioate
  modified_base 21: mod_base = OTHER; note = 2'-O-methyladenosine-3'-phosphate
atccaggtgcatcaatttcta

SEQ ID NO: 3980 - RNA, 21 nt, synthetic construct
  source 1..21: mol_type = other RNA
  modified_base 1: mod_base = OTHER; note = 2'-O-methyladenosine-3'-phosphorothioate
  modified_base 2: mod_base = OTHER; note = 2'-O-methyladenosine-3'-phosphorothioate
  modified_base 3: mod_base = OTHER; note = 2'-O-methyluridine-3'-phosphate
  modified_base 4: mod_base = OTHER; note = 2'-O-methyladenosine-3'-phosphate
  modified_base 5: mod_base = OTHER; note = 2'-O-methyladenosine-3'-phosphate
  modified_base 6: mod_base = OTHER; note 2-amino-9-((2R,3S,4S,5R)-3-(docosyloxy)-4-hydroxy-5-(hydrox ymethyl)tetrahydrofuran-2-yl)-1,9-dihydro-6H-purin-6-one
  modified_base 7: mod_base = OTHER; note = 2'-fluorocytidine-3'-phosphate
  modified_base 8: mod_base = OTHER; note = 2'-O-methylcytidine-3'-phosphate
  modified_base 9: mod_base = OTHER; note = 2'-fluoroadenosine-3'-phosphate
  modified_base 10: mod_base = OTHER; note = 2'-fluoroadenosine-3'-phosphate
  modified_base 11: mod_base = OTHER; note = 2'-fluoroguanosine-3'-phosphate
  modified_base 12: mod_base = OTHER; note = 2'-O-methylcytidine-3'-phosphate
  modified_base 13: mod_base = OTHER; note = 2'-O-methylguanosine-3'-phosphate
  modified_base 14: mod_base = OTHER; note = 2'-O-methyluridine-3'-phosphate
  modified_base 15: mod_base = OTHER; note = 2'-O-methyluridine-3'-phosphate
  modified_base 16: mod_base = OTHER; note = 2'-O-methyladenosine-3'-phosphate
  modified_base 17: mod_base = OTHER; note = 2'-O-methyluridine-3'-phosphate
  modified_base 18: mod_base = OTHER; note = 2'-O-methylcytidine-3'-phosphate
  modified_base 19: mod_base = OTHER; note = 2'-O-methyluridine-3'-phosphorothioate
  modified_base 20: mod_base = OTHER; note = 2'-O-methyluridine-3'-phosphorothioate
  modified_base 21: mod_base = OTHER; note = 2'-O-methyladenosine-3'-phosphate
aataagccaagcgttatctta

SEQ ID NO: 3981 - RNA, 21 nt, synthetic construct
  source 1..21: mol_type = other RNA
  modified_base 1: mod_base = OTHER; note = 2'-O-methylguanosine-3'-phosphorothioate
  modified_base 2: mod_base = OTHER; note = 2'-O-methyladenosine-3'-phosphorothioate
  modified_base 3: mod_base = OTHER; note = 2'-O-methylguanosine-3'-phosphate
  modified_base 4: mod_base = OTHER; note = 2'-O-methyladenosine-3'-phosphate
  modified_base 5: mod_base = OTHER; note = 2'-O-methylguanosine-3'-phosphate
  modified_base 6: mod_base = OTHER; note 2-amino-9-((2R,3S,4S,5R)-3-(docosyloxy)-4-hydroxy-5-(hydrox ymethyl)tetrahydrofuran-2-yl)-1,9-dihydro-6H-purin-6-one
  modified_base 7: mod_base = OTHER; note = 2'-fluoroadenosine-3'-phosphate
  modified_base 8: mod_base = OTHER; note = 2'-O-methyluridine-3'-phosphate
  modified_base 9: mod_base = OTHER; note = 2'-fluorocytidine-3'-phosphate
  modified_base 10: mod_base = OTHER; note = 2'-fluorocytidine-3'-phosphate
  modified_base 11: mod_base = OTHER; note = 2'-fluorouridine-3'-phosphate
  modified_base 12: mod_base = OTHER; note = 2'-O-methyluridine-3'-phosphate
  modified_base 13: mod_base = OTHER; note = 2'-O-methylguanosine-3'-phosphate
  modified_base 14: mod_base = OTHER; note = 2'-O-methylcytidine-3'-phosphate
  modified_base 15: mod_base = OTHER; note = 2'-O-methyluridine-3'-phosphate
  modified_base 16: mod_base = OTHER; note = 2'-O-methylcytidine-3'-phosphate
  modified_base 17: mod_base = OTHER; note = 2'-O-methyluridine-3'-phosphate
  modified_base 18: mod_base = OTHER; note = 2'-O-methylguanosine-3'-phosphate
  modified_base 19: mod_base = OTHER; note = 2'-O-methylcytidine-3'-phosphorothioate
  modified_base 20: mod_base = OTHER; note = 2'-O-methyluridine-3'-phosphorothioate
  modified_base 21: mod_base = OTHER; note = 2'-O-methyladenosine-3'-phosphate
gagaggatccttgctctgcta

SEQ ID NO: 3982 - RNA, 21 nt, synthetic construct
  source 1..21: mol_type = other RNA
  modified_base 1: mod_base = OTHER; note = 2'-O-methyladenosine-3'-phosphorothioate
  modified_base 2: mod_base = OTHER; note = 2'-O-methyluridine-3'-phosphorothioate
  modified_base 3: mod_base = OTHER; note = 2'-O-methylguanosine-3'-phosphate
  modified_base 4: mod_base = OTHER; note = 2'-O-methyladenosine-3'-phosphate
  modified_base 5: mod_base = OTHER; note = 2'-O-methyluridine-3'-phosphate
  modified_base 6: mod_base = OTHER; note 2-amino-9-((2R,3S,4S,5R)-3-(docosyloxy)-4-hydroxy-5-(hydrox ymethyl)tetrahydrofuran-2-yl)-1,9-dihydro-6H-purin-6-one
  modified_base 7: mod_base = OTHER; note = 2'-fluoroadenosine-3'-phosphate
  modified_base 8: mod_base = OTHER; note = 2'-O-methyladenosine-3'-phosphate
  modified_base 9: mod_base = OTHER; note = 2'-fluoroguanosine-3'-phosphate
  modified_base 10: mod_base = OTHER; note = 2'-fluoroadenosine-3'-phosphate
  modified_base 11: mod_base = OTHER; note = 2'-fluorocytidine-3'-phosphate
  modified_base 12: mod_base = OTHER; note = 2'-O-methylguanosine-3'-phosphate
  modified_base 13: mod_base = OTHER; note = 2'-O-methylguanosine-3'-phosphate
  modified_base 14: mod_base = OTHER; note = 2'-O-methyluridine-3'-phosphate
  modified_base 15: mod_base = OTHER; note = 2'-O-methylguanosine-3'-phosphate
  modified_base 16: mod_base = OTHER; note = 2'-O-methyladenosine-3'-phosphate
  modified_base 17: mod_base = OTHER; note = 2'-O-methyladenosine-3'-phosphate
  modified_base 18: mod_base = OTHER; note = 2'-O-methylguanosine-3'-phosphate
  modified_base 19: mod_base = OTHER; note = 2'-O-methyladenosine-3'-phosphorothioate
  modified_base 20: mod_base = OTHER; note = 2'-O-methyladenosine-3'-phosphorothioate
  modified_base 21: mod_base = OTHER; note = 2'-O-methyladenosine-3'-phosphate
atgatgaagacggtgaagaaa

SEQ ID NO: 3983 - RNA, 21 nt, synthetic construct
  source 1..21: mol_type = other RNA
  modified_base 1: mod_base = OTHER; note = 2'-O-methyluridine-3'-phosphorothioate
  modified_base 2: mod_base = OTHER; note = 2'-O-methylcytidine-3'-phosphorothioate
  modified_base 3: mod_base = OTHER; note = 2'-O-methylguanosine-3'-phosphate
  modified_base 4: mod_base = OTHER; note = 2'-O-methyluridine-3'-phosphate
  modified_base 5: mod_base = OTHER; note = 2'-O-methyladenosine-3'-phosphate
  modified_base 6: mod_base = OTHER; note (2R,3S,4S,5R)-5-(6-amino-9H-purin-9-yl)-4-(docosyloxy)-2-(h ydroxymethyl)tetrahydrofuran-3-ol
  modified_base 7: mod_base = OTHER; note = 2'-fluoroguanosine-3'-phosphate
  modified_base 8: mod_base = OTHER; note = 2'-O-methyluridine-3'-phosphate
  modified_base 9: mod_base = OTHER; note = 2'-fluoroguanosine-3'-phosphate
  modified_base 10: mod_base = OTHER; note = 2'-fluorouridine-3'-phosphate
  modified_base 11: mod_base = OTHER; note = 2'-fluoroadenosine-3'-phosphate
  modified_base 12: mod_base = OTHER; note = 2'-O-methyladenosine-3'-phosphate
  modified_base 13: mod_base = OTHER; note = 2'-O-methylguanosine-3'-phosphate
  modified_base 14: mod_base = OTHER; note = 2'-O-methyladenosine-3'-phosphate
  modified_base 15: mod_base = OTHER; note = 2'-O-methyladenosine-3'-phosphate
  modified_base 16: mod_base = OTHER; note = 2'-O-methyladenosine-3'-phosphate
  modified_base 17: mod_base = OTHER; note = 2'-O-methylguanosine-3'-phosphate
  modified_base 18: mod_base = OTHER; note = 2'-O-methyladenosine-3'-phosphate
  modified_base 19: mod_base = OTHER; note = 2'-O-methyladenosine-3'-phosphorothioate
  modified_base 20: mod_base = OTHER; note = 2'-O-methyluridine-3'-phosphorothioate
  modified_base 21: mod_base = OTHER; note = 2'-O-methyladenosine-3'-phosphate
tcgtaagtgtaagaaagaata

SEQ ID NO: 3984 - RNA, 21 nt, synthetic construct
  source 1..21: mol_type = other RNA
  modified_base 1: mod_base = OTHER; note = 2'-O-methyladenosine-3'-phosphorothioate
  modified_base 2: mod_base = OTHER; note = 2'-O-methyluridine-3'-phosphorothioate
  modified_base 3: mod_base = OTHER; note = 2'-O-methylcytidine-3'-phosphate
  modified_base 4: mod_base = OTHER; note = 2'-O-methyluridine-3'-phosphate
  modified_base 5: mod_base = OTHER; note = 2'-O-methylguanosine-3'-phosphate
  modified_base 6: mod_base = OTHER; note 1-((2R,3R,4R,5R)-3-(docosyloxy)-4-hydroxy-5-(hydroxymethyl) tetrahydrofuran-2-yl)pyrimidine-2,4(1H,3H)-dione
  modified_base 7: mod_base = OTHER; note = 2'-fluoroguanosine-3'-phosphate
  modified_base 8: mod_base = OTHER; note = 2'-O-methyluridine-3'-phosphate
  modified_base 9: mod_base = OTHER; note = 2'-fluoroadenosine-3'-phosphate
  modified_base 10: mod_base = OTHER; note = 2'-fluoroadenosine-3'-phosphate
  modified_base 11: mod_base = OTHER; note = 2'-fluorocytidine-3'-phosphate
  modified_base 12: mod_base = OTHER; note = 2'-O-methyladenosine-3'-phosphate
  modified_base 13: mod_base = OTHER; note = 2'-O-methylguanosine-3'-phosphate
  modified_base 14: mod_base = OTHER; note = 2'-O-methylcytidine-3'-phosphate
  modified_base 15: mod_base = OTHER; note = 2'-O-methyluridine-3'-phosphate
  modified_base 16: mod_base = OTHER; note = 2'-O-methylguanosine-3'-phosphate
  modified_base 17: mod_base = OTHER; note = 2'-O-methyluridine-3'-phosphate
  modified_base 18: mod_base = OTHER; note = 2'-O-methylguanosine-3'-phosphate
  modified_base 19: mod_base = OTHER; note = 2'-O-methylguanosine-3'-phosphorothioate
  modified_base 20: mod_base = OTHER; note = 2'-O-methyladenosine-3'-phosphorothioate
  modified_base 21: mod_base = OTHER; note = 2'-O-methyladenosine-3'-phosphate
atctgtgtaacagctgtggaa

SEQ ID NO: 3985 - RNA, 21 nt, synthetic construct
  source 1..21: mol_type = other RNA
  modified_base 1: mod_base = OTHER; note = 2'-O-methyladenosine-3'-phosphorothioate
  modified_base 2: mod_base = OTHER; note = 2'-O-methyluridine-3'-phosphorothioate
  modified_base 3: mod_base = OTHER; note = 2'-O-methyluridine-3'-phosphate
  modified_base 4: mod_base = OTHER; note = 2'-O-methyluridine-3'-phosphate
  modified_base 5: mod_base = OTHER; note = 2'-O-methyladenosine-3'-phosphate
  modified_base 6: mod_base = OTHER; note (2R,3S,4S,5R)-5-(6-amino-9H-purin-9-yl)-4-(docosyloxy)-2-(h ydroxymethyl)tetrahydrofuran-3-ol
  modified_base 7: mod_base = OTHER; note = 2'-fluoroadenosine-3'-phosphate
  modified_base 8: mod_base = OTHER; note = 2'-O-methyladenosine-3'-phosphate
  modified_base 9: mod_base = OTHER; note = 2'-fluorouridine-3'-phosphate
  modified_base 10: mod_base = OTHER; note = 2'-fluorouridine-3'-phosphate
  modified_base 11: mod_base = OTHER; note = 2'-fluorocytidine-3'-phosphate
  modified_base 12: mod_base = OTHER; note = 2'-O-methylcytidine-3'-phosphate
  modified_base 13: mod_base = OTHER; note = 2'-O-methylcytidine-3'-phosphate
  modified_base 14: mod_base = OTHER; note = 2'-O-methyladenosine-3'-phosphate
  modified_base 15: mod_base = OTHER; note = 2'-O-methylcytidine-3'-phosphate
  modified_base 16: mod_base = OTHER; note = 2'-O-methyluridine-3'-phosphate
  modified_base 17: mod_base = OTHER; note = 2'-O-methylcytidine-3'-phosphate
  modified_base 18: mod_base = OTHER; note = 2'-O-methyladenosine-3'-phosphate
  modified_base 19: mod_base = OTHER; note = 2'-O-methyladenosine-3'-phosphorothioate
  modified_base 20: mod_base = OTHER; note = 2'-O-methylcytidine-3'-phosphorothioate
  modified_base 21: mod_base = OTHER; note = 2'-O-methyladenosine-3'-phosphate
atttaaaattcccactcaaca

SEQ ID NO: 3986 - RNA, 21 nt, synthetic construct
  source 1..21: mol_type = other RNA
  modified_base 1: mod_base = OTHER; note = 2'-O-methylguanosine-3'-phosphorothioate
  modified_base 2: mod_base = OTHER; note = 2'-O-methyladenosine-3'-phosphorothioate
  modified_base 3: mod_base = OTHER; note = 2'-O-methylcytidine-3'-phosphate
  modified_base 4: mod_base = OTHER; note = 2'-O-methylcytidine-3'-phosphate
  modified_base 5: mod_base = OTHER; note = 2'-O-methyladenosine-3'-phosphate
  modified_base 6: mod_base = OTHER; note 2-amino-9-((2R,3S,4S,5R)-3-(docosyloxy)-4-hydroxy-5-(hydrox ymethyl)tetrahydrofuran-2-yl)-1,9-dihydro-6H-purin-6-one
  modified_base 7: mod_base = OTHER; note = 2'-fluorouridine-3'-phosphate
  modified_base 8: mod_base = OTHER; note = 2'-O-methylguanosine-3'-phosphate
  modified_base 9: mod_base = OTHER; note = 2'-fluorouridine-3'-phosphate
  modified_base 10: mod_base = OTHER; note = 2'-fluorocytidine-3'-phosphate
  modified_base 11: mod_base = OTHER; note = 2'-fluorouridine-3'-phosphate
  modified_base 12: mod_base = OTHER; note = 2'-O-methyladenosine-3'-phosphate
  modified_base 13: mod_base = OTHER; note = 2'-O-methylcytidine-3'-phosphate
  modified_base 14: mod_base = OTHER; note = 2'-O-methyluridine-3'-phosphate
  modified_base 15: mod_base = OTHER; note = 2'-O-methylguanosine-3'-phosphate
  modified_base 16: mod_base = OTHER; note = 2'-O-methylguanosine-3'-phosphate
  modified_base 17: mod_base = OTHER; note = 2'-O-methylcytidine-3'-phosphate
  modified_base 18: mod_base = OTHER; note = 2'-O-methyluridine-3'-phosphate
  modified_base 19: mod_base = OTHER; note = 2'-O-methylcytidine-3'-phosphorothioate
  modified_base 20: mod_base = OTHER; note = 2'-O-methyluridine-3'-phosphorothioate
  modified_base 21: mod_base = OTHER; note = 2'-O-methyladenosine-3'-phosphate
gaccagtgtctactggctcta

SEQ ID NO: 3987 - RNA, 21 nt, synthetic construct
  source 1..21: mol_type = other RNA
  modified_base 1: mod_base = OTHER; note = 2'-O-methylcytidine-3'-phosphorothioate
  modified_base 2: mod_base = OTHER; note = 2'-O-methylguanosine-3'-phosphorothioate
  modified_base 3: mod_base = OTHER; note = 2'-O-methylcytidine-3'-phosphate
  modified_base 4: mod_base = OTHER; note = 2'-O-methyluridine-3'-phosphate
  modified_base 5: mod_base = OTHER; note = 2'-O-methyluridine-3'-phosphate
  modified_base 6: mod_base = OTHER; note 1-((2R,3R,4R,5R)-3-(docosyloxy)-4-hydroxy-5-(hydroxymethyl) tetrahydrofuran-2-yl)pyrimidine-2,4(1H,3H)-dione
  modified_base 7: mod_base = OTHER; note = 2'-fluorocytidine-3'-phosphate
  modified_base 8: mod_base = OTHER; note = 2'-O-methylguanosine-3'-phosphate
  modified_base 9: mod_base = OTHER; note = 2'-fluorouridine-3'-phosphate
  modified_base 10: mod_base = OTHER; note = 2'-fluorouridine-3'-phosphate
  modified_base 11: mod_base = OTHER; note = 2'-fluorouridine-3'-phosphate
  modified_base 12: mod_base = OTHER; note = 2'-O-methyluridine-3'-phosphate
  modified_base 13: mod_base = OTHER; note = 2'-O-methyluridine-3'-phosphate
  modified_base 14: mod_base = OTHER; note = 2'-O-methyluridine-3'-phosphate
  modified_base 15: mod_base = OTHER; note = 2'-O-methyladenosine-3'-phosphate
  modified_base 16: mod_base = OTHER; note = 2'-O-methylguanosine-3'-phosphate
  modified_base 17: mod_base = OTHER; note = 2'-O-methyluridine-3'-phosphate
  modified_base 18: mod_base = OTHER; note = 2'-O-methylcytidine-3'-phosphate
  modified_base 19: mod_base = OTHER; note = 2'-O-methyladenosine-3'-phosphorothioate
  modified_base 20: mod_base = OTHER; note = 2'-O-methyluridine-3'-phosphorothioate
  modified_base 21: mod_base = OTHER; note = 2'-O-methyladenosine-3'-phosphate
cgctttcgttttttagtcata

SEQ ID NO: 3988 - RNA, 21 nt, synthetic construct
  source 1..21: mol_type = other RNA
  modified_base 1: mod_base = OTHER; note = 2'-O-methyluridine-3'-phosphorothioate
  modified_base 2: mod_base = OTHER; note = 2'-O-methylcytidine-3'-phosphorothioate
  modified_base 3: mod_base = OTHER; note = 2'-O-methylcytidine-3'-phosphate
  modified_base 4: mod_base = OTHER; note = 2'-O-methylguanosine-3'-phosphate
  modified_base 5: mod_base = OTHER; note = 2'-O-methyluridine-3'-phosphate
  modified_base 6: mod_base = OTHER; note 2-amino-9-((2R,3S,4S,5R)-3-(docosyloxy)-4-hydroxy-5-(hydrox ymethyl)tetrahydrofuran-2-yl)-1,9-dihydro-6H-purin-6-one
  modified_base 7: mod_base = OTHER; note = 2'-fluorouridine-3'-phosphate
  modified_base 8: mod_base = OTHER; note = 2'-O-methyluridine-3'-phosphate
  modified_base 9: mod_base = OTHER; note = 2'-fluoroguanosine-3'-phosphate
  modified_base 10: mod_base = OTHER; note = 2'-fluoroadenosine-3'-phosphate
  modified_base 11: mod_base = OTHER; note = 2'-fluorocytidine-3'-phosphate
  modified_base 12: mod_base = OTHER; note = 2'-O-methylcytidine-3'-phosphate
  modified_base 13: mod_base = OTHER; note = 2'-O-methylcytidine-3'-phosphate
  modified_base 14: mod_base = OTHER; note = 2'-O-methyladenosine-3'-phosphate
  modified_base 15: mod_base = OTHER; note = 2'-O-methyluridine-3'-phosphate
  modified_base 16: mod_base = OTHER; note = 2'-O-methylguanosine-3'-phosphate
  modified_base 17: mod_base = OTHER; note = 2'-O-methyluridine-3'-phosphate
  modified_base 18: mod_base = OTHER; note = 2'-O-methyluridine-3'-phosphate
  modified_base 19: mod_base = OTHER; note = 2'-O-methylguanosine-3'-phosphorothioate
  modified_base 20: mod_base = OTHER; note = 2'-O-methylcytidine-3'-phosphorothioate
  modified_base 21: mod_base = OTHER; note = 2'-O-methyladenosine-3'-phosphate
tccgtgttgacccatgttgca

SEQ ID NO: 3989 - RNA, 21 nt, synthetic construct
  source 1..21: mol_type = other RNA
  modified_base 1: mod_base = OTHER; note = 2'-O-methyladenosine-3'-phosphorothioate
  modified_base 2: mod_base = OTHER; note = 2'-O-methyluridine-3'-phosphorothioate
  modified_base 3: mod_base = OTHER; note = 2'-O-methyladenosine-3'-phosphate
  modified_base 4: mod_base = OTHER; note = 2'-O-methylcytidine-3'-phosphate
  modified_base 5: mod_base = OTHER; note = 2'-O-methyladenosine-3'-phosphate
  modified_base 6: mod_base = OTHER; note 2-amino-9-((2R,3S,4S,5R)-3-(docosyloxy)-4-hydroxy-5-(hydrox ymethyl)tetrahydrofuran-2-yl)-1,9-dihydro-6H-purin-6-one
  modified_base 7: mod_base = OTHER; note = 2'-fluoroadenosine-3'-phosphate
  modified_base 8: mod_base = OTHER; note = 2'-O-methyladenosine-3'-phosphate
  modified_base 9: mod_base = OTHER; note = 2'-fluoroguanosine-3'-phosphate
  modified_base 10: mod_base = OTHER; note = 2'-fluoroadenosine-3'-phosphate
  modified_base 11: mod_base = OTHER; note = 2'-fluorouridine-3'-phosphate
  modified_base 12: mod_base = OTHER; note = 2'-O-methylguanosine-3'-phosphate
  modified_base 13: mod_base = OTHER; note = 2'-O-methyladenosine-3'-phosphate
  modified_base 14: mod_base = OTHER; note = 2'-O-methyladenosine-3'-phosphate
  modified_base 15: mod_base = OTHER; note = 2'-O-methylguanosine-3'-phosphate
  modified_base 16: mod_base = OTHER; note = 2'-O-methyladenosine-3'-phosphate
  modified_base 17: mod_base = OTHER; note = 2'-O-methyladenosine-3'-phosphate
  modified_base 18: mod_base = OTHER; note = 2'-O-methyladenosine-3'-phosphate
  modified_base 19: mod_base = OTHER; note = 2'-O-methyluridine-3'-phosphorothioate
  modified_base 20: mod_base = OTHER; note = 2'-O-methylguanosine-3'-phosphorothioate
  modified_base 21: mod_base = OTHER; note = 2'-O-methyladenosine-3'-phosphate
atacagaagatgaagaaatga

SEQ ID NO: 3990 - RNA, 21 nt, synthetic construct
  source 1..21: mol_type = other RNA
  modified_base 1: mod_base = OTHER; note = 2'-O-methyluridine-3'-phosphorothioate
  modified_base 2: mod_base = OTHER; note = 2'-O-methylcytidine-3'-phosphorothioate
  modified_base 3: mod_base = OTHER; note = 2'-O-methyluridine-3'-phosphate
  modified_base 4: mod_base = OTHER; note = 2'-O-methylcytidine-3'-phosphate
  modified_base 5: mod_base = OTHER; note = 2'-O-methylcytidine-3'-phosphate
  modified_base 6: mod_base = OTHER; note 4-amino-1-((2R,3R,4R,5R)-3-(docosyloxy)-4-hydroxy-5-(hydrox ymethyl)tetrahydrofuran-2-yl)pyrimidin-2(1H)-one
  modified_base 7: mod_base = OTHER; note = 2'-fluoroguanosine-3'-phosphate
  modified_base 8: mod_base = OTHER; note = 2'-O-methyladenosine-3'-phosphate
  modified_base 9: mod_base = OTHER; note = 2'-fluoroguanosine-3'-phosphate
  modified_base 10: mod_base = OTHER; note = 2'-fluorocytidine-3'-phosphate
  modified_base 11: mod_base = OTHER; note = 2'-fluorouridine-3'-phosphate
  modified_base 12: mod_base = OTHER; note = 2'-O-methylguanosine-3'-phosphate
  modified_base 13: mod_base = OTHER; note = 2'-O-methyladenosine-3'-phosphate
  modified_base 14: mod_base = OTHER; note = 2'-O-methyladenosine-3'-phosphate
  modified_base 15: mod_base = OTHER; note = 2'-O-methyladenosine-3'-phosphate
  modified_base 16: mod_base = OTHER; note = 2'-O-methylcytidine-3'-phosphate
  modified_base 17: mod_base = OTHER; note = 2'-O-methyluridine-3'-phosphate
  modified_base 18: mod_base = OTHER; note = 2'-O-methyluridine-3'-phosphate
  modified_base 19: mod_base = OTHER; note = 2'-O-methyladenosine-3'-phosphorothioate
  modified_base 20: mod_base = OTHER; note = 2'-O-methyladenosine-3'-phosphorothioate
  modified_base 21: mod_base = OTHER; note = 2'-O-methyladenosine-3'-phosphate
tctcccgagctgaaacttaaa

SEQ ID NO: 3991 - RNA, 21 nt, synthetic construct
  source 1..21: mol_type = other RNA
  modified_base 1: mod_base = OTHER; note = 2'-O-methyluridine-3'-phosphorothioate
  modified_base 2: mod_base = OTHER; note = 2'-O-methylguanosine-3'-phosphorothioate
  modified_base 3: mod_base = OTHER; note = 2'-O-methylcytidine-3'-phosphate
  modified_base 4: mod_base = OTHER; note = 2'-O-methyladenosine-3'-phosphate
  modified_base 5: mod_base = OTHER; note = 2'-O-methyluridine-3'-phosphate
  modified_base 6: mod_base = OTHER; note 4-amino-1-((2R,3R,4R,5R)-3-(docosyloxy)-4-hydroxy-5-(hydrox ymethyl)tetrahydrofuran-2-yl)pyrimidin-2(1H)-one
  modified_base 7: mod_base = OTHER; note = 2'-fluoroadenosine-3'-phosphate
  modified_base 8: mod_base = OTHER; note = 2'-O-methyladenosine-3'-phosphate
  modified_base 9: mod_base = OTHER; note = 2'-fluoroadenosine-3'-phosphate
  modified_base 10: mod_base = OTHER; note = 2'-fluorocytidine-3'-phosphate
  modified_base 11: mod_base = OTHER; note = 2'-fluorouridine-3'-phosphate
  modified_base 12: mod_base = OTHER; note = 2'-O-methylguanosine-3'-phosphate
  modified_base 13: mod_base = OTHER; note = 2'-O-methylguanosine-3'-phosphate
  modified_base 14: mod_base = OTHER; note = 2'-O-methylcytidine-3'-phosphate
  modified_base 15: mod_base = OTHER; note = 2'-O-methyladenosine-3'-phosphate
  modified_base 16: mod_base = OTHER; note = 2'-O-methylguanosine-3'-phosphate
  modified_base 17: mod_base = OTHER; note = 2'-O-methyladenosine-3'-phosphate
  modified_base 18: mod_base = OTHER; note = 2'-O-methyluridine-3'-phosphate
  modified_base 19: mod_base = OTHER; note = 2'-O-methyladenosine-3'-phosphorothioate
  modified_base 20: mod_base = OTHER; note = 2'-O-methyluridine-3'-phosphorothioate
  modified_base 21: mod_base = OTHER; note = 2'-O-methyladenosine-3'-phosphate
tgcatcaaactggcagatata

SEQ ID NO: 3992 - RNA, 21 nt, synthetic construct
  source 1..21: mol_type = other RNA
  modified_base 1: mod_base = OTHER; note = 2'-O-methyluridine-3'-phosphorothioate
  modified_base 2: mod_base = OTHER; note = 2'-O-methyluridine-3'-phosphorothioate
  modified_base 3: mod_base = OTHER; note = 2'-O-methylguanosine-3'-phosphate
  modified_base 4: mod_base = OTHER; note = 2'-O-methylcytidine-3'-phosphate
  modified_base 5: mod_base = OTHER; note = 2'-O-methyladenosine-3'-phosphate
  modified_base 6: mod_base = OTHER; note (2R,3S,4S,5R)-5-(6-amino-9H-purin-9-yl)-4-(docosyloxy)-2-(h ydroxymethyl)tetrahydrofuran-3-ol
  modified_base 7: mod_base = OTHER; note = 2'-fluoroadenosine-3'-phosphate
  modified_base 8: mod_base = OTHER; note = 2'-O-methyladenosine-3'-phosphate
  modified_base 9: mod_base = OTHER; note = 2'-fluorouridine-3'-phosphate
  modified_base 10: mod_base = OTHER; note = 2'-fluoroadenosine-3'-phosphate
  modified_base 11: mod_base = OTHER; note = 2'-fluorouridine-3'-phosphate
  modified_base 12: mod_base = OTHER; note = 2'-O-methyluridine-3'-phosphate
  modified_base 13: mod_base = OTHER; note = 2'-O-methylcytidine-3'-phosphate
  modified_base 14: mod_base = OTHER; note = 2'-O-methyladenosine-3'-phosphate
  modified_base 15: mod_base = OTHER; note = 2'-O-methylguanosine-3'-phosphate
  modified_base 16: mod_base = OTHER; note = 2'-O-methylguanosine-3'-phosphate
  modified_base 17: mod_base = OTHER; note = 2'-O-methyladenosine-3'-phosphate
  modified_base 18: mod_base = OTHER; note = 2'-O-methylguanosine-3'-phosphate
  modified_base 19: mod_base = OTHER; note = 2'-O-methyladenosine-3'-phosphorothioate
  modified_base 20: mod_base = OTHER; note = 2'-O-methylcytidine-3'-phosphorothioate
  modified_base 21: mod_base = OTHER; note = 2'-O-methyladenosine-3'-phosphate
ttgcaaaatattcaggagaca

SEQ ID NO: 3993 - RNA, 21 nt, synthetic construct
  source 1..21: mol_type = other RNA
  modified_base 1: mod_base = OTHER; note = 2'-O-methyladenosine-3'-phosphorothioate
  modified_base 2: mod_base = OTHER; note = 2'-O-methylcytidine-3'-phosphorothioate
  modified_base 3: mod_base = OTHER; note = 2'-O-methyladenosine-3'-phosphate
  modified_base 4: mod_base = OTHER; note = 2'-O-methyladenosine-3'-phosphate
  modified_base 5: mod_base = OTHER; note = 2'-O-methyluridine-3'-phosphate
  modified_base 6: mod_base = OTHER; note 4-amino-1-((2R,3R,4R,5R)-3-(docosyloxy)-4-hydroxy-5-(hydrox ymethyl)tetrahydrofuran-2-yl)pyrimidin-2(1H)-one
  modified_base 7: mod_base = OTHER; note = 2'-fluoroguanosine-3'-phosphate
  modified_base 8: mod_base = OTHER; note = 2'-O-methyluridine-3'-phosphate
  modified_base 9: mod_base = OTHER; note = 2'-fluoroadenosine-3'-phosphate
  modified_base 10: mod_base = OTHER; note = 2'-fluorouridine-3'-phosphate
  modified_base 11: mod_base = OTHER; note = 2'-fluoroadenosine-3'-phosphate
  modified_base 12: mod_base = OTHER; note = 2'-O-methylcytidine-3'-phosphate
  modified_base 13: mod_base = OTHER; note = 2'-O-methyladenosine-3'-phosphate
  modified_base 14: mod_base = OTHER; note = 2'-O-methyluridine-3'-phosphate
  modified_base 15: mod_base = OTHER; note = 2'-O-methylguanosine-3'-phosphate
  modified_base 16: mod_base = OTHER; note = 2'-O-methylcytidine-3'-phosphate
  modified_base 17: mod_base = OTHER; note = 2'-O-methylcytidine-3'-phosphate
  modified_base 18: mod_base = OTHER; note = 2'-O-methyladenosine-3'-phosphate
  modified_base 19: mod_base = OTHER; note = 2'-O-methylcytidine-3'-phosphorothioate
  modified_base 20: mod_base = OTHER; note = 2'-O-methyladenosine-3'-phosphorothioate
  modified_base 21: mod_base = OTHER; note = 2'-O-methyladenosine-3'-phosphate
acaatcgtatacatgccacaa

SEQ ID NO: 3994 - RNA, 21 nt, synthetic construct
  source 1..21: mol_type = other RNA
  modified_base 1: mod_base = OTHER; note = 2'-O-methyladenosine-3'-phosphorothioate
  modified_base 2: mod_base = OTHER; note = 2'-O-methyladenosine-3'-phosphorothioate
  modified_base 3: mod_base = OTHER; note = 2'-O-methyluridine-3'-phosphate
  modified_base 4: mod_base = OTHER; note = 2'-O-methyladenosine-3'-phosphate
  modified_base 5: mod_base = OTHER; note = 2'-O-methylguanosine-3'-phosphate
  modified_base 6: mod_base = OTHER; note (2R,3S,4S,5R)-5-(6-amino-9H-purin-9-yl)-4-(docosyloxy)-2-(h ydroxymethyl)tetrahydrofuran-3-ol
  modified_base 7: mod_base = OTHER; note = 2'-fluoroadenosine-3'-phosphate
  modified_base 8: mod_base = OTHER; note = 2'-O-methyladenosine-3'-phosphate
  modified_base 9: mod_base = OTHER; note = 2'-fluoroadenosine-3'-phosphate
  modified_base 10: mod_base = OTHER; note = 2'-fluoroguanosine-3'-phosphate
  modified_base 11: mod_base = OTHER; note = 2'-fluoroadenosine-3'-phosphate
  modified_base 12: mod_base = OTHER; note = 2'-O-methyluridine-3'-phosphate
  modified_base 13: mod_base = OTHER; note = 2'-O-methylguanosine-3'-phosphate
  modified_base 14: mod_base = OTHER; note = 2'-O-methyladenosine-3'-phosphate
  modified_base 15: mod_base = OTHER; note = 2'-O-methylguanosine-3'-phosphate
  modified_base 16: mod_base = OTHER; note = 2'-O-methylcytidine-3'-phosphate
  modified_base 17: mod_base = OTHER; note = 2'-O-methyladenosine-3'-phosphate
  modified_base 18: mod_base = OTHER; note = 2'-O-methyladenosine-3'-phosphate
  modified_base 19: mod_base = OTHER; note = 2'-O-methylcytidine-3'-phosphorothioate
  modified_base 20: mod_base = OTHER; note = 2'-O-methyluridine-3'-phosphorothioate
  modified_base 21: mod_base = OTHER; note = 2'-O-methyladenosine-3'-phosphate
aatagaaaagatgagcaacta

SEQ ID NO: 3995 - RNA, 21 nt, synthetic construct
  source 1..21: mol_type = other RNA
  modified_base 1: mod_base = OTHER; note = 2'-O-methyluridine-3'-phosphorothioate
  modified_base 2: mod_base = OTHER; note = 2'-O-methyladenosine-3'-phosphorothioate
  modified_base 3: mod_base = OTHER; note = 2'-O-methyluridine-3'-phosphate
  modified_base 4: mod_base = OTHER; note = 2'-O-methylcytidine-3'-phosphate
  modified_base 5: mod_base = OTHER; note = 2'-O-methyluridine-3'-phosphate
  modified_base 6: mod_base = OTHER; note 1-((2R,3R,4R,5R)-3-(docosyloxy)-4-hydroxy-5-(hydroxymethyl) tetrahydrofuran-2-yl)pyrimidine-2,4(1H,3H)-dione
  modified_base 7: mod_base = OTHER; note = 2'-fluoroadenosine-3'-phosphate
  modified_base 8: mod_base = OTHER; note = 2'-O-methyluridine-3'-phosphate
  modified_base 9: mod_base = OTHER; note = 2'-fluoroguanosine-3'-phosphate
  modified_base 10: mod_base = OTHER; note = 2'-fluorouridine-3'-phosphate
  modified_base 11: mod_base = OTHER; note = 2'-fluorouridine-3'-phosphate
  modified_base 12: mod_base = OTHER; note = 2'-O-methylcytidine-3'-phosphate
  modified_base 13: mod_base = OTHER; note = 2'-O-methylcytidine-3'-phosphate
  modified_base 14: mod_base = OTHER; note = 2'-O-methyladenosine-3'-phosphate
  modified_base 15: mod_base = OTHER; note = 2'-O-methyluridine-3'-phosphate
  modified_base 16: mod_base = OTHER; note = 2'-O-methylguanosine-3'-phosphate
  modified_base 17: mod_base = OTHER; note = 2'-O-methylguanosine-3'-phosphate
  modified_base 18: mod_base = OTHER; note = 2'-O-methylcytidine-3'-phosphate
  modified_base 19: mod_base = OTHER; note = 2'-O-methyluridine-3'-phosphorothioate
  modified_base 20: mod_base = OTHER; note = 2'-O-methylguanosine-3'-phosphorothioate
  modified_base 21: mod_base = OTHER; note = 2'-O-methyladenosine-3'-phosphate
tatcttatgttccatggctga

SEQ ID NO: 3996 - RNA, 21 nt, synthetic construct
  source 1..21: mol_type = other RNA
  modified_base 1: mod_base = OTHER; note = 2'-O-methylcytidine-3'-phosphorothioate
  modified_base 2: mod_base = OTHER; note = 2'-O-methyluridine-3'-phosphorothioate
  modified_base 3: mod_base = OTHER; note = 2'-O-methyladenosine-3'-phosphate
  modified_base 4: mod_base = OTHER; note = 2'-O-methylcytidine-3'-phosphate
  modified_base 5: mod_base = OTHER; note = 2'-O-methylguanosine-3'-phosphate
  modified_base 6: mod_base = OTHER; note 1-((2R,3R,4R,5R)-3-(docosyloxy)-4-hydroxy-5-(hydroxymethyl) tetrahydrofuran-2-yl)pyrimidine-2,4(1H,3H)-dione
  modified_base 7: mod_base = OTHER; note = 2'-fluoroguanosine-3'-phosphate
  modified_base 8: mod_base = OTHER; note = 2'-O-methyladenosine-3'-phosphate
  modified_base 9: mod_base = OTHER; note = 2'-fluoroadenosine-3'-phosphate
  modified_base 10: mod_base = OTHER; note = 2'-fluoroguanosine-3'-phosphate
  modified_base 11: mod_base = OTHER; note = 2'-fluoroadenosine-3'-phosphate
  modified_base 12: mod_base = OTHER; note = 2'-O-methylguanosine-3'-phosphate
  modified_base 13: mod_base = OTHER; note = 2'-O-methylcytidine-3'-phosphate
  modified_base 14: mod_base = OTHER; note = 2'-O-methyluridine-3'-phosphate
  modified_base 15: mod_base = OTHER; note = 2'-O-methylguanosine-3'-phosphate
  modified_base 16: mod_base = OTHER; note = 2'-O-methylcytidine-3'-phosphate
  modified_base 17: mod_base = OTHER; note = 2'-O-methylguanosine-3'-phosphate
  modified_base 18: mod_base = OTHER; note = 2'-O-methyluridine-3'-phosphate
  modified_base 19: mod_base = OTHER; note = 2'-O-methylguanosine-3'-phosphorothioate
  modified_base 20: mod_base = OTHER; note = 2'-O-methyladenosine-3'-phosphorothioate
  modified_base 21: mod_base = OTHER; note = 2'-O-methyladenosine-3'-phosphate
ctacgtgaagagctgcgtgaa

SEQ ID NO: 3997 - RNA, 21 nt, synthetic construct
  source 1..21: mol_type = other RNA
  modified_base 1: mod_base = OTHER; note = 2'-O-methylguanosine-3'-phosphorothioate
  modified_base 2: mod_base = OTHER; note = 2'-O-methyladenosine-3'-phosphorothioate
  modified_base 3: mod_base = OTHER; note = 2'-O-methyladenosine-3'-phosphate
  modified_base 4: mod_base = OTHER; note = 2'-O-methyluridine-3'-phosphate
  modified_base 5: mod_base = OTHER; note = 2'-O-methyluridine-3'-phosphate
  modified_base 6: mod_base = OTHER; note 2-amino-9-((2R,3S,4S,5R)-3-(docosyloxy)-4-hydroxy-5-(hydrox ymethyl)tetrahydrofuran-2-yl)-1,9-dihydro-6H-purin-6-one
  modified_base 7: mod_base = OTHER; note = 2'-fluoroadenosine-3'-phosphate
  modified_base 8: mod_base = OTHER; note = 2'-O-methyluridine-3'-phosphate
  modified_base 9: mod_base = OTHER; note = 2'-fluoroguanosine-3'-phosphate
  modified_base 10: mod_base = OTHER; note = 2'-fluoroguanosine-3'-phosphate
  modified_base 11: mod_base = OTHER; note = 2'-fluorocytidine-3'-phosphate
  modified_base 12: mod_base = OTHER; note = 2'-O-methyluridine-3'-phosphate
  modified_base 13: mod_base = OTHER; note = 2'-O-methylcytidine-3'-phosphate
  modified_base 14: mod_base = OTHER; note = 2'-O-methyluridine-3'-phosphate
  modified_base 15: mod_base = OTHER; note = 2'-O-methyladenosine-3'-phosphate
  modified_base 16: mod_base = OTHER; note = 2'-O-methyluridine-3'-phosphate
  modified_base 17: mod_base = OTHER; note = 2'-O-methyladenosine-3'-phosphate
  modified_base 18: mod_base = OTHER; note = 2'-O-methylcytidine-3'-phosphate
  modified_base 19: mod_base = OTHER; note = 2'-O-methylguanosine-3'-phosphorothioate
  modified_base 20: mod_base = OTHER; note = 2'-O-methyluridine-3'-phosphorothioate
  modified_base 21: mod_base = OTHER; note = 2'-O-methyladenosine-3'-phosphate
gaattgatggctctatacgta

SEQ ID NO: 3998 - RNA, 21 nt, synthetic construct
  source 1..21: mol_type = other RNA
  modified_base 1: mod_base = OTHER; note = 2'-O-methyluridine-3'-phosphorothioate
  modified_base 2: mod_base = OTHER; note = 2'-O-methyluridine-3'-phosphorothioate
  modified_base 3: mod_base = OTHER; note = 2'-O-methylcytidine-3'-phosphate
  modified_base 4: mod_base = OTHER; note = 2'-O-methyladenosine-3'-phosphate
  modified_base 5: mod_base = OTHER; note = 2'-O-methylguanosine-3'-phosphate
  modified_base 6: mod_base = OTHER; note 2-amino-9-((2R,3S,4S,5R)-3-(docosyloxy)-4-hydroxy-5-(hydrox ymethyl)tetrahydrofuran-2-yl)-1,9-dihydro-6H-purin-6-one
  modified_base 7: mod_base = OTHER; note = 2'-fluorouridine-3'-phosphate
  modified_base 8: mod_base = OTHER; note = 2'-O-methyladenosine-3'-phosphate
  modified_base 9: mod_base = OTHER; note = 2'-fluoroadenosine-3'-phosphate
  modified_base 10: mod_base = OTHER; note = 2'-fluorouridine-3'-phosphate
  modified_base 11: mod_base = OTHER; note = 2'-fluorouridine-3'-phosphate
  modified_base 12: mod_base = OTHER; note = 2'-O-methylguanosine-3'-phosphate
  modified_base 13: mod_base = OTHER; note = 2'-O-methyladenosine-3'-phosphate
  modified_base 14: mod_base = OTHER; note = 2'-O-methyladenosine-3'-phosphate
  modified_base 15: mod_base = OTHER; note = 2'-O-methylguanosine-3'-phosphate
  modified_base 16: mod_base = OTHER; note = 2'-O-methyladenosine-3'-phosphate
  modified_base 17: mod_base = OTHER; note = 2'-O-methylguanosine-3'-phosphate
  modified_base 18: mod_base = OTHER; note = 2'-O-methylguanosine-3'-phosphate
  modified_base 19: mod_base = OTHER; note = 2'-O-methylcytidine-3'-phosphorothioate
  modified_base 20: mod_base = OTHER; note = 2'-O-methyladenosine-3'-phosphorothioate
  modified_base 21: mod_base = OTHER; note = 2'-O-methyladenosine-3'-phosphate
ttcaggtaattgaagaggcaa

SEQ ID NO: 3999 - RNA, 21 nt, synthetic construct
  source 1..21: mol_type = other RNA
  modified_base 1: mod_base = OTHER; note = 2'-O-methyladenosine-3'-phosphorothioate
  modified_base 2: mod_base = OTHER; note = 2'-O-methyladenosine-3'-phosphorothioate
  modified_base 3: mod_base = OTHER; note = 2'-O-methylguanosine-3'-phosphate
  modified_base 4: mod_base = OTHER; note = 2'-O-methylguanosine-3'-phosphate
  modified_base 5: mod_base = OTHER; note = 2'-O-methyladenosine-3'-phosphate
  modified_base 6: mod_base = OTHER; note 4-amino-1-((2R,3R,4R,5R)-3-(docosyloxy)-4-hydroxy-5-(hydrox ymethyl)tetrahydrofuran-2-yl)pyrimidin-2(1H)-one
  modified_base 7: mod_base = OTHER; note = 2'-fluorouridine-3'-phosphate
  modified_base 8: mod_base = OTHER; note = 2'-O-methylguanosine-3'-phosphate
  modified_base 9: mod_base = OTHER; note = 2'-fluoroadenosine-3'-phosphate
  modified_base 10: mod_base = OTHER; note = 2'-fluoroguanosine-3'-phosphate
  modified_base 11: mod_base = OTHER; note = 2'-fluorouridine-3'-phosphate
  modified_base 12: mod_base = OTHER; note = 2'-O-methylguanosine-3'-phosphate
  modified_base 13: mod_base = OTHER; note = 2'-O-methyladenosine-3'-phosphate
  modified_base 14: mod_base = OTHER; note = 2'-O-methylcytidine-3'-phosphate
  modified_base 15: mod_base = OTHER; note = 2'-O-methylcytidine-3'-phosphate
  modified_base 16: mod_base = OTHER; note = 2'-O-methyluridine-3'-phosphate
  modified_base 17: mod_base = OTHER; note = 2'-O-methyluridine-3'-phosphate
  modified_base 18: mod_base = OTHER; note = 2'-O-methyluridine-3'-phosphate
  modified_base 19: mod_base = OTHER; note = 2'-O-methylguanosine-3'-phosphorothioate
  modified_base 20: mod_base = OTHER; note = 2'-O-methyluridine-3'-phosphorothioate
  modified_base 21: mod_base = OTHER; note = 2'-O-methyladenosine-3'-phosphate
aaggactgagtgacctttgta

SEQ ID NO: 4000 - RNA, 21 nt, synthetic construct
  source 1..21: mol_type = other RNA
  modified_base 1: mod_base = OTHER; note = 2'-O-methylcytidine-3'-phosphorothioate
  modified_base 2: mod_base = OTHER; note = 2'-O-methylguanosine-3'-phosphorothioate
  modified_base 3: mod_base = OTHER; note = 2'-O-methyladenosine-3'-phosphate
  modified_base 4: mod_base = OTHER; note = 2'-O-methylguanosine-3'-phosphate
  modified_base 5: mod_base = OTHER; note = 2'-O-methyladenosine-3'-phosphate
  modified_base 6: mod_base = OTHER; note 2-amino-9-((2R,3S,4S,5R)-3-(docosyloxy)-4-hydroxy-5-(hydrox ymethyl)tetrahydrofuran-2-yl)-1,9-dihydro-6H-purin-6-one
  modified_base 7: mod_base = OTHER; note = 2'-fluorouridine-3'-phosphate
  modified_base 8: mod_base = OTHER; note = 2'-O-methylcytidine-3'-phosphate
  modified_base 9: mod_base = OTHER; note = 2'-fluorouridine-3'-phosphate
  modified_base 10: mod_base = OTHER; note = 2'-fluoroguanosine-3'-phosphate
  modified_base 11: mod_base = OTHER; note = 2'-fluoroadenosine-3'-phosphate
  modified_base 12: mod_base = OTHER; note = 2'-O-methylguanosine-3'-phosphate
  modified_base 13: mod_base = OTHER; note = 2'-O-methylguanosine-3'-phosphate
  modified_base 14: mod_base = OTHER; note = 2'-O-methyladenosine-3'-phosphate
  modified_base 15: mod_base = OTHER; note = 2'-O-methyladenosine-3'-phosphate
  modified_base 16: mod_base = OTHER; note = 2'-O-methylcytidine-3'-phosphate
  modified_base 17: mod_base = OTHER; note = 2'-O-methylguanosine-3'-phosphate
  modified_base 18: mod_base = OTHER; note = 2'-O-methylguanosine-3'-phosphate
  modified_base 19: mod_base = OTHER; note = 2'-O-methylcytidine-3'-phosphorothioate
  modified_base 20: mod_base = OTHER; note = 2'-O-methyluridine-3'-phosphorothioate
  modified_base 21: mod_base = OTHER; note = 2'-O-methyladenosine-3'-phosphate
cgagagtctgaggaacggcta

SEQ ID NO: 4001 - RNA, 21 nt, synthetic construct
  source 1..21: mol_type = other RNA
  modified_base 1: mod_base = OTHER; note = 2'-O-methyladenosine-3'-phosphorothioate
  modified_base 2: mod_base = OTHER; note = 2'-O-methyluridine-3'-phosphorothioate
  modified_base 3: mod_base = OTHER; note = 2'-O-methyluridine-3'-phosphate
  modified_base 4: mod_base = OTHER; note = 2'-O-methylcytidine-3'-phosphate
  modified_base 5: mod_base = OTHER; note = 2'-O-methyluridine-3'-phosphate
  modified_base 6: mod_base = OTHER; note 1-((2R,3R,4R,5R)-3-(docosyloxy)-4-hydroxy-5-(hydroxymethyl) tetrahydrofuran-2-yl)pyrimidine-2,4(1H,3H)-dione
  modified_base 7: mod_base = OTHER; note = 2'-fluorouridine-3'-phosphate
  modified_base 8: mod_base = OTHER; note = 2'-O-methylguanosine-3'-phosphate
  modified_base 9: mod_base = OTHER; note = 2'-fluoroguanosine-3'-phosphate
  modified_base 10: mod_base = OTHER; note = 2'-fluoroguanosine-3'-phosphate
  modified_base 11: mod_base = OTHER; note = 2'-fluoroadenosine-3'-phosphate
  modified_base 12: mod_base = OTHER; note = 2'-O-methyluridine-3'-phosphate
  modified_base 13: mod_base = OTHER; note = 2'-O-methyluridine-3'-phosphate
  modified_base 14: mod_base = OTHER; note = 2'-O-methylguanosine-3'-phosphate
  modified_base 15: mod_base = OTHER; note = 2'-O-methylguanosine-3'-phosphate
  modified_base 16: mod_base = OTHER; note = 2'-O-methylguanosine-3'-phosphate
  modified_base 17: mod_base = OTHER; note = 2'-O-methyladenosine-3'-phosphate
  modified_base 18: mod_base = OTHER; note = 2'-O-methylcytidine-3'-phosphate
  modified_base 19: mod_base = OTHER; note = 2'-O-methyluridine-3'-phosphorothioate
  modified_base 20: mod_base = OTHER; note = 2'-O-methyluridine-3'-phosphorothioate
  modified_base 21: mod_base = OTHER; note = 2'-O-methyladenosine-3'-phosphate
attctttgggattgggactta

SEQ ID NO: 4002 - RNA, 21 nt, synthetic construct
  source 1..21: mol_type = other RNA
  modified_base 1: mod_base = OTHER; note = 2'-O-methyluridine-3'-phosphorothioate
  modified_base 2: mod_base = OTHER; note = 2'-O-methyladenosine-3'-phosphorothioate
  modified_base 3: mod_base = OTHER; note = 2'-O-methylcytidine-3'-phosphate
  modified_base 4: mod_base = OTHER; note = 2'-O-methylcytidine-3'-phosphate
  modified_base 5: mod_base = OTHER; note = 2'-O-methyladenosine-3'-phosphate
  modified_base 6: mod_base = OTHER; note 2-amino-9-((2R,3S,4S,5R)-3-(docosyloxy)-4-hydroxy-5-(hydrox ymethyl)tetrahydrofuran-2-yl)-1,9-dihydro-6H-purin-6-one
  modified_base 7: mod_base = OTHER; note = 2'-fluoroguanosine-3'-phosphate
  modified_base 8: mod_base = OTHER; note = 2'-O-methyluridine-3'-phosphate
  modified_base 9: mod_base = OTHER; note = 2'-fluorocytidine-3'-phosphate
  modified_base 10: mod_base = OTHER; note = 2'-fluoroadenosine-3'-phosphate
  modified_base 11: mod_base = OTHER; note = 2'-fluoroguanosine-3'-phosphate
  modified_base 12: mod_base = OTHER; note = 2'-O-methyluridine-3'-phosphate
  modified_base 13: mod_base = OTHER; note = 2'-O-methylguanosine-3'-phosphate
  modified_base 14: mod_base = OTHER; note = 2'-O-methylguanosine-3'-phosphate
  modified_base 15: mod_base = OTHER; note = 2'-O-methyluridine-3'-phosphate
  modified_base 16: mod_base = OTHER; note = 2'-O-methyluridine-3'-phosphate
  modified_base 17: mod_base = OTHER; note = 2'-O-methyladenosine-3'-phosphate
  modified_base 18: mod_base = OTHER; note = 2'-O-methylguanosine-3'-phosphate
  modified_base 19: mod_base = OTHER; note = 2'-O-methyladenosine-3'-phosphorothioate
  modified_base 20: mod_base = OTHER; note = 2'-O-methyladenosine-3'-phosphorothioate
  modified_base 21: mod_base = OTHER; note = 2'-O-methyladenosine-3'-phosphate
taccaggtcagtggttagaaa

SEQ ID NO: 4003 - RNA, 21 nt, synthetic construct
  source 1..21: mol_type = other RNA
  modified_base 1: mod_base = OTHER; note = 2'-O-methyladenosine-3'-phosphorothioate
  modified_base 2: mod_base = OTHER; note = 2'-O-methyluridine-3'-phosphorothioate
  modified_base 3: mod_base = OTHER; note = 2'-O-methyluridine-3'-phosphate
  modified_base 4: mod_base = OTHER; note = 2'-O-methylcytidine-3'-phosphate
  modified_base 5: mod_base = OTHER; note = 2'-O-methyladenosine-3'-phosphate
  modified_base 6: mod_base = OTHER; note 2-amino-9-((2R,3S,4S,5R)-3-(docosyloxy)-4-hydroxy-5-(hydrox ymethyl)tetrahydrofuran-2-yl)-1,9-dihydro-6H-purin-6-one
  modified_base 7: mod_base = OTHER; note = 2'-fluoroguanosine-3'-phosphate
  modified_base 8: mod_base = OTHER; note = 2'-O-methyluridine-3'-phosphate
  modified_base 9: mod_base = OTHER; note = 2'-fluorouridine-3'-phosphate
  modified_base 10: mod_base = OTHER; note = 2'-fluorouridine-3'-phosphate
  modified_base 11: mod_base = OTHER; note = 2'-fluoroguanosine-3'-phosphate
  modified_base 12: mod_base = OTHER; note = 2'-O-methylcytidine-3'-phosphate
  modified_base 13: mod_base = OTHER; note = 2'-O-methylcytidine-3'-phosphate
  modified_base 14: mod_base = OTHER; note = 2'-O-methyladenosine-3'-phosphate
  modified_base 15: mod_base = OTHER; note = 2'-O-methyluridine-3'-phosphate
  modified_base 16: mod_base = OTHER; note = 2'-O-methylguanosine-3'-phosphate
  modified_base 17: mod_base = OTHER; note = 2'-O-methylguanosine-3'-phosphate
  modified_base 18: mod_base = OTHER; note = 2'-O-methyladenosine-3'-phosphate
  modified_base 19: mod_base = OTHER; note = 2'-O-methylcytidine-3'-phosphorothioate
  modified_base 20: mod_base = OTHER; note = 2'-O-methyladenosine-3'-phosphorothioate
  modified_base 21: mod_base = OTHER; note = 2'-O-methyladenosine-3'-phosphate
attcaggtttgccatggacaa

SEQ ID NO: 4004 - RNA, 21 nt, synthetic construct
  source 1..21: mol_type = other RNA
  modified_base 1: mod_base = OTHER; note = 2'-O-methylguanosine-3'-phosphorothioate
  modified_base 2: mod_base = OTHER; note = 2'-O-methylcytidine-3'-phosphorothioate
  modified_base 3: mod_base = OTHER; note = 2'-O-methyladenosine-3'-phosphate
  modified_base 4: mod_base = OTHER; note = 2'-O-methylguanosine-3'-phosphate
  modified_base 5: mod_base = OTHER; note = 2'-O-methylcytidine-3'-phosphate
  modified_base 6: mod_base = OTHER; note 1-((2R,3R,4R,5R)-3-(docosyloxy)-4-hydroxy-5-(hydroxymethyl) tetrahydrofuran-2-yl)pyrimidine-2,4(1H,3H)-dione
  modified_base 7: mod_base = OTHER; note = 2'-fluoroadenosine-3'-phosphate
  modified_base 8: mod_base = OTHER; note = 2'-O-methyladenosine-3'-phosphate
  modified_base 9: mod_base = OTHER; note = 2'-fluoroadenosine-3'-phosphate
  modified_base 10: mod_base = OTHER; note = 2'-fluorocytidine-3'-phosphate
  modified_base 11: mod_base = OTHER; note = 2'-fluorouridine-3'-phosphate
  modified_base 12: mod_base = OTHER; note = 2'-O-methylguanosine-3'-phosphate
  modified_base 13: mod_base = OTHER; note = 2'-O-methylguanosine-3'-phosphate
  modified_base 14: mod_base = OTHER; note = 2'-O-methyluridine-3'-phosphate
  modified_base 15: mod_base = OTHER; note = 2'-O-methylcytidine-3'-phosphate
  modified_base 16: mod_base = OTHER; note = 2'-O-methylcytidine-3'-phosphate
  modified_base 17: mod_base = OTHER; note = 2'-O-methyluridine-3'-phosphate
  modified_base 18: mod_base = OTHER; note = 2'-O-methylguanosine-3'-phosphate
  modified_base 19: mod_base = OTHER; note = 2'-O-methylguanosine-3'-phosphorothioate
  modified_base 20: mod_base = OTHER; note = 2'-O-methyladenosine-3'-phosphorothioate
  modified_base 21: mod_base = OTHER; note = 2'-O-methyladenosine-3'-phosphate
gcagctaaactggtcctggaa

SEQ ID NO: 4005 - RNA, 21 nt, synthetic construct
  source 1..21: mol_type = other RNA
  modified_base 1: mod_base = OTHER; note = 2'-O-methyladenosine-3'-phosphorothioate
  modified_base 2: mod_base = OTHER; note = 2'-O-methylguanosine-3'-phosphorothioate
  modified_base 3: mod_base = OTHER; note = 2'-O-methyluridine-3'-phosphate
  modified_base 4: mod_base = OTHER; note = 2'-O-methyladenosine-3'-phosphate
  modified_base 5: mod_base = OTHER; note = 2'-O-methyladenosine-3'-phosphate
  modified_base 6: mod_base = OTHER; note 1-((2R,3R,4R,5R)-3-(docosyloxy)-4-hydroxy-5-(hydroxymethyl) tetrahydrofuran-2-yl)pyrimidine-2,4(1H,3H)-dione
  modified_base 7: mod_base = OTHER; note = 2'-fluoroguanosine-3'-phosphate
  modified_base 8: mod_base = OTHER; note = 2'-O-methylguanosine-3'-phosphate
  modified_base 9: mod_base = OTHER; note = 2'-fluorocytidine-3'-phosphate
  modified_base 10: mod_base = OTHER; note = 2'-fluoroadenosine-3'-phosphate
  modified_base 11: mod_base = OTHER; note = 2'-fluorouridine-3'-phosphate
  modified_base 12: mod_base = OTHER; note = 2'-O-methyladenosine-3'-phosphate
  modified_base 13: mod_base = OTHER; note = 2'-O-methylguanosine-3'-phosphate
  modified_base 14: mod_base = OTHER; note = 2'-O-methyladenosine-3'-phosphate
  modified_base 15: mod_base = OTHER; note = 2'-O-methyladenosine-3'-phosphate
  modified_base 16: mod_base = OTHER; note = 2'-O-methyluridine-3'-phosphate
  modified_base 17: mod_base = OTHER; note = 2'-O-methylguanosine-3'-phosphate
  modified_base 18: mod_base = OTHER; note = 2'-O-methylguanosine-3'-phosphate
  modified_base 19: mod_base = OTHER; note = 2'-O-methyladenosine-3'-phosphorothioate
  modified_base 20: mod_base = OTHER; note = 2'-O-methylguanosine-3'-phosphorothioate
  modified_base 21: mod_base = OTHER; note = 2'-O-methyladenosine-3'-phosphate
agtaatggcatagaatggaga

SEQ ID NO: 4006 - RNA, 21 nt, synthetic construct
  source 1..21: mol_type = other RNA
  modified_base 1: mod_base = OTHER; note = 2'-O-methyladenosine-3'-phosphorothioate
  modified_base 2: mod_base = OTHER; note = 2'-O-methyladenosine-3'-phosphorothioate
  modified_base 3: mod_base = OTHER; note = 2'-O-methyluridine-3'-phosphate
  modified_base 4: mod_base = OTHER; note = 2'-O-methyluridine-3'-phosphate
  modified_base 5: mod_base = OTHER; note = 2'-O-methylguanosine-3'-phosphate
  modified_base 6: mod_base = OTHER; note 4-amino-1-((2R,3R,4R,5R)-3-(docosyloxy)-4-hydroxy-5-(hydrox ymethyl)tetrahydrofuran-2-yl)pyrimidin-2(1H)-one
  modified_base 7: mod_base = OTHER; note = 2'-fluoroadenosine-3'-phosphate
  modified_base 8: mod_base = OTHER; note = 2'-O-methyladenosine-3'-phosphate
  modified_base 9: mod_base = OTHER; note = 2'-fluoroguanosine-3'-phosphate
  modified_base 10: mod_base = OTHER; note = 2'-fluoroadenosine-3'-phosphate
  modified_base 11: mod_base = OTHER; note = 2'-fluoroadenosine-3'-phosphate
  modified_base 12: mod_base = OTHER; note = 2'-O-methyladenosine-3'-phosphate
  modified_base 13: mod_base = OTHER; note = 2'-O-methyladenosine-3'-phosphate
  modified_base 14: mod_base = OTHER; note = 2'-O-methyluridine-3'-phosphate
  modified_base 15: mod_base = OTHER; note = 2'-O-methylguanosine-3'-phosphate
  modified_base 16: mod_base = OTHER; note = 2'-O-methylguanosine-3'-phosphate
  modified_base 17: mod_base = OTHER; note = 2'-O-methyladenosine-3'-phosphate
  modified_base 18: mod_base = OTHER; note = 2'-O-methylcytidine-3'-phosphate
  modified_base 19: mod_base = OTHER; note = 2'-O-methylcytidine-3'-phosphorothioate
  modified_base 20: mod_base = OTHER; note = 2'-O-methyladenosine-3'-phosphorothioate
  modified_base 21: mod_base = OTHER; note = 2'-O-methyladenosine-3'-phosphate
aattgcaagaaaatggaccaa

SEQ ID NO: 4007 - RNA, 21 nt, synthetic construct
  source 1..21: mol_type = other RNA
  modified_base 1: mod_base = OTHER; note = 2'-O-methylcytidine-3'-phosphorothioate
  modified_base 2: mod_base = OTHER; note = 2'-O-methylguanosine-3'-phosphorothioate
  modified_base 3: mod_base = OTHER; note = 2'-O-methylguanosine-3'-phosphate
  modified_base 4: mod_base = OTHER; note = 2'-O-methylcytidine-3'-phosphate
  modified_base 5: mod_base = OTHER; note = 2'-O-methyladenosine-3'-phosphate
  modified_base 6: mod_base = OTHER; note 4-amino-1-((2R,3R,4R,5R)-3-(docosyloxy)-4-hydroxy-5-(hydrox ymethyl)tetrahydrofuran-2-yl)pyrimidin-2(1H)-one
  modified_base 7: mod_base = OTHER; note = 2'-fluorouridine-3'-phosphate
  modified_base 8: mod_base = OTHER; note = 2'-O-methylguanosine-3'-phosphate
  modified_base 9: mod_base = OTHER; note = 2'-fluorocytidine-3'-phosphate
  modified_base 10: mod_base = OTHER; note = 2'-fluoroguanosine-3'-phosphate
  modified_base 11: mod_base = OTHER; note = 2'-fluorouridine-3'-phosphate
  modified_base 12: mod_base = OTHER; note = 2'-O-methyluridine-3'-phosphate
  modified_base 13: mod_base = OTHER; note = 2'-O-methylcytidine-3'-phosphate
  modified_base 14: mod_base = OTHER; note = 2'-O-methyluridine-3'-phosphate
  modified_base 15: mod_base = OTHER; note = 2'-O-methylguanosine-3'-phosphate
  modified_base 16: mod_base = OTHER; note = 2'-O-methylguanosine-3'-phosphate
  modified_base 17: mod_base = OTHER; note = 2'-O-methyluridine-3'-phosphate
  modified_base 18: mod_base = OTHER; note = 2'-O-methylguanosine-3'-phosphate
  modified_base 19: mod_base = OTHER; note = 2'-O-methylcytidine-3'-phosphorothioate
  modified_base 20: mod_base = OTHER; note = 2'-O-methyluridine-3'-phosphorothioate
  modified_base 21: mod_base = OTHER; note = 2'-O-methyladenosine-3'-phosphate
cggcactgcgttctggtgcta

SEQ ID NO: 4008 - RNA, 21 nt, synthetic construct
  source 1..21: mol_type = other RNA
  modified_base 1: mod_base = OTHER; note = 2'-O-methyladenosine-3'-phosphorothioate
  modified_base 2: mod_base = OTHER; note = 2'-O-methylguanosine-3'-phosphorothioate
  modified_base 3: mod_base = OTHER; note = 2'-O-methyluridine-3'-phosphate
  modified_base 4: mod_base = OTHER; note = 2'-O-methylcytidine-3'-phosphate
  modified_base 5: mod_base = OTHER; note = 2'-O-methyladenosine-3'-phosphate
  modified_base 6: mod_base = OTHER; note 1-((2R,3R,4R,5R)-3-(docosyloxy)-4-hydroxy-5-(hydroxymethyl) tetrahydrofuran-2-yl)pyrimidine-2,4(1H,3H)-dione
  modified_base 7: mod_base = OTHER; note = 2'-fluoroadenosine-3'-phosphate
  modified_base 8: mod_base = OTHER; note = 2'-O-methyluridine-3'-phosphate
  modified_base 9: mod_base = OTHER; note = 2'-fluorouridine-3'-phosphate
  modified_base 10: mod_base = OTHER; note = 2'-fluoroguanosine-3'-phosphate
  modified_base 11: mod_base = OTHER; note = 2'-fluoroadenosine-3'-phosphate
  modified_base 12: mod_base = OTHER; note = 2'-O-methyladenosine-3'-phosphate
  modified_base 13: mod_base = OTHER; note = 2'-O-methylguanosine-3'-phosphate
  modified_base 14: mod_base = OTHER; note = 2'-O-methyladenosine-3'-phosphate
  modified_base 15: mod_base = OTHER; note = 2'-O-methyladenosine-3'-phosphate
  modified_base 16: mod_base = OTHER; note = 2'-O-methylguanosine-3'-phosphate
  modified_base 17: mod_base = OTHER; note = 2'-O-methylcytidine-3'-phosphate
  modified_base 18: mod_base = OTHER; note = 2'-O-methylcytidine-3'-phosphate
  modified_base 19: mod_base = OTHER; note = 2'-O-methylcytidine-3'-phosphorothioate
  modified_base 20: mod_base = OTHER; note = 2'-O-methyladenosine-3'-phosphorothioate
  modified_base 21: mod_base = OTHER; note = 2'-O-methyladenosine-3'-phosphate
agtcatattgaagaagcccaa

SEQ ID NO: 4009 - RNA, 21 nt, synthetic construct
  source 1..21: mol_type = other RNA
  modified_base 1: mod_base = OTHER; note = 2'-O-methyluridine-3'-phosphorothioate
  modified_base 2: mod_base = OTHER; note = 2'-O-methylcytidine-3'-phosphorothioate
  modified_base 3: mod_base = OTHER; note = 2'-O-methyladenosine-3'-phosphate
  modified_base 4: mod_base = OTHER; note = 2'-O-methyluridine-3'-phosphate
  modified_base 5: mod_base = OTHER; note = 2'-O-methylcytidine-3'-phosphate
  modified_base 6: mod_base = OTHER; note (2R,3S,4S,5R)-5-(6-amino-9H-purin-9-yl)-4-(docosyloxy)-2-(h ydroxymethyl)tetrahydrofuran-3-ol
  modified_base 7: mod_base = OTHER; note = 2'-fluorouridine-3'-phosphate
  modified_base 8: mod_base = OTHER; note = 2'-O-methylguanosine-3'-phosphate
  modified_base 9: mod_base = OTHER; note = 2'-fluorocytidine-3'-phosphate
  modified_base 10: mod_base = OTHER; note = 2'-fluorouridine-3'-phosphate
  modified_base 11: mod_base = OTHER; note = 2'-fluoroguanosine-3'-phosphate
  modified_base 12: mod_base = OTHER; note = 2'-O-methylcytidine-3'-phosphate
  modified_base 13: mod_base = OTHER; note = 2'-O-methylguanosine-3'-phosphate
  modified_base 14: mod_base = OTHER; note = 2'-O-methyluridine-3'-phosphate
  modified_base 15: mod_base = OTHER; note = 2'-O-methylcytidine-3'-phosphate
  modified_base 16: mod_base = OTHER; note = 2'-O-methyladenosine-3'-phosphate
  modified_base 17: mod_base = OTHER; note = 2'-O-methylguanosine-3'-phosphate
  modified_base 18: mod_base = OTHER; note = 2'-O-methylcytidine-3'-phosphate
  modified_base 19: mod_base = OTHER; note = 2'-O-methyluridine-3'-phosphorothioate
  modified_base 20: mod_base = OTHER; note = 2'-O-methyluridine-3'-phosphorothioate
  modified_base 21: mod_base = OTHER; note = 2'-O-methyladenosine-3'-phosphate
tcatcatgctgcgtcagctta

SEQ ID NO: 4010 - RNA, 21 nt, synthetic construct
  source 1..21: mol_type = other RNA
  modified_base 1: mod_base = OTHER; note = 2'-O-methyladenosine-3'-phosphorothioate
  modified_base 2: mod_base = OTHER; note = 2'-O-methyladenosine-3'-phosphorothioate
  modified_base 3: mod_base = OTHER; note = 2'-O-methyladenosine-3'-phosphate
  modified_base 4: mod_base = OTHER; note = 2'-O-methyluridine-3'-phosphate
  modified_base 5: mod_base = OTHER; note = 2'-O-methylguanosine-3'-phosphate
  modified_base 6: mod_base = OTHER; note (2R,3S,4S,5R)-5-(6-amino-9H-purin-9-yl)-4-(docosyloxy)-2-(h ydroxymethyl)tetrahydrofuran-3-ol
  modified_base 7: mod_base = OTHER; note = 2'-fluorouridine-3'-phosphate
  modified_base 8: mod_base = OTHER; note = 2'-O-methylcytidine-3'-phosphate
  modified_base 9: mod_base = OTHER; note = 2'-fluoroguanosine-3'-phosphate
  modified_base 10: mod_base = OTHER; note = 2'-fluorocytidine-3'-phosphate
  modified_base 11: mod_base = OTHER; note = 2'-fluorocytidine-3'-phosphate
  modified_base 12: mod_base = OTHER; note = 2'-O-methyluridine-3'-phosphate
  modified_base 13: mod_base = OTHER; note = 2'-O-methylcytidine-3'-phosphate
  modified_base 14: mod_base = OTHER; note = 2'-O-methyluridine-3'-phosphate
  modified_base 15: mod_base = OTHER; note = 2'-O-methyluridine-3'-phosphate
  modified_base 16: mod_base = OTHER; note = 2'-O-methylguanosine-3'-phosphate
  modified_base 17: mod_base = OTHER; note = 2'-O-methylguanosine-3'-phosphate
  modified_base 18: mod_base = OTHER; note = 2'-O-methyluridine-3'-phosphate
  modified_base 19: mod_base = OTHER; note = 2'-O-methyladenosine-3'-phosphorothioate
  modified_base 20: mod_base = OTHER; note = 2'-O-methyluridine-3'-phosphorothioate
  modified_base 21: mod_base = OTHER; note = 2'-O-methyladenosine-3'-phosphate
aaatgatcgcctcttggtata

SEQ ID NO: 4011 - RNA, 21 nt, synthetic construct
  source 1..21: mol_type = other RNA
  modified_base 1: mod_base = OTHER; note = 2'-O-methyladenosine-3'-phosphorothioate
  modified_base 2: mod_base = OTHER; note = 2'-O-methyluridine-3'-phosphorothioate
  modified_base 3: mod_base = OTHER; note = 2'-O-methyluridine-3'-phosphate
  modified_base 4: mod_base = OTHER; note = 2'-O-methyluridine-3'-phosphate
  modified_base 5: mod_base = OTHER; note = 2'-O-methylguanosine-3'-phosphate
  modified_base 6: mod_base = OTHER; note (2R,3S,4S,5R)-5-(6-amino-9H-purin-9-yl)-4-(docosyloxy)-2-(h ydroxymethyl)tetrahydrofuran-3-ol
  modified_base 7: mod_base = OTHER; note = 2'-fluoroadenosine-3'-phosphate
  modified_base 8: mod_base = OTHER; note = 2'-O-methylguanosine-3'-phosphate
  modified_base 9: mod_base = OTHER; note = 2'-fluoroadenosine-3'-phosphate
  modified_base 10: mod_base = OTHER; note = 2'-fluorouridine-3'-phosphate
  modified_base 11: mod_base = OTHER; note = 2'-fluoroadenosine-3'-phosphate
  modified_base 12: mod_base = OTHER; note = 2'-O-methyluridine-3'-phosphate
  modified_base 13: mod_base = OTHER; note = 2'-O-methyladenosine-3'-phosphate
  modified_base 14: mod_base = OTHER; note = 2'-O-methyladenosine-3'-phosphate
  modified_base 15: mod_base = OTHER; note = 2'-O-methyladenosine-3'-phosphate
  modified_base 16: mod_base = OTHER; note = 2'-O-methylguanosine-3'-phosphate
  modified_base 17: mod_base = OTHER; note = 2'-O-methyladenosine-3'-phosphate
  modified_base 18: mod_base = OTHER; note = 2'-O-methylguanosine-3'-phosphate
  modified_base 19: mod_base = OTHER; note = 2'-O-methylcytidine-3'-phosphorothioate
  modified_base 20: mod_base = OTHER; note = 2'-O-methyladenosine-3'-phosphorothioate
  modified_base 21: mod_base = OTHER; note = 2'-O-methyladenosine-3'-phosphate
atttgaagatataaagagcaa

SEQ ID NO: 4012 - RNA, 21 nt, synthetic construct
  source 1..21: mol_type = other RNA
  modified_base 1: mod_base = OTHER; note = 2'-O-methylguanosine-3'-phosphorothioate
  modified_base 2: mod_base = OTHER; note = 2'-O-methylguanosine-3'-phosphorothioate
  modified_base 3: mod_base = OTHER; note = 2'-O-methyluridine-3'-phosphate
  modified_base 4: mod_base = OTHER; note = 2'-O-methylcytidine-3'-phosphate
  modified_base 5: mod_base = OTHER; note = 2'-O-methyluridine-3'-phosphate
  modified_base 6: mod_base = OTHER; note 4-amino-1-((2R,3R,4R,5R)-3-(docosyloxy)-4-hydroxy-5-(hydrox ymethyl)tetrahydrofuran-2-yl)pyrimidin-2(1H)-one
  modified_base 7: mod_base = OTHER; note = 2'-fluorocytidine-3'-phosphate
  modified_base 8: mod_base = OTHER; note = 2'-O-methyluridine-3'-phosphate
  modified_base 9: mod_base = OTHER; note = 2'-fluorouridine-3'-phosphate
  modified_base 10: mod_base = OTHER; note = 2'-fluorocytidine-3'-phosphate
  modified_base 11: mod_base = OTHER; note = 2'-fluoroadenosine-3'-phosphate
  modified_base 12: mod_base = OTHER; note = 2'-O-methylcytidine-3'-phosphate
  modified_base 13: mod_base = OTHER; note = 2'-O-methylcytidine-3'-phosphate
  modified_base 14: mod_base = OTHER; note = 2'-O-methyladenosine-3'-phosphate
  modified_base 15: mod_base = OTHER; note = 2'-O-methylguanosine-3'-phosphate
  modified_base 16: mod_base = OTHER; note = 2'-O-methylcytidine-3'-phosphate
  modified_base 17: mod_base = OTHER; note = 2'-O-methylcytidine-3'-phosphate
  modified_base 18: mod_base = OTHER; note = 2'-O-methyluridine-3'-phosphate
  modified_base 19: mod_base = OTHER; note = 2'-O-methylcytidine-3'-phosphorothioate
  modified_base 20: mod_base = OTHER; note = 2'-O-methylguanosine-3'-phosphorothioate
  modified_base 21: mod_base = OTHER; note = 2'-O-methyladenosine-3'-phosphate
ggtctccttcaccagcctcga

SEQ ID NO: 4013 - RNA, 21 nt, synthetic construct
  source 1..21: mol_type = other RNA
  modified_base 1: mod_base = OTHER; note = 2'-O-methylguanosine-3'-phosphorothioate
  modified_base 2: mod_base = OTHER; note = 2'-O-methyladenosine-3'-phosphorothioate
  modified_base 3: mod_base = OTHER; note = 2'-O-methyladenosine-3'-phosphate
  modified_base 4: mod_base = OTHER; note = 2'-O-methyladenosine-3'-phosphate
  modified_base 5: mod_base = OTHER; note = 2'-O-methylcytidine-3'-phosphate
  modified_base 6: mod_base = OTHER; note (2R,3S,4S,5R)-5-(6-amino-9H-purin-9-yl)-4-(docosyloxy)-2-(h ydroxymethyl)tetrahydrofuran-3-ol
  modified_base 7: mod_base = OTHER; note = 2'-fluoroguanosine-3'-phosphate
  modified_base 8: mod_base = OTHER; note = 2'-O-methyladenosine-3'-phosphate
  modified_base 9: mod_base = OTHER; note = 2'-fluoroguanosine-3'-phosphate
  modified_base 10: mod_base = OTHER; note = 2'-fluoroadenosine-3'-phosphate
  modified_base 11: mod_base = OTHER; note = 2'-fluoroadenosine-3'-phosphate
  modified_base 12: mod_base = OTHER; note = 2'-O-methylguanosine-3'-phosphate
  modified_base 13: mod_base = OTHER; note = 2'-O-methyladenosine-3'-phosphate
  modified_base 14: mod_base = OTHER; note = 2'-O-methyladenosine-3'-phosphate
  modified_base 15: mod_base = OTHER; note = 2'-O-methyladenosine-3'-phosphate
  modified_base 16: mod_base = OTHER; note = 2'-O-methylguanosine-3'-phosphate
  modified_base 17: mod_base = OTHER; note = 2'-O-methyladenosine-3'-phosphate
  modified_base 18: mod_base = OTHER; note = 2'-O-methylcytidine-3'-phosphate
  modified_base 19: mod_base = OTHER; note = 2'-O-methyladenosine-3'-phosphorothioate
  modified_base 20: mod_base = OTHER; note = 2'-O-methylguanosine-3'-phosphorothioate
  modified_base 21: mod_base = OTHER; note = 2'-O-methyladenosine-3'-phosphate
gaaacagagaagaaagacaga

SEQ ID NO: 4014 - RNA, 21 nt, synthetic construct
  source 1..21: mol_type = other RNA
  modified_base 1: mod_base = OTHER; note = 2'-O-methyluridine-3'-phosphorothioate
  modified_base 2: mod_base = OTHER; note = 2'-O-methyluridine-3'-phosphorothioate
  modified_base 3: mod_base = OTHER; note = 2'-O-methylcytidine-3'-phosphate
  modified_base 4: mod_base = OTHER; note = 2'-O-methyluridine-3'-phosphate
  modified_base 5: mod_base = OTHER; note = 2'-O-methyladenosine-3'-phosphate
  modified_base 6: mod_base = OTHER; note 2-amino-9-((2R,3S,4S,5R)-3-(docosyloxy)-4-hydroxy-5-(hydrox ymethyl)tetrahydrofuran-2-yl)-1,9-dihydro-6H-purin-6-one
  modified_base 7: mod_base = OTHER; note = 2'-fluorouridine-3'-phosphate
  modified_base 8: mod_base = OTHER; note = 2'-O-methylguanosine-3'-phosphate
  modified_base 9: mod_base = OTHER; note = 2'-fluoroguanosine-3'-phosphate
  modified_base 10: mod_base = OTHER; note = 2'-fluorocytidine-3'-phosphate
  modified_base 11: mod_base = OTHER; note = 2'-fluorouridine-3'-phosphate
  modified_base 12: mod_base = OTHER; note = 2'-O-methyladenosine-3'-phosphate
  modified_base 13: mod_base = OTHER; note = 2'-O-methylcytidine-3'-phosphate
  modified_base 14: mod_base = OTHER; note = 2'-O-methyladenosine-3'-phosphate
  modified_base 15: mod_base = OTHER; note = 2'-O-methyladenosine-3'-phosphate
  modified_base 16: mod_base = OTHER; note = 2'-O-methyladenosine-3'-phosphate
  modified_base 17: mod_base = OTHER; note = 2'-O-methyluridine-3'-phosphate
  modified_base 18: mod_base = OTHER; note = 2'-O-methylguanosine-3'-phosphate
  modified_base 19: mod_base = OTHER; note = 2'-O-methylcytidine-3'-phosphorothioate
  modified_base 20: mod_base = OTHER; note = 2'-O-methylcytidine-3'-phosphorothioate
  modified_base 21: mod_base = OTHER; note = 2'-O-methyladenosine-3'-phosphate
ttctagtggctacaaatgcca

SEQ ID NO: 4015 - RNA, 21 nt, synthetic construct
  source 1..21: mol_type = other RNA
  modified_base 1: mod_base = OTHER; note = 2'-O-methylguanosine-3'-phosphorothioate
  modified_base 2: mod_base = OTHER; note = 2'-O-methylguanosine-3'-phosphorothioate
  modified_base 3: mod_base = OTHER; note = 2'-O-methyladenosine-3'-phosphate
  modified_base 4: mod_base = OTHER; note = 2'-O-methylguanosine-3'-phosphate
  modified_base 5: mod_base = OTHER; note = 2'-O-methyladenosine-3'-phosphate
  modified_base 6: mod_base = OTHER; note 2-amino-9-((2R,3S,4S,5R)-3-(docosyloxy)-4-hydroxy-5-(hydrox ymethyl)tetrahydrofuran-2-yl)-1,9-dihydro-6H-purin-6-one
  modified_base 7: mod_base = OTHER; note = 2'-fluoroadenosine-3'-phosphate
  modified_base 8: mod_base = OTHER; note = 2'-O-methyladenosine-3'-phosphate
  modified_base 9: mod_base = OTHER; note = 2'-fluoroadenosine-3'-phosphate
  modified_base 10: mod_base = OTHER; note = 2'-fluorouridine-3'-phosphate
  modified_base 11: mod_base = OTHER; note = 2'-fluorocytidine-3'-phosphate
  modified_base 12: mod_base = OTHER; note = 2'-O-methyladenosine-3'-phosphate
  modified_base 13: mod_base = OTHER; note = 2'-O-methylguanosine-3'-phosphate
  modified_base 14: mod_base = OTHER; note = 2'-O-methylguanosine-3'-phosphate
  modified_base 15: mod_base = OTHER; note = 2'-O-methyladenosine-3'-phosphate
  modified_base 16: mod_base = OTHER; note = 2'-O-methyladenosine-3'-phosphate
  modified_base 17: mod_base = OTHER; note = 2'-O-methylguanosine-3'-phosphate
  modified_base 18: mod_base = OTHER; note = 2'-O-methylguanosine-3'-phosphate
  modified_base 19: mod_base = OTHER; note = 2'-O-methyladenosine-3'-phosphorothioate
  modified_base 20: mod_base = OTHER; note = 2'-O-methyluridine-3'-phosphorothioate
  modified_base 21: mod_base = OTHER; note = 2'-O-methyladenosine-3'-phosphate
ggagagaaatcaggaaggata

SEQ ID NO: 4016 - RNA, 21 nt, synthetic construct
  source 1..21: mol_type = other RNA
  modified_base 1: mod_base = OTHER; note = 2'-O-methyladenosine-3'-phosphorothioate
  modified_base 2: mod_base = OTHER; note = 2'-O-methyluridine-3'-phosphorothioate
  modified_base 3: mod_base = OTHER; note = 2'-O-methyladenosine-3'-phosphate
  modified_base 4: mod_base = OTHER; note = 2'-O-methyluridine-3'-phosphate
  modified_base 5: mod_base = OTHER; note = 2'-O-methyladenosine-3'-phosphate
  modified_base 6: mod_base = OTHER; note 2-amino-9-((2R,3S,4S,5R)-3-(docosyloxy)-4-hydroxy-5-(hydrox ymethyl)tetrahydrofuran-2-yl)-1,9-dihydro-6H-purin-6-one
  modified_base 7: mod_base = OTHER; note = 2'-fluorouridine-3'-phosphate
  modified_base 8: mod_base = OTHER; note = 2'-O-methylguanosine-3'-phosphate
  modified_base 9: mod_base = OTHER; note = 2'-fluoroadenosine-3'-phosphate
  modified_base 10: mod_base = OTHER; note = 2'-fluoroguanosine-3'-phosphate
  modified_base 11: mod_base = OTHER; note = 2'-fluorocytidine-3'-phosphate
  modified_base 12: mod_base = OTHER; note = 2'-O-methylcytidine-3'-phosphate
  modified_base 13: mod_base = OTHER; note = 2'-O-methylcytidine-3'-phosphate
  modified_base 14: mod_base = OTHER; note = 2'-O-methyluridine-3'-phosphate
  modified_base 15: mod_base = OTHER; note = 2'-O-methyladenosine-3'-phosphate
  modified_base 16: mod_base = OTHER; note = 2'-O-methyladenosine-3'-phosphate
  modified_base 17: mod_base = OTHER; note = 2'-O-methyladenosine-3'-phosphate
  modified_base 18: mod_base = OTHER; note = 2'-O-methylguanosine-3'-phosphate
  modified_base 19: mod_base = OTHER; note = 2'-O-methylguanosine-3'-phosphorothioate
  modified_base 20: mod_base = OTHER; note = 2'-O-methyladenosine-3'-phosphorothioate
  modified_base 21: mod_base = OTHER; note = 2'-O-methyladenosine-3'-phosphate
atatagtgagccctaaaggaa

SEQ ID NO: 4017 - RNA, 21 nt, synthetic construct
  source 1..21: mol_type = other RNA
  modified_base 1: mod_base = OTHER; note = 2'-O-methylguanosine-3'-phosphorothioate
  modified_base 2: mod_base = OTHER; note = 2'-O-methylcytidine-3'-phosphorothioate
  modified_base 3: mod_base = OTHER; note = 2'-O-methyluridine-3'-phosphate
  modified_base 4: mod_base = OTHER; note = 2'-O-methylguanosine-3'-phosphate
  modified_base 5: mod_base = OTHER; note = 2'-O-methylcytidine-3'-phosphate
  modified_base 6: mod_base = OTHER; note 4-amino-1-((2R,3R,4R,5R)-3-(docosyloxy)-4-hydroxy-5-(hydrox ymethyl)tetrahydrofuran-2-yl)pyrimidin-2(1H)-one
  modified_base 7: mod_base = OTHER; note = 2'-fluorouridine-3'-phosphate
  modified_base 8: mod_base = OTHER; note = 2'-O-methyluridine-3'-phosphate
  modified_base 9: mod_base = OTHER; note = 2'-fluorouridine-3'-phosphate
  modified_base 10: mod_base = OTHER; note = 2'-fluoroguanosine-3'-phosphate
  modified_base 11: mod_base = OTHER; note = 2'-fluorouridine-3'-phosphate
  modified_base 12: mod_base = OTHER; note = 2'-O-methylcytidine-3'-phosphate
  modified_base 13: mod_base = OTHER; note = 2'-O-methylcytidine-3'-phosphate
  modified_base 14: mod_base = OTHER; note = 2'-O-methyluridine-3'-phosphate
  modified_base 15: mod_base = OTHER; note = 2'-O-methylcytidine-3'-phosphate
  modified_base 16: mod_base = OTHER; note = 2'-O-methylguanosine-3'-phosphate
  modified_base 17: mod_base = OTHER; note = 2'-O-methylcytidine-3'-phosphate
  modified_base 18: mod_base = OTHER; note = 2'-O-methylcytidine-3'-phosphate
  modified_base 19: mod_base = OTHER; note = 2'-O-methylcytidine-3'-phosphorothioate
  modified_base 20: mod_base = OTHER; note = 2'-O-methyluridine-3'-phosphorothioate
  modified_base 21: mod_base = OTHER; note = 2'-O-methyladenosine-3'-phosphate
gctgcctttgtcctcgcccta

SEQ ID NO: 4018 - RNA, 21 nt, synthetic construct
  source 1..21: mol_type = other RNA
  modified_base 1: mod_base = OTHER; note = 2'-O-methylguanosine-3'-phosphorothioate
  modified_base 2: mod_base = OTHER; note = 2'-O-methylguanosine-3'-phosphorothioate
  modified_base 3: mod_base = OTHER; note = 2'-O-methylcytidine-3'-phosphate
  modified_base 4: mod_base = OTHER; note = 2'-O-methyladenosine-3'-phosphate
  modified_base 5: mod_base = OTHER; note = 2'-O-methyladenosine-3'-phosphate
  modified_base 6: mod_base = OTHER; note (2R,3S,4S,5R)-5-(6-amino-9H-purin-9-yl)-4-(docosyloxy)-2-(h ydroxymethyl)tetrahydrofuran-3-ol
  modified_base 7: mod_base = OTHER; note = 2'-fluoroadenosine-3'-phosphate
  modified_base 8: mod_base = OTHER; note = 2'-O-methylguanosine-3'-phosphate
  modified_base 9: mod_base = OTHER; note = 2'-fluoroadenosine-3'-phosphate
  modified_base 10: mod_base = OTHER; note = 2'-fluorocytidine-3'-phosphate
  modified_base 11: mod_base = OTHER; note = 2'-fluorocytidine-3'-phosphate
  modified_base 12: mod_base = OTHER; note = 2'-O-methyluridine-3'-phosphate
  modified_base 13: mod_base = OTHER; note = 2'-O-methylcytidine-3'-phosphate
  modified_base 14: mod_base = OTHER; note = 2'-O-methyladenosine-3'-phosphate
  modified_base 15: mod_base = OTHER; note = 2'-O-methylcytidine-3'-phosphate
  modified_base 16: mod_base = OTHER; note = 2'-O-methylcytidine-3'-phosphate
  modified_base 17: mod_base = OTHER; note = 2'-O-methyladenosine-3'-phosphate
  modified_base 18: mod_base = OTHER; note = 2'-O-methyladenosine-3'-phosphate
  modified_base 19: mod_base = OTHER; note = 2'-O-methylguanosine-3'-phosphorothioate
  modified_base 20: mod_base = OTHER; note = 2'-O-methyladenosine-3'-phosphorothioate
  modified_base 21: mod_base = OTHER; note = 2'-O-methyladenosine-3'-phosphate
ggcaaaagacctcaccaagaa

SEQ ID NO: 4019 - RNA, 21 nt, synthetic construct
  source 1..21: mol_type = other RNA
  modified_base 1: mod_base = OTHER; note = 2'-O-methyluridine-3'-phosphorothioate
  modified_base 2: mod_base = OTHER; note = 2'-O-methyluridine-3'-phosphorothioate
  modified_base 3: mod_base = OTHER; note = 2'-O-methylcytidine-3'-phosphate
  modified_base 4: mod_base = OTHER; note = 2'-O-methyladenosine-3'-phosphate
  modified_base 5: mod_base = OTHER; note = 2'-O-methylguanosine-3'-phosphate
  modified_base 6: mod_base = OTHER; note 4-amino-1-((2R,3R,4R,5R)-3-(docosyloxy)-4-hydroxy-5-(hydrox ymethyl)tetrahydrofuran-2-yl)pyrimidin-2(1H)-one
  modified_base 7: mod_base = OTHER; note = 2'-fluoroadenosine-3'-phosphate
  modified_base 8: mod_base = OTHER; note = 2'-O-methyluridine-3'-phosphate
  modified_base 9: mod_base = OTHER; note = 2'-fluorocytidine-3'-phosphate
  modified_base 10: mod_base = OTHER; note = 2'-fluoroguanosine-3'-phosphate
  modified_base 11: mod_base = OTHER; note = 2'-fluorocytidine-3'-phosphate
  modified_base 12: mod_base = OTHER; note = 2'-O-methylcytidine-3'-phosphate
  modified_base 13: mod_base = OTHER; note = 2'-O-methyluridine-3'-phosphate
  modified_base 14: mod_base = OTHER; note = 2'-O-methylguanosine-3'-phosphate
  modified_base 15: mod_base = OTHER; note = 2'-O-methyluridine-3'-phosphate
  modified_base 16: mod_base = OTHER; note = 2'-O-methylguanosine-3'-phosphate
  modified_base 17: mod_base = OTHER; note = 2'-O-methylcytidine-3'-phosphate
  modified_base 18: mod_base = OTHER; note = 2'-O-methylcytidine-3'-phosphate
  modified_base 19: mod_base = OTHER; note = 2'-O-methyluridine-3'-phosphorothioate
  modified_base 20: mod_base = OTHER; note = 2'-O-methyluridine-3'-phosphorothioate
  modified_base 21: mod_base = OTHER; note = 2'-O-methyladenosine-3'-phosphate
ttcagcatcgcctgtgcctta

SEQ ID NO: 4020 - RNA, 21 nt, synthetic construct
  source 1..21: mol_type = other RNA
  modified_base 1: mod_base = OTHER; note = 2'-O-methylguanosine-3'-phosphorothioate
  modified_base 2: mod_base = OTHER; note = 2'-O-methylcytidine-3'-phosphorothioate
  modified_base 3: mod_base = OTHER; note = 2'-O-methyluridine-3'-phosphate
  modified_base 4: mod_base = OTHER; note = 2'-O-methyladenosine-3'-phosphate
  modified_base 5: mod_base = OTHER; note = 2'-O-methyladenosine-3'-phosphate
  modified_base 6: mod_base = OTHER; note (2R,3S,4S,5R)-5-(6-amino-9H-purin-9-yl)-4-(docosyloxy)-2-(h ydroxymethyl)tetrahydrofuran-3-ol
  modified_base 7: mod_base = OTHER; note = 2'-fluorouridine-3'-phosphate
  modified_base 8: mod_base = OTHER; note = 2'-O-methylguanosine-3'-phosphate
  modified_base 9: mod_base = OTHER; note = 2'-fluoroadenosine-3'-phosphate
  modified_base 10: mod_base = OTHER; note = 2'-fluoroguanosine-3'-phosphate
  modified_base 11: mod_base = OTHER; note = 2'-fluoroguanosine-3'-phosphate
  modified_base 12: mod_base = OTHER; note = 2'-O-methylcytidine-3'-phosphate
  modified_base 13: mod_base = OTHER; note = 2'-O-methyluridine-3'-phosphate
  modified_base 14: mod_base = OTHER; note = 2'-O-methylcytidine-3'-phosphate
  modified_base 15: mod_base = OTHER; note = 2'-O-methylguanosine-3'-phosphate
  modified_base 16: mod_base = OTHER; note = 2'-O-methylcytidine-3'-phosphate
  modified_base 17: mod_base = OTHER; note = 2'-O-methyladenosine-3'-phosphate
  modified_base 18: mod_base = OTHER; note = 2'-O-methyladenosine-3'-phosphate
  modified_base 19: mod_base = OTHER; note = 2'-O-methyluridine-3'-phosphorothioate
  modified_base 20: mod_base = OTHER; note = 2'-O-methyladenosine-3'-phosphorothioate
  modified_base 21: mod_base = OTHER; note = 2'-O-methyladenosine-3'-phosphate
gctaaatgaggctcgcaataa

SEQ ID NO: 4021 - RNA, 21 nt, synthetic construct
  source 1..21: mol_type = other RNA
  modified_base 1: mod_base = OTHER; note = 2'-O-methylcytidine-3'-phosphorothioate
  modified_base 2: mod_base = OTHER; note = 2'-O-methyladenosine-3'-phosphorothioate
  modified_base 3: mod_base = OTHER; note = 2'-O-methylguanosine-3'-phosphate
  modified_base 4: mod_base = OTHER; note = 2'-O-methylcytidine-3'-phosphate
  modified_base 5: mod_base = OTHER; note = 2'-O-methyluridine-3'-phosphate
  modified_base 6: mod_base = OTHER; note 1-((2R,3R,4R,5R)-3-(docosyloxy)-4-hydroxy-5-(hydroxymethyl) tetrahydrofuran-2-yl)pyrimidine-2,4(1H,3H)-dione
  modified_base 7: mod_base = OTHER; note = 2'-fluorocytidine-3'-phosphate
  modified_base 8: mod_base = OTHER; note = 2'-O-methylguanosine-3'-phosphate
  modified_base 9: mod_base = OTHER; note = 2'-fluorouridine-3'-phosphate
  modified_base 10: mod_base = OTHER; note = 2'-fluorocytidine-3'-phosphate
  modified_base 11: mod_base = OTHER; note = 2'-fluorouridine-3'-phosphate
  modified_base 12: mod_base = OTHER; note = 2'-O-methylguanosine-3'-phosphate
  modified_base 13: mod_base = OTHER; note = 2'-O-methylguanosine-3'-phosphate
  modified_base 14: mod_base = OTHER; note = 2'-O-methyluridine-3'-phosphate
  modified_base 15: mod_base = OTHER; note = 2'-O-methylguanosine-3'-phosphate
  modified_base 16: mod_base = OTHER; note = 2'-O-methylguanosine-3'-phosphate
  modified_base 17: mod_base = OTHER; note = 2'-O-methylguanosine-3'-phosphate
  modified_base 18: mod_base = OTHER; note = 2'-O-methyluridine-3'-phosphate
  modified_base 19: mod_base = OTHER; note = 2'-O-methylcytidine-3'-phosphorothioate
  modified_base 20: mod_base = OTHER; note = 2'-O-methyluridine-3'-phosphorothioate
  modified_base 21: mod_base = OTHER; note = 2'-O-methyladenosine-3'-phosphate
cagcttcgtctggtgggtcta

SEQ ID NO: 4022 - RNA, 21 nt, synthetic construct
  source 1..21: mol_type = other RNA
  modified_base 1: mod_base = OTHER; note = 2'-O-methyladenosine-3'-phosphorothioate
  modified_base 2: mod_base = OTHER; note = 2'-O-methyluridine-3'-phosphorothioate
  modified_base 3: mod_base = OTHER; note = 2'-O-methyladenosine-3'-phosphate
  modified_base 4: mod_base = OTHER; note = 2'-O-methyluridine-3'-phosphate
  modified_base 5: mod_base = OTHER; note = 2'-O-methylguanosine-3'-phosphate
  modified_base 6: mod_base = OTHER; note 2-amino-9-((2R,3S,4S,5R)-3-(docosyloxy)-4-hydroxy-5-(hydrox ymethyl)tetrahydrofuran-2-yl)-1,9-dihydro-6H-purin-6-one
  modified_base 7: mod_base = OTHER; note = 2'-fluorouridine-3'-phosphate
  modified_base 8: mod_base = OTHER; note = 2'-O-methyladenosine-3'-phosphate
  modified_base 9: mod_base = OTHER; note = 2'-fluorouridine-3'-phosphate
  modified_base 10: mod_base = OTHER; note = 2'-fluorouridine-3'-phosphate
  modified_base 11: mod_base = OTHER; note = 2'-fluoroguanosine-3'-phosphate
  modified_base 12: mod_base = OTHER; note = 2'-O-methylguanosine-3'-phosphate
  modified_base 13: mod_base = OTHER; note = 2'-O-methylcytidine-3'-phosphate
  modified_base 14: mod_base = OTHER; note = 2'-O-methyladenosine-3'-phosphate
  modified_base 15: mod_base = OTHER; note = 2'-O-methyluridine-3'-phosphate
  modified_base 16: mod_base = OTHER; note = 2'-O-methylguanosine-3'-phosphate
  modified_base 17: mod_base = OTHER; note = 2'-O-methylcytidine-3'-phosphate
  modified_base 18: mod_base = OTHER; note = 2'-O-methyladenosine-3'-phosphate
  modified_base 19: mod_base = OTHER; note = 2'-O-methylguanosine-3'-phosphorothioate
  modified_base 20: mod_base = OTHER; note = 2'-O-methyluridine-3'-phosphorothioate
  modified_base 21: mod_base = OTHER; note = 2'-O-methyladenosine-3'-phosphate
atatggtattggcatgcagta

SEQ ID NO: 4023 - RNA, 21 nt, synthetic construct
  source 1..21: mol_type = other RNA
  modified_base 1: mod_base = OTHER; note = 2'-O-methyladenosine-3'-phosphorothioate
  modified_base 2: mod_base = OTHER; note = 2'-O-methyladenosine-3'-phosphorothioate
  modified_base 3: mod_base = OTHER; note = 2'-O-methyladenosine-3'-phosphate
  modified_base 4: mod_base = OTHER; note = 2'-O-methylcytidine-3'-phosphate
  modified_base 5: mod_base = OTHER; note = 2'-O-methyluridine-3'-phosphate
  modified_base 6: mod_base = OTHER; note 2-amino-9-((2R,3S,4S,5R)-3-(docosyloxy)-4-hydroxy-5-(hydrox ymethyl)tetrahydrofuran-2-yl)-1,9-dihydro-6H-purin-6-one
  modified_base 7: mod_base = OTHER; note = 2'-fluorocytidine-3'-phosphate
  modified_base 8: mod_base = OTHER; note = 2'-O-methyladenosine-3'-phosphate
  modified_base 9: mod_base = OTHER; note = 2'-fluoroguanosine-3'-phosphate
  modified_base 10: mod_base = OTHER; note = 2'-fluoroguanosine-3'-phosphate
  modified_base 11: mod_base = OTHER; note = 2'-fluorouridine-3'-phosphate
  modified_base 12: mod_base = OTHER; note = 2'-O-methylguanosine-3'-phosphate
  modified_base 13: mod_base = OTHER; note = 2'-O-methylguanosine-3'-phosphate
  modified_base 14: mod_base = OTHER; note = 2'-O-methyladenosine-3'-phosphate
  modified_base 15: mod_base = OTHER; note = 2'-O-methylguanosine-3'-phosphate
  modified_base 16: mod_base = OTHER; note = 2'-O-methyladenosine-3'-phosphate
  modified_base 17: mod_base = OTHER; note = 2'-O-methyladenosine-3'-phosphate
  modified_base 18: mod_base = OTHER; note = 2'-O-methyluridine-3'-phosphate
  modified_base 19: mod_base = OTHER; note = 2'-O-methyluridine-3'-phosphorothioate
  modified_base 20: mod_base = OTHER; note = 2'-O-methylcytidine-3'-phosphorothioate
  modified_base 21: mod_base = OTHER; note = 2'-O-methyladenosine-3'-phosphate
aaactgcaggtggagaattca

SEQ ID NO: 4024 - RNA, 21 nt, synthetic construct
  source 1..21: mol_type = other RNA
  modified_base 1: mod_base = OTHER; note = 2'-O-methyluridine-3'-phosphorothioate
  modified_base 2: mod_base = OTHER; note = 2'-O-methyladenosine-3'-phosphorothioate
  modified_base 3: mod_base = OTHER; note = 2'-O-methyluridine-3'-phosphate
  modified_base 4: mod_base = OTHER; note = 2'-O-methylguanosine-3'-phosphate
  modified_base 5: mod_base = OTHER; note = 2'-O-methylguanosine-3'-phosphate
  modified_base 6: mod_base = OTHER; note 4-amino-1-((2R,3R,4R,5R)-3-(docosyloxy)-4-hydroxy-5-(hydrox ymethyl)tetrahydrofuran-2-yl)pyrimidin-2(1H)-one
  modified_base 7: mod_base = OTHER; note = 2'-fluorouridine-3'-phosphate
  modified_base 8: mod_base = OTHER; note = 2'-O-methylguanosine-3'-phosphate
  modified_base 9: mod_base = OTHER; note = 2'-fluorocytidine-3'-phosphate
  modified_base 10: mod_base = OTHER; note = 2'-fluorocytidine-3'-phosphate
  modified_base 11: mod_base = OTHER; note = 2'-fluorouridine-3'-phosphate
  modified_base 12: mod_base = OTHER; note = 2'-O-methylguanosine-3'-phosphate
  modified_base 13: mod_base = OTHER; note = 2'-O-methyluridine-3'-phosphate
  modified_base 14: mod_base = OTHER; note = 2'-O-methylcytidine-3'-phosphate
  modified_base 15: mod_base = OTHER; note = 2'-O-methyluridine-3'-phosphate
  modified_base 16: mod_base = OTHER; note = 2'-O-methyluridine-3'-phosphate
  modified_base 17: mod_base = OTHER; note = 2'-O-methylcytidine-3'-phosphate
  modified_base 18: mod_base = OTHER; note = 2'-O-methyladenosine-3'-phosphate
  modified_base 19: mod_base = OTHER; note = 2'-O-methyladenosine-3'-phosphorothioate
  modified_base 20: mod_base = OTHER; note = 2'-O-methyladenosine-3'-phosphorothioate
  modified_base 21: mod_base = OTHER; note = 2'-O-methyladenosine-3'-phosphate
tatggctgcctgtcttcaaaa

SEQ ID NO: 4025 - RNA, 21 nt, synthetic construct
  source 1..21: mol_type = other RNA
  modified_base 1: mod_base = OTHER; note = 2'-O-methylcytidine-3'-phosphorothioate
  modified_base 2: mod_base = OTHER; note = 2'-O-methyluridine-3'-phosphorothioate
  modified_base 3: mod_base = OTHER; note = 2'-O-methylguanosine-3'-phosphate
  modified_base 4: mod_base = OTHER; note = 2'-O-methyluridine-3'-phosphate
  modified_base 5: mod_base = OTHER; note = 2'-O-methyluridine-3'-phosphate
  modified_base 6: mod_base = OTHER; note 4-amino-1-((2R,3R,4R,5R)-3-(docosyloxy)-4-hydroxy-5-(hydrox ymethyl)tetrahydrofuran-2-yl)pyrimidin-2(1H)-one
  modified_base 7: mod_base = OTHER; note = 2'-fluorouridine-3'-phosphate
  modified_base 8: mod_base = OTHER; note = 2'-O-methylguanosine-3'-phosphate
  modified_base 9: mod_base = OTHER; note = 2'-fluoroadenosine-3'-phosphate
  modified_base 10: mod_base = OTHER; note = 2'-fluoroadenosine-3'-phosphate
  modified_base 11: mod_base = OTHER; note = 2'-fluoroadenosine-3'-phosphate
  modified_base 12: mod_base = OTHER; note = 2'-O-methyluridine-3'-phosphate
  modified_base 13: mod_base = OTHER; note = 2'-O-methyladenosine-3'-phosphate
  modified_base 14: mod_base = OTHER; note = 2'-O-methylguanosine-3'-phosphate
  modified_base 15: mod_base = OTHER; note = 2'-O-methyladenosine-3'-phosphate
  modified_base 16: mod_base = OTHER; note = 2'-O-methylguanosine-3'-phosphate
  modified_base 17: mod_base = OTHER; note = 2'-O-methylguanosine-3'-phosphate
  modified_base 18: mod_base = OTHER; note = 2'-O-methyladenosine-3'-phosphate
  modified_base 19: mod_base = OTHER; note = 2'-O-methylcytidine-3'-phosphorothioate
  modified_base 20: mod_base = OTHER; note = 2'-O-methylcytidine-3'-phosphorothioate
  modified_base 21: mod_base = OTHER; note = 2'-O-methyladenosine-3'-phosphate
ctgttctgaaatagaggacca

SEQ ID NO: 4026 - RNA, 21 nt, synthetic construct
  source 1..21: mol_type = other RNA
  modified_base 1: mod_base = OTHER; note = 2'-O-methyluridine-3'-phosphorothioate
  modified_base 2: mod_base = OTHER; note = 2'-O-methylcytidine-3'-phosphorothioate
  modified_base 3: mod_base = OTHER; note = 2'-O-methyluridine-3'-phosphate
  modified_base 4: mod_base = OTHER; note = 2'-O-methyladenosine-3'-phosphate
  modified_base 5: mod_base = OTHER; note = 2'-O-methyluridine-3'-phosphate
  modified_base 6: mod_base = OTHER; note 1-((2R,3R,4R,5R)-3-(docosyloxy)-4-hydroxy-5-(hydroxymethyl) tetrahydrofuran-2-yl)pyrimidine-2,4(1H,3H)-dione
  modified_base 7: mod_base = OTHER; note = 2'-fluorouridine-3'-phosphate
  modified_base 8: mod_base = OTHER; note = 2'-O-methyluridine-3'-phosphate
  modified_base 9: mod_base = OTHER; note = 2'-fluorouridine-3'-phosphate
  modified_base 10: mod_base = OTHER; note = 2'-fluoroadenosine-3'-phosphate
  modified_base 11: mod_base = OTHER; note = 2'-fluoroadenosine-3'-phosphate
  modified_base 12: mod_base = OTHER; note = 2'-O-methyladenosine-3'-phosphate
  modified_base 13: mod_base = OTHER; note = 2'-O-methylguanosine-3'-phosphate
  modified_base 14: mod_base = OTHER; note = 2'-O-methylcytidine-3'-phosphate
  modified_base 15: mod_base = OTHER; note = 2'-O-methylcytidine-3'-phosphate
  modified_base 16: mod_base = OTHER; note = 2'-O-methylguanosine-3'-phosphate
  modified_base 17: mod_base = OTHER; note = 2'-O-methylcytidine-3'-phosphate
  modified_base 18: mod_base = OTHER; note = 2'-O-methyluridine-3'-phosphate
  modified_base 19: mod_base = OTHER; note = 2'-O-methylguanosine-3'-phosphorothioate
  modified_base 20: mod_base = OTHER; note = 2'-O-methylguanosine-3'-phosphorothioate
  modified_base 21: mod_base = OTHER; note = 2'-O-methyladenosine-3'-phosphate
tctatttttaaagccgctgga

SEQ ID NO: 4027 - RNA, 21 nt, synthetic construct
  source 1..21: mol_type = other RNA
  modified_base 1: mod_base = OTHER; note = 2'-O-methylguanosine-3'-phosphorothioate
  modified_base 2: mod_base = OTHER; note = 2'-O-methylcytidine-3'-phosphorothioate
  modified_base 3: mod_base = OTHER; note = 2'-O-methyluridine-3'-phosphate
  modified_base 4: mod_base = OTHER; note = 2'-O-methylguanosine-3'-phosphate
  modified_base 5: mod_base = OTHER; note = 2'-O-methyladenosine-3'-phosphate
  modified_base 6: mod_base = OTHER; note 2-amino-9-((2R,3S,4S,5R)-3-(docosyloxy)-4-hydroxy-5-(hydrox ymethyl)tetrahydrofuran-2-yl)-1,9-dihydro-6H-purin-6-one
  modified_base 7: mod_base = OTHER; note = 2'-fluoroguanosine-3'-phosphate
  modified_base 8: mod_base = OTHER; note = 2'-O-methyladenosine-3'-phosphate
  modified_base 9: mod_base = OTHER; note = 2'-fluoroguanosine-3'-phosphate
  modified_base 10: mod_base = OTHER; note = 2'-fluoroadenosine-3'-phosphate
  modified_base 11: mod_base = OTHER; note = 2'-fluoroadenosine-3'-phosphate
  modified_base 12: mod_base = OTHER; note = 2'-O-methylguanosine-3'-phosphate
  modified_base 13: mod_base = OTHER; note = 2'-O-methylcytidine-3'-phosphate
  modified_base 14: mod_base = OTHER; note = 2'-O-methyluridine-3'-phosphate
  modified_base 15: mod_base = OTHER; note = 2'-O-methylcytidine-3'-phosphate
  modified_base 16: mod_base = OTHER; note = 2'-O-methyladenosine-3'-phosphate
  modified_base 17: mod_base = OTHER; note = 2'-O-methylguanosine-3'-phosphate
  modified_base 18: mod_base = OTHER; note = 2'-O-methylguanosine-3'-phosphate
  modified_base 19: mod_base = OTHER; note = 2'-O-methyladenosine-3'-phosphorothioate
  modified_base 20: mod_base = OTHER; note = 2'-O-methyladenosine-3'-phosphorothioate
  modified_base 21: mod_base = OTHER; note = 2'-O-methyladenosine-3'-phosphate
gctgaggagaagctcaggaaa

SEQ ID NO: 4028 - RNA, 21 nt, synthetic construct
  source 1..21: mol_type = other RNA
  modified_base 1: mod_base = OTHER; note = 2'-O-methylcytidine-3'-phosphorothioate
  modified_base 2: mod_base = OTHER; note = 2'-O-methyladenosine-3'-phosphorothioate
  modified_base 3: mod_base = OTHER; note = 2'-O-methyladenosine-3'-phosphate
  modified_base 4: mod_base = OTHER; note = 2'-O-methylguanosine-3'-phosphate
  modified_base 5: mod_base = OTHER; note = 2'-O-methylcytidine-3'-phosphate
  modified_base 6: mod_base = OTHER; note 4-amino-1-((2R,3R,4R,5R)-3-(docosyloxy)-4-hydroxy-5-(hydrox ymethyl)tetrahydrofuran-2-yl)pyrimidin-2(1H)-one
  modified_base 7: mod_base = OTHER; note = 2'-fluorouridine-3'-phosphate
  modified_base 8: mod_base = OTHER; note = 2'-O-methyluridine-3'-phosphate
  modified_base 9: mod_base = OTHER; note = 2'-fluorocytidine-3'-phosphate
  modified_base 10: mod_base = OTHER; note = 2'-fluorocytidine-3'-phosphate
  modified_base 11: mod_base = OTHER; note = 2'-fluoroadenosine-3'-phosphate
  modified_base 12: mod_base = OTHER; note = 2'-O-methylcytidine-3'-phosphate
  modified_base 13: mod_base = OTHER; note = 2'-O-methylcytidine-3'-phosphate
  modified_base 14: mod_base = OTHER; note = 2'-O-methyladenosine-3'-phosphate
  modified_base 15: mod_base = OTHER; note = 2'-O-methylcytidine-3'-phosphate
  modified_base 16: mod_base = OTHER; note = 2'-O-methyladenosine-3'-phosphate
  modified_base 17: mod_base = OTHER; note = 2'-O-methyladenosine-3'-phosphate
  modified_base 18: mod_base = OTHER; note = 2'-O-methylguanosine-3'-phosphate
  modified_base 19: mod_base = OTHER; note = 2'-O-methyluridine-3'-phosphorothioate
  modified_base 20: mod_base = OTHER; note = 2'-O-methylcytidine-3'-phosphorothioate
  modified_base 21: mod_base = OTHER; note = 2'-O-methyladenosine-3'-phosphate
caagccttccaccacaagtca

SEQ ID NO: 4029 - RNA, 21 nt, synthetic construct
  source 1..21: mol_type = other RNA
  modified_base 1: mod_base = OTHER; note = 2'-O-methyluridine-3'-phosphorothioate
  modified_base 2: mod_base = OTHER; note = 2'-O-methyluridine-3'-phosphorothioate
  modified_base 3: mod_base = OTHER; note = 2'-O-methylcytidine-3'-phosphate
  modified_base 4: mod_base = OTHER; note = 2'-O-methyladenosine-3'-phosphate
  modified_base 5: mod_base = OTHER; note = 2'-O-methylguanosine-3'-phosphate
  modified_base 6: mod_base = OTHER; note 1-((2R,3R,4R,5R)-3-(docosyloxy)-4-hydroxy-5-(hydroxymethyl) tetrahydrofuran-2-yl)pyrimidine-2,4(1H,3H)-dione
  modified_base 7: mod_base = OTHER; note = 2'-fluorouridine-3'-phosphate
  modified_base 8: mod_base = OTHER; note = 2'-O-methyladenosine-3'-phosphate
  modified_base 9: mod_base = OTHER; note = 2'-fluorocytidine-3'-phosphate
  modified_base 10: mod_base = OTHER; note = 2'-fluorocytidine-3'-phosphate
  modified_base 11: mod_base = OTHER; note = 2'-fluoroadenosine-3'-phosphate
  modified_base 12: mod_base = OTHER; note = 2'-O-methyladenosine-3'-phosphate
  modified_base 13: mod_base = OTHER; note = 2'-O-methyladenosine-3'-phosphate
  modified_base 14: mod_base = OTHER; note = 2'-O-methylguanosine-3'-phosphate
  modified_base 15: mod_base = OTHER; note = 2'-O-methyluridine-3'-phosphate
  modified_base 16: mod_base = OTHER; note = 2'-O-methylguanosine-3'-phosphate
  modified_base 17: mod_base = OTHER; note = 2'-O-methylguanosine-3'-phosphate
  modified_base 18: mod_base = OTHER; note = 2'-O-methylcytidine-3'-phosphate
  modified_base 19: mod_base = OTHER; note = 2'-O-methylcytidine-3'-phosphorothioate
  modified_base 20: mod_base = OTHER; note = 2'-O-methyladenosine-3'-phosphorothioate
  modified_base 21: mod_base = OTHER; note = 2'-O-methyladenosine-3'-phosphate
ttcagttaccaaagtggccaa

SEQ ID NO: 4030 - RNA, 21 nt, synthetic construct
  source 1..21: mol_type = other RNA
  modified_base 1: mod_base = OTHER; note = 2'-O-methylcytidine-3'-phosphorothioate
  modified_base 2: mod_base = OTHER; note = 2'-O-methyladenosine-3'-phosphorothioate
  modified_base 3: mod_base = OTHER; note = 2'-O-methylcytidine-3'-phosphate
  modified_base 4: mod_base = OTHER; note = 2'-O-methylcytidine-3'-phosphate
  modified_base 5: mod_base = OTHER; note = 2'-O-methyluridine-3'-phosphate
  modified_base 6: mod_base = OTHER; note 2-amino-9-((2R,3S,4S,5R)-3-(docosyloxy)-4-hydroxy-5-(hydrox ymethyl)tetrahydrofuran-2-yl)-1,9-dihydro-6H-purin-6-one
  modified_base 7: mod_base = OTHER; note = 2'-fluorocytidine-3'-phosphate
  modified_base 8: mod_base = OTHER; note = 2'-O-methyluridine-3'-phosphate
  modified_base 9: mod_base = OTHER; note = 2'-fluorouridine-3'-phosphate
  modified_base 10: mod_base = OTHER; note = 2'-fluorocytidine-3'-phosphate
  modified_base 11: mod_base = OTHER; note = 2'-fluorocytidine-3'-phosphate
  modified_base 12: mod_base = OTHER; note = 2'-O-methyluridine-3'-phosphate
  modified_base 13: mod_base = OTHER; note = 2'-O-methylcytidine-3'-phosphate
  modified_base 14: mod_base = OTHER; note = 2'-O-methyladenosine-3'-phosphate
  modified_base 15: mod_base = OTHER; note = 2'-O-methylcytidine-3'-phosphate
  modified_base 16: mod_base = OTHER; note = 2'-O-methylcytidine-3'-phosphate
  modified_base 17: mod_base = OTHER; note = 2'-O-methylcytidine-3'-phosphate
  modified_base 18: mod_base = OTHER; note = 2'-O-methylguanosine-3'-phosphate
  modified_base 19: mod_base = OTHER; note = 2'-O-methylguanosine-3'-phosphorothioate
  modified_base 20: mod_base = OTHER; note = 2'-O-methyladenosine-3'-phosphorothioate
  modified_base 21: mod_base = OTHER; note = 2'-O-methyladenosine-3'-phosphate
cacctgcttcctcacccggaa

SEQ ID NO: 4031 - RNA, 21 nt, synthetic construct
  source 1..21: mol_type = other RNA
  modified_base 1: mod_base = OTHER; note = 2'-O-methyluridine-3'-phosphorothioate
  modified_base 2: mod_base = OTHER; note = 2'-O-methyluridine-3'-phosphorothioate
  modified_base 3: mod_base = OTHER; note = 2'-O-methyluridine-3'-phosphate
  modified_base 4: mod_base = OTHER; note = 2'-O-methyluridine-3'-phosphate
  modified_base 5: mod_base = OTHER; note = 2'-O-methyladenosine-3'-phosphate
  modified_base 6: mod_base = OTHER; note 1-((2R,3R,4R,5R)-3-(docosyloxy)-4-hydroxy-5-(hydroxymethyl) tetrahydrofuran-2-yl)pyrimidine-2,4(1H,3H)-dione
  modified_base 7: mod_base = OTHER; note = 2'-fluorocytidine-3'-phosphate
  modified_base 8: mod_base = OTHER; note = 2'-O-methyladenosine-3'-phosphate
  modified_base 9: mod_base = OTHER; note = 2'-fluorocytidine-3'-phosphate
  modified_base 10: mod_base = OTHER; note = 2'-fluorocytidine-3'-phosphate
  modified_base 11: mod_base = OTHER; note = 2'-fluorocytidine-3'-phosphate
  modified_base 12: mod_base = OTHER; note = 2'-O-methyladenosine-3'-phosphate
  modified_base 13: mod_base = OTHER; note = 2'-O-methylcytidine-3'-phosphate
  modified_base 14: mod_base = OTHER; note = 2'-O-methyladenosine-3'-phosphate
  modified_base 15: mod_base = OTHER; note = 2'-O-methyluridine-3'-phosphate
  modified_base 16: mod_base = OTHER; note = 2'-O-methyladenosine-3'-phosphate
  modified_base 17: mod_base = OTHER; note = 2'-O-methylguanosine-3'-phosphate
  modified_base 18: mod_base = OTHER; note = 2'-O-methyluridine-3'-phosphate
  modified_base 19: mod_base = OTHER; note = 2'-O-methylguanosine-3'-phosphorothioate
  modified_base 20: mod_base = OTHER; note = 2'-O-methylguanosine-3'-phosphorothioate
  modified_base 21: mod_base = OTHER; note = 2'-O-methyladenosine-3'-phosphate
ttttatcacccacatagtgga

SEQ ID NO: 4032 - RNA, 21 nt, synthetic construct
  source 1..21: mol_type = other RNA
  modified_base 1: mod_base = OTHER; note = 2'-O-methyladenosine-3'-phosphorothioate
  modified_base 2: mod_base = OTHER; note = 2'-O-methylguanosine-3'-phosphorothioate
  modified_base 3: mod_base = OTHER; note = 2'-O-methylguanosine-3'-phosphate
  modified_base 4: mod_base = OTHER; note = 2'-O-methyladenosine-3'-phosphate
  modified_base 5: mod_base = OTHER; note = 2'-O-methylguanosine-3'-phosphate
  modified_base 6: mod_base = OTHER; note (2R,3S,4S,5R)-5-(6-amino-9H-purin-9-yl)-4-(docosyloxy)-2-(h ydroxymethyl)tetrahydrofuran-3-ol
  modified_base 7: mod_base = OTHER; note = 2'-fluorocytidine-3'-phosphate
  modified_base 8: mod_base = OTHER; note = 2'-O-methylcytidine-3'-phosphate
  modified_base 9: mod_base = OTHER; note = 2'-fluoroguanosine-3'-phosphate
  modified_base 10: mod_base = OTHER; note = 2'-fluorouridine-3'-phosphate
  modified_base 11: mod_base = OTHER; note = 2'-fluorocytidine-3'-phosphate
  modified_base 12: mod_base = OTHER; note = 2'-O-methylguanosine-3'-phosphate
  modified_base 13: mod_base = OTHER; note = 2'-O-methyluridine-3'-phosphate
  modified_base 14: mod_base = OTHER; note = 2'-O-methyluridine-3'-phosphate
  modified_base 15: mod_base = OTHER; note = 2'-O-methylguanosine-3'-phosphate
  modified_base 16: mod_base = OTHER; note = 2'-O-methylcytidine-3'-phosphate
  modified_base 17: mod_base = OTHER; note = 2'-O-methylcytidine-3'-phosphate
  modified_base 18: mod_base = OTHER; note = 2'-O-methyluridine-3'-phosphate
  modified_base 19: mod_base = OTHER; note = 2'-O-methyluridine-3'-phosphorothioate
  modified_base 20: mod_base = OTHER; note = 2'-O-methylguanosine-3'-phosphorothioate
  modified_base 21: mod_base = OTHER; note = 2'-O-methyladenosine-3'-phosphate
aggagaccgtcgttgccttga

SEQ ID NO: 4033 - RNA, 21 nt, synthetic construct
  source 1..21: mol_type = other RNA
  modified_base 1: mod_base = OTHER; note = 2'-O-methyladenosine-3'-phosphorothioate
  modified_base 2: mod_base = OTHER; note = 2'-O-methyluridine-3'-phosphorothioate
  modified_base 3: mod_base = OTHER; note = 2'-O-methylguanosine-3'-phosphate
  modified_base 4: mod_base = OTHER; note = 2'-O-methylguanosine-3'-phosphate
  modified_base 5: mod_base = OTHER; note = 2'-O-methylcytidine-3'-phosphate
  modified_base 6: mod_base = OTHER; note 4-amino-1-((2R,3R,4R,5R)-3-(docosyloxy)-4-hydroxy-5-(hydrox ymethyl)tetrahydrofuran-2-yl)pyrimidin-2(1H)-one
  modified_base 7: mod_base = OTHER; note = 2'-fluorocytidine-3'-phosphate
  modified_base 8: mod_base = OTHER; note = 2'-O-methyladenosine-3'-phosphate
  modified_base 9: mod_base = OTHER; note = 2'-fluoroguanosine-3'-phosphate
  modified_base 10: mod_base = OTHER; note = 2'-fluorocytidine-3'-phosphate
  modified_base 11: mod_base = OTHER; note = 2'-fluoroadenosine-3'-phosphate
  modified_base 12: mod_base = OTHER; note = 2'-O-methyladenosine-3'-phosphate
  modified_base 13: mod_base = OTHER; note = 2'-O-methyladenosine-3'-phosphate
  modified_base 14: mod_base = OTHER; note = 2'-O-methyladenosine-3'-phosphate
  modified_base 15: mod_base = OTHER; note = 2'-O-methylguanosine-3'-phosphate
  modified_base 16: mod_base = OTHER; note = 2'-O-methyluridine-3'-phosphate
  modified_base 17: mod_base = OTHER; note = 2'-O-methyluridine-3'-phosphate
  modified_base 18: mod_base = OTHER; note = 2'-O-methylcytidine-3'-phosphate
  modified_base 19: mod_base = OTHER; note = 2'-O-methylguanosine-3'-phosphorothioate
  modified_base 20: mod_base = OTHER; note = 2'-O-methyladenosine-3'-phosphorothioate
  modified_base 21: mod_base = OTHER; note = 2'-O-methyladenosine-3'-phosphate
atggcccagcaaaagttcgaa

SEQ ID NO: 4034 - RNA, 21 nt, synthetic construct
  source 1..21: mol_type = other RNA
  modified_base 1: mod_base = OTHER; note = 2'-O-methyladenosine-3'-phosphorothioate
  modified_base 2: mod_base = OTHER; note = 2'-O-methylguanosine-3'-phosphorothioate
  modified_base 3: mod_base = OTHER; note = 2'-O-methyladenosine-3'-phosphate
  modified_base 4: mod_base = OTHER; note = 2'-O-methylcytidine-3'-phosphate
  modified_base 5: mod_base = OTHER; note = 2'-O-methylguanosine-3'-phosphate
  modified_base 6: mod_base = OTHER; note 4-amino-1-((2R,3R,4R,5R)-3-(docosyloxy)-4-hydroxy-5-(hydrox ymethyl)tetrahydrofuran-2-yl)pyrimidin-2(1H)-one
  modified_base 7: mod_base = OTHER; note = 2'-fluorocytidine-3'-phosphate
  modified_base 8: mod_base = OTHER; note = 2'-O-methyladenosine-3'-phosphate
  modified_base 9: mod_base = OTHER; note = 2'-fluoroadenosine-3'-phosphate
  modified_base 10: mod_base = OTHER; note = 2'-fluoroadenosine-3'-phosphate
  modified_base 11: mod_base = OTHER; note = 2'-fluoroguanosine-3'-phosphate
  modified_base 12: mod_base = OTHER; note = 2'-O-methylcytidine-3'-phosphate
  modified_base 13: mod_base = OTHER; note = 2'-O-methylcytidine-3'-phosphate
  modified_base 14: mod_base = OTHER; note = 2'-O-methyladenosine-3'-phosphate
  modified_base 15: mod_base = OTHER; note = 2'-O-methyluridine-3'-phosphate
  modified_base 16: mod_base = OTHER; note = 2'-O-methylguanosine-3'-phosphate
  modified_base 17: mod_base = OTHER; note = 2'-O-methylcytidine-3'-phosphate
  modified_base 18: mod_base = OTHER; note = 2'-O-methylguanosine-3'-phosphate
  modified_base 19: mod_base = OTHER; note = 2'-O-methylguanosine-3'-phosphorothioate
  modified_base 20: mod_base = OTHER; note = 2'-O-methyluridine-3'-phosphorothioate
  modified_base 21: mod_base = OTHER; note = 2'-O-methyladenosine-3'-phosphate
agacgccaaagccatgcggta

SEQ ID NO: 4035 - RNA, 21 nt, synthetic construct
  source 1..21: mol_type = other RNA
  modified_base 1: mod_base = OTHER; note = 2'-O-methylcytidine-3'-phosphorothioate
  modified_base 2: mod_base = OTHER; note = 2'-O-methyladenosine-3'-phosphorothioate
  modified_base 3: mod_base = OTHER; note = 2'-O-methylguanosine-3'-phosphate
  modified_base 4: mod_base = OTHER; note = 2'-O-methylcytidine-3'-phosphate
  modified_base 5: mod_base = OTHER; note = 2'-O-methyluridine-3'-phosphate
  modified_base 6: mod_base = OTHER; note (2R,3S,4S,5R)-5-(6-amino-9H-purin-9-yl)-4-(docosyloxy)-2-(h ydroxymethyl)tetrahydrofuran-3-ol
  modified_base 7: mod_base = OTHER; note = 2'-fluoroadenosine-3'-phosphate
  modified_base 8: mod_base = OTHER; note = 2'-O-methyluridine-3'-phosphate
  modified_base 9: mod_base = OTHER; note = 2'-fluoroguanosine-3'-phosphate
  modified_base 10: mod_base = OTHER; note = 2'-fluorocytidine-3'-phosphate
  modified_base 11: mod_base = OTHER; note = 2'-fluoroadenosine-3'-phosphate
  modified_base 12: mod_base = OTHER; note = 2'-O-methylcytidine-3'-phosphate
  modified_base 13: mod_base = OTHER; note = 2'-O-methylcytidine-3'-phosphate
  modified_base 14: mod_base = OTHER; note = 2'-O-methyladenosine-3'-phosphate
  modified_base 15: mod_base = OTHER; note = 2'-O-methylcytidine-3'-phosphate
  modified_base 16: mod_base = OTHER; note = 2'-O-methylcytidine-3'-phosphate
  modified_base 17: mod_base = OTHER; note = 2'-O-methyluridine-3'-phosphate
  modified_base 18: mod_base = OTHER; note = 2'-O-methylcytidine-3'-phosphate
  modified_base 19: mod_base = OTHER; note = 2'-O-methyladenosine-3'-phosphorothioate
  modified_base 20: mod_base = OTHER; note = 2'-O-methylcytidine-3'-phosphorothioate
  modified_base 21: mod_base = OTHER; note = 2'-O-methyladenosine-3'-phosphate
cagctaatgcaccacctcaca

SEQ ID NO: 4036 - RNA, 21 nt, synthetic construct
  source 1..21: mol_type = other RNA
  modified_base 1: mod_base = OTHER; note = 2'-O-methylguanosine-3'-phosphorothioate
  modified_base 2: mod_base = OTHER; note = 2'-O-methylguanosine-3'-phosphorothioate
  modified_base 3: mod_base = OTHER; note = 2'-O-methyladenosine-3'-phosphate
  modified_base 4: mod_base = OTHER; note = 2'-O-methyladenosine-3'-phosphate
  modified_base 5: mod_base = OTHER; note = 2'-O-methyladenosine-3'-phosphate
  modified_base 6: mod_base = OTHER; note (2R,3S,4S,5R)-5-(6-amino-9H-purin-9-yl)-4-(docosyloxy)-2-(h ydroxymethyl)tetrahydrofuran-3-ol
  modified_base 7: mod_base = OTHER; note = 2'-fluoroguanosine-3'-phosphate
  modified_base 8: mod_base = OTHER; note = 2'-O-methylcytidine-3'-phosphate
  modified_base 9: mod_base = OTHER; note = 2'-fluoroadenosine-3'-phosphate
  modified_base 10: mod_base = OTHER; note = 2'-fluoroguanosine-3'-phosphate
  modified_base 11: mod_base = OTHER; note = 2'-fluoroadenosine-3'-phosphate
  modified_base 12: mod_base = OTHER; note = 2'-O-methylcytidine-3'-phosphate
  modified_base 13: mod_base = OTHER; note = 2'-O-methylguanosine-3'-phosphate
  modified_base 14: mod_base = OTHER; note = 2'-O-methylguanosine-3'-phosphate
  modified_base 15: mod_base = OTHER; note = 2'-O-methylcytidine-3'-phosphate
  modified_base 16: mod_base = OTHER; note = 2'-O-methylguanosine-3'-phosphate
  modified_base 17: mod_base = OTHER; note = 2'-O-methyladenosine-3'-phosphate
  modified_base 18: mod_base = OTHER; note = 2'-O-methyladenosine-3'-phosphate
  modified_base 19: mod_base = OTHER; note = 2'-O-methyluridine-3'-phosphorothioate
  modified_base 20: mod_base = OTHER; note = 2'-O-methyladenosine-3'-phosphorothioate
  modified_base 21: mod_base = OTHER; note = 2'-O-methyladenosine-3'-phosphate
ggaaaagcagacggcgaataa

SEQ ID NO: 4037 - RNA, 21 nt, synthetic construct
  source 1..21: mol_type = other RNA
  modified_base 1: mod_base = OTHER; note = 2'-O-methylguanosine-3'-phosphorothioate
  modified_base 2: mod_base = OTHER; note = 2'-O-methylcytidine-3'-phosphorothioate
  modified_base 3: mod_base = OTHER; note = 2'-O-methyluridine-3'-phosphate
  modified_base 4: mod_base = OTHER; note = 2'-O-methyluridine-3'-phosphate
  modified_base 5: mod_base = OTHER; note = 2'-O-methyluridine-3'-phosphate
  modified_base 6: mod_base = OTHER; note 2-amino-9-((2R,3S,4S,5R)-3-(docosyloxy)-4-hydroxy-5-(hydrox ymethyl)tetrahydrofuran-2-yl)-1,9-dihydro-6H-purin-6-one
  modified_base 7: mod_base = OTHER; note = 2'-fluorocytidine-3'-phosphate
  modified_base 8: mod_base = OTHER; note = 2'-O-methyluridine-3'-phosphate
  modified_base 9: mod_base = OTHER; note = 2'-fluoroguanosine-3'-phosphate
  modified_base 10: mod_base = OTHER; note = 2'-fluoroguanosine-3'-phosphate
  modified_base 11: mod_base = OTHER; note = 2'-fluoroguanosine-3'-phosphate
  modified_base 12: mod_base = OTHER; note = 2'-O-methyluridine-3'-phosphate
  modified_base 13: mod_base = OTHER; note = 2'-O-methyladenosine-3'-phosphate
  modified_base 14: mod_base = OTHER; note = 2'-O-methylguanosine-3'-phosphate
  modified_base 15: mod_base = OTHER; note = 2'-O-methyluridine-3'-phosphate
  modified_base 16: mod_base = OTHER; note = 2'-O-methylguanosine-3'-phosphate
  modified_base 17: mod_base = OTHER; note = 2'-O-methyladenosine-3'-phosphate
  modified_base 18: mod_base = OTHER; note = 2'-O-methylguanosine-3'-phosphate
  modified_base 19: mod_base = OTHER; note = 2'-O-methylcytidine-3'-phosphorothioate
  modified_base 20: mod_base = OTHER; note = 2'-O-methyluridine-3'-phosphorothioate
  modified_base 21: mod_base = OTHER; note = 2'-O-methyladenosine-3'-phosphate
gctttgctgggtagtgagcta

SEQ ID NO: 4038 - RNA, 23 nt, synthetic construct
  source 1..23: mol_type = other RNA
  modified_base 1: mod_base = OTHER; note = Vinyl-phosphonate 2'-O-methyluridine-3'-phosphorothioate
  modified_base 2: mod_base = OTHER; note = 2'-fluorouridine -3'-phosphorothioate
  modified_base 3: mod_base = OTHER; note = 2'-O-methylguanosine-3'-phosphate
  modified_base 4: mod_base = OTHER; note = 2'-O-methyladenosine-3'-phosphate
  modified_base 5: mod_base = OTHER; note = 2'-O-methyluridine-3'-phosphate
  modified_base 6: mod_base = OTHER; note = 2'-fluorocytidine-3'-phosphate
  modified_base 7: mod_base = OTHER; note = 2'-O-methyladenosine-3'-phosphate
  modified_base 8: mod_base = OTHER; note = 2'-fluoroadenosine-3'-phosphate
  modified_base 9: mod_base = OTHER; note = 2'-fluoroguanosine-3'-phosphate
  modified_base 10: mod_base = OTHER; note = 2'-O-methyladenosine-3'-phosphate
  modified_base 11: mod_base = OTHER; note = 2'-O-methyluridine-3'-phosphate
  modified_base 12: mod_base = OTHER; note = 2'-O-methylguanosine-3'-phosphate
  modified_base 13: mod_base = OTHER; note = 2'-O-methyladenosine-3'-phosphate
  modified_base 14: mod_base = OTHER; note = 2'-fluoroadenosine-3'-phosphate
  modified_base 15: mod_base = OTHER; note = 2'-O-methylguanosine-3'-phosphate
  modified_base 16: mod_base = OTHER; note = 2'-fluoroadenosine-3'-phosphate
  modified_base 17: mod_base = OTHER; note = 2'-O-methyladenosine-3'-phosphate
  modified_base 18: mod_base = OTHER; note = 2'-O-methylguanosine-3'-phosphate
  modified_base 19: mod_base = OTHER; note = 2'-O-methylguanosine-3'-phosphate
  modified_base 20: mod_base = OTHER; note = 2'-O-methyladenosine-3'-phosphate
  modified_base 21: mod_base = OTHER; note = 2'-O-methyladenosine-3'-phosphorothioate
  modified_base 22: mod_base = OTHER; note = 2'-O-methylguanosine-3'-phosphorothioate
  modified_base 23: mod_base = OTHER; note = 2'-O-methyluridine-3'-phosphate
ttgatcaagatgaagaaggaagt

SEQ ID NO: 4039 - RNA, 23 nt, synthetic construct
  source 1..23: mol_type = other RNA
  modified_base 1: mod_base = OTHER; note = Vinyl-phosphonate 2'-O-methyluridine-3'-phosphorothioate
  modified_base 2: mod_base = OTHER; note = 2'-fluorouridine -3'-phosphorothioate
  modified_base 3: mod_base = OTHER; note = 2'-O-methylguanosine-3'-phosphate
  modified_base 4: mod_base = OTHER; note = 2'-O-methyladenosine-3'-phosphate
  modified_base 5: mod_base = OTHER; note = 2'-O-methyladenosine-3'-phosphate
  modified_base 6: mod_base = OTHER; note = 2'-fluorocytidine-3'-phosphate
  modified_base 7: mod_base = OTHER; note = 2'-O-methyladenosine-3'-phosphate
  modified_base 8: mod_base = OTHER; note = 2'-fluorouridine-3'-phosphate
  modified_base 9: mod_base = OTHER; note = 2'-fluorocytidine-3'-phosphate
  modified_base 10: mod_base = OTHER; note = 2'-O-methyladenosine-3'-phosphate
  modified_base 11: mod_base = OTHER; note = 2'-O-methylguanosine-3'-phosphate
  modified_base 12: mod_base = OTHER; note = 2'-O-methyluridine-3'-phosphate
  modified_base 13: mod_base = OTHER; note = 2'-O-methyluridine-3'-phosphate
  modified_base 14: mod_base = OTHER; note = 2'-fluorouridine-3'-phosphate
  modified_base 15: mod_base = OTHER; note = 2'-O-methyluridine-3'-phosphate
  modified_base 16: mod_base = OTHER; note = 2'-fluoroadenosine-3'-phosphate
  modified_base 17: mod_base = OTHER; note = 2'-O-methylguanosine-3'-phosphate
  modified_base 18: mod_base = OTHER; note = 2'-O-methyladenosine-3'-phosphate
  modified_base 19: mod_base = OTHER; note = 2'-O-methylguanosine-3'-phosphate
  modified_base 20: mod_base = OTHER; note = 2'-O-methyluridine-3'-phosphate
  modified_base 21: mod_base = OTHER; note = 2'-O-methylguanosine-3'-phosphorothioate
  modified_base 22: mod_base = OTHER; note = 2'-O-methyladenosine-3'-phosphorothioate
  modified_base 23: mod_base = OTHER; note = 2'-O-methyladenosine-3'-phosphate
ttgaacatcagttttagagtgaa

SEQ ID NO: 4040 - RNA, 23 nt, synthetic construct
  source 1..23: mol_type = other RNA
  modified_base 1: mod_base = OTHER; note = Vinyl-phosphonate 2'-O-methyluridine-3'-phosphorothioate
  modified_base 2: mod_base = OTHER; note = 2'-fluorouridine -3'-phosphorothioate
  modified_base 3: mod_base = OTHER; note = 2'-O-methylguanosine-3'-phosphate
  modified_base 4: mod_base = OTHER; note = 2'-O-methyladenosine-3'-phosphate
  modified_base 5: mod_base = OTHER; note = 2'-O-methylguanosine-3'-phosphate
  modified_base 6: mod_base = OTHER; note = 2'-fluorouridine-3'-phosphate
  modified_base 7: mod_base = OTHER; note = 2'-O-methylcytidine-3'-phosphate
  modified_base 8: mod_base = OTHER; note = 2'-fluoroadenosine-3'-phosphate
  modified_base 9: mod_base = OTHER; note = 2'-fluoroguanosine-3'-phosphate
  modified_base 10: mod_base = OTHER; note = 2'-O-methyluridine-3'-phosphate
  modified_base 11: mod_base = OTHER; note = 2'-O-methylguanosine-3'-phosphate
  modified_base 12: mod_base = OTHER; note = 2'-O-methyladenosine-3'-phosphate
  modified_base 13: mod_base = OTHER; note = 2'-O-methyluridine-3'-phosphate
  modified_base 14: mod_base = OTHER; note = 2'-fluoroadenosine-3'-phosphate
  modified_base 15: mod_base = OTHER; note = 2'-O-methylcytidine-3'-phosphate
  modified_base 16: mod_base = OTHER; note = 2'-fluoroadenosine-3'-phosphate
  modified_base 17: mod_base = OTHER; note = 2'-O-methylguanosine-3'-phosphate
  modified_base 18: mod_base = OTHER; note = 2'-O-methyladenosine-3'-phosphate
  modified_base 19: mod_base = OTHER; note = 2'-O-methyladenosine-3'-phosphate
  modified_base 20: mod_base = OTHER; note = 2'-O-methylguanosine-3'-phosphate
  modified_base 21: mod_base = OTHER; note = 2'-O-methyladenosine-3'-phosphorothioate
  modified_base 22: mod_base = OTHER; note = 2'-O-methyluridine-3'-phosphorothioate
  modified_base 23: mod_base = OTHER; note = 2'-O-methylguanosine-3'-phosphate
ttgagtcagtgatacagaagatg

SEQ ID NO: 4041 - RNA, 23 nt, synthetic construct
  source 1..23: mol_type = other RNA
  modified_base 1: mod_base = OTHER; note = Vinyl-phosphonate 2'-O-methyluridine-3'-phosphorothioate
  modified_base 2: mod_base = OTHER; note = 2'-fluorouridine -3'-phosphorothioate
  modified_base 3: mod_base = OTHER; note = 2'-O-methylguanosine-3'-phosphate
  modified_base 4: mod_base = OTHER; note = 2'-O-methylguanosine-3'-phosphate
  modified_base 5: mod_base = OTHER; note = 2'-O-methyladenosine-3'-phosphate
  modified_base 6: mod_base = OTHER; note = 2'-fluorouridine-3'-phosphate
  modified_base 7: mod_base = OTHER; note = 2'-O-methylcytidine-3'-phosphate
  modified_base 8: mod_base = OTHER; note = 2'-fluoroadenosine-3'-phosphate
  modified_base 9: mod_base = OTHER; note = 2'-fluoroguanosine-3'-phosphate
  modified_base 10: mod_base = OTHER; note = 2'-O-methyluridine-3'-phosphate
  modified_base 11: mod_base = OTHER; note = 2'-O-methylcytidine-3'-phosphate
  modified_base 12: mod_base = OTHER; note = 2'-O-methyladenosine-3'-phosphate
  modified_base 13: mod_base = OTHER; note = 2'-O-methylguanosine-3'-phosphate
  modified_base 14: mod_base = OTHER; note = 2'-fluoroadenosine-3'-phosphate
  modified_base 15: mod_base = OTHER; note = 2'-O-methyladenosine-3'-phosphate
  modified_base 16: mod_base = OTHER; note = 2'-fluoroguanosine-3'-phosphate
  modified_base 17: mod_base = OTHER; note = 2'-O-methyladenosine-3'-phosphate
  modified_base 18: mod_base = OTHER; note = 2'-O-methyluridine-3'-phosphate
  modified_base 19: mod_base = OTHER; note = 2'-O-methylcytidine-3'-phosphate
  modified_base 20: mod_base = OTHER; note = 2'-O-methyluridine-3'-phosphate
  modified_base 21: mod_base = OTHER; note = 2'-O-methylguanosine-3'-phosphorothioate
  modified_base 22: mod_base = OTHER; note = 2'-O-methyladenosine-3'-phosphorothioate
  modified_base 23: mod_base = OTHER; note = 2'-O-methylcytidine-3'-phosphate
ttggatcagtcagaagatctgac

SEQ ID NO: 4042 - RNA, 23 nt, synthetic construct
  source 1..23: mol_type = other RNA
  modified_base 1: mod_base = OTHER; note = Vinyl-phosphonate 2'-O-methyluridine-3'-phosphorothioate
  modified_base 2: mod_base = OTHER; note = 2'-fluorouridine -3'-phosphorothioate
  modified_base 3: mod_base = OTHER; note = 2'-O-methyluridine-3'-phosphate
  modified_base 4: mod_base = OTHER; note = 2'-O-methyladenosine-3'-phosphate
  modified_base 5: mod_base = OTHER; note = 2'-O-methyluridine-3'-phosphate
  modified_base 6: mod_base = OTHER; note = 2'-fluoroguanosine-3'-phosphate
  modified_base 7: mod_base = OTHER; note = 2'-O-methylguanosine-3'-phosphate
  modified_base 8: mod_base = OTHER; note = 2'-fluoroadenosine-3'-phosphate
  modified_base 9: mod_base = OTHER; note = 2'-fluoroguanosine-3'-phosphate
  modified_base 10: mod_base = OTHER; note = 2'-O-methyladenosine-3'-phosphate
  modified_base 11: mod_base = OTHER; note = 2'-O-methyladenosine-3'-phosphate
  modified_base 12: mod_base = OTHER; note = 2'-O-methyladenosine-3'-phosphate
  modified_base 13: mod_base = OTHER; note = 2'-O-methyladenosine-3'-phosphate
  modified_base 14: mod_base = OTHER; note = 2'-fluoroadenosine-3'-phosphate
  modified_base 15: mod_base = OTHER; note = 2'-O-methyluridine-3'-phosphate
  modified_base 16: mod_base = OTHER; note = 2'-fluoroguanosine-3'-phosphate
  modified_base 17: mod_base = OTHER; note = 2'-O-methyluridine-3'-phosphate
  modified_base 18: mod_base = OTHER; note = 2'-O-methylguanosine-3'-phosphate
  modified_base 19: mod_base = OTHER; note = 2'-O-methyluridine-3'-phosphate
  modified_base 20: mod_base = OTHER; note = 2'-O-methylcytidine-3'-phosphate
  modified_base 21: mod_base = OTHER; note = 2'-O-methyladenosine-3'-phosphorothioate
  modified_base 22: mod_base = OTHER; note = 2'-O-methylguanosine-3'-phosphorothioate
  modified_base 23: mod_base = OTHER; note = 2'-O-methyluridine-3'-phosphate
tttatggagaaaaatgtgtcagt

SEQ ID NO: 4043 - RNA, 23 nt, synthetic construct
  source 1..23: mol_type = other RNA
  modified_base 1: mod_base = OTHER; note = Vinyl-phosphonate 2'-O-methyluridine-3'-phosphorothioate
  modified_base 2: mod_base = OTHER; note = 2'-fluorouridine -3'-phosphorothioate
  modified_base 3: mod_base = OTHER; note = 2'-O-methyluridine-3'-phosphate
  modified_base 4: mod_base = OTHER; note = 2'-O-methyladenosine-3'-phosphate
  modified_base 5: mod_base = OTHER; note = 2'-O-methyluridine-3'-phosphate
  modified_base 6: mod_base = OTHER; note = 2'-fluoroguanosine-3'-phosphate
  modified_base 7: mod_base = OTHER; note = 2'-O-methyluridine-3'-phosphate
  modified_base 8: mod_base = OTHER; note = 2'-fluoroadenosine-3'-phosphate
  modified_base 9: mod_base = OTHER; note = 2'-fluoroadenosine-3'-phosphate
  modified_base 10: mod_base = OTHER; note = 2'-O-methyladenosine-3'-phosphate
  modified_base 11: mod_base = OTHER; note = 2'-O-methyladenosine-3'-phosphate
  modified_base 12: mod_base = OTHER; note = 2'-O-methyladenosine-3'-phosphate
  modified_base 13: mod_base = OTHER; note = 2'-O-methyluridine-3'-phosphate
  modified_base 14: mod_base = OTHER; note = 2'-fluoroguanosine-3'-phosphate
  modified_base 15: mod_base = OTHER; note = 2'-O-methyladenosine-3'-phosphate
  modified_base 16: mod_base = OTHER; note = 2'-fluoroguanosine-3'-phosphate
  modified_base 17: mod_base = OTHER; note = 2'-O-methyluridine-3'-phosphate
  modified_base 18: mod_base = OTHER; note = 2'-O-methyluridine-3'-phosphate
  modified_base 19: mod_base = OTHER; note = 2'-O-methyluridine-3'-phosphate
  modified_base 20: mod_base = OTHER; note = 2'-O-methylcytidine-3'-phosphate
  modified_base 21: mod_base = OTHER; note = 2'-O-methylcytidine-3'-phosphorothioate
  modified_base 22: mod_base = OTHER; note = 2'-O-methyladenosine-3'-phosphorothioate
  modified_base 23: mod_base = OTHER; note = 2'-O-methylguanosine-3'-phosphate
tttatgtaaaaatgagtttccag

SEQ ID NO: 4044 - RNA, 23 nt, synthetic construct
  source 1..23: mol_type = other RNA
  modified_base 1: mod_base = OTHER; note = Vinyl-phosphonate 2'-O-methyluridine-3'-phosphorothioate
  modified_base 2: mod_base = OTHER; note = 2'-fluoroadenosine-3'-phosphorothioate
  modified_base 3: mod_base = OTHER; note = 2'-O-methylguanosine-3'-phosphate
  modified_base 4: mod_base = OTHER; note = 2'-O-methyladenosine-3'-phosphate
  modified_base 5: mod_base = OTHER; note = 2'-O-methyladenosine-3'-phosphate
  modified_base 6: mod_base = OTHER; note = 2'-fluorouridine-3'-phosphate
  modified_base 7: mod_base = OTHER; note = 2'-O-methyluridine-3'-phosphate
  modified_base 8: mod_base = OTHER; note = 2'-fluorouridine-3'-phosphate
  modified_base 9: mod_base = OTHER; note = 2'-fluorocytidine-3'-phosphate
  modified_base 10: mod_base = OTHER; note = 2'-O-methyluridine-3'-phosphate
  modified_base 11: mod_base = OTHER; note = 2'-O-methyladenosine-3'-phosphate
  modified_base 12: mod_base = OTHER; note = 2'-O-methyladenosine-3'-phosphate
  modified_base 13: mod_base = OTHER; note = 2'-O-methylguanosine-3'-phosphate
  modified_base 14: mod_base = OTHER; note = 2'-fluorouridine-3'-phosphate
  modified_base 15: mod_base = OTHER; note = 2'-O-methyluridine-3'-phosphate
  modified_base 16: mod_base = OTHER; note = 2'-fluoroguanosine-3'-phosphate
  modified_base 17: mod_base = OTHER; note = 2'-O-methylcytidine-3'-phosphate
  modified_base 18: mod_base = OTHER; note = 2'-O-methyluridine-3'-phosphate
  modified_base 19: mod_base = OTHER; note = 2'-O-methylguanosine-3'-phosphate
  modified_base 20: mod_base = OTHER; note = 2'-O-methyladenosine-3'-phosphate
  modified_base 21: mod_base = OTHER; note = 2'-O-methyluridine-3'-phosphorothioate
  modified_base 22: mod_base = OTHER; note = 2'-O-methyladenosine-3'-phosphorothioate
  modified_base 23: mod_base = OTHER; note = 2'-O-methyladenosine-3'-phosphate
tagaatttctaagttgctgataa

SEQ ID NO: 4045 - RNA, 23 nt, synthetic construct
  source 1..23: mol_type = other RNA
  modified_base 1: mod_base = OTHER; note = Vinyl-phosphonate 2'-O-methyluridine-3'-phosphorothioate
  modified_base 2: mod_base = OTHER; note = 2'-fluoroguanosine-3'-phosphorothioate
  modified_base 3: mod_base = OTHER; note = 2'-O-methyluridine-3'-phosphate
  modified_base 4: mod_base = OTHER; note = 2'-O-methyladenosine-3'-phosphate
  modified_base 5: mod_base = OTHER; note = 2'-O-methylcytidine-3'-phosphate
  modified_base 6: mod_base = OTHER; note = 2'-fluorouridine-3'-phosphate
  modified_base 7: mod_base = OTHER; note = 2'-O-methylcytidine-3'-phosphate
  modified_base 8: mod_base = OTHER; note = 2'-fluorouridine-3'-phosphate
  modified_base 9: mod_base = OTHER; note = 2'-fluoroadenosine-3'-phosphate
  modified_base 10: mod_base = OTHER; note = 2'-O-methylguanosine-3'-phosphate
  modified_base 11: mod_base = OTHER; note = 2'-O-methyladenosine-3'-phosphate
  modified_base 12: mod_base = OTHER; note = 2'-O-methylguanosine-3'-phosphate
  modified_base 13: mod_base = OTHER; note = 2'-O-methyladenosine-3'-phosphate
  modified_base 14: mod_base = OTHER; note = 2'-fluoroadenosine-3'-phosphate
  modified_base 15: mod_base = OTHER; note = 2'-O-methyladenosine-3'-phosphate
  modified_base 16: mod_base = OTHER; note = 2'-fluorouridine-3'-phosphate
  modified_base 17: mod_base = OTHER; note = 2'-O-methyladenosine-3'-phosphate
  modified_base 18: mod_base = OTHER; note = 2'-O-methyluridine-3'-phosphate
  modified_base 19: mod_base = OTHER; note = 2'-O-methyladenosine-3'-phosphate
  modified_base 20: mod_base = OTHER; note = 2'-O-methyladenosine-3'-phosphate
  modified_base 21: mod_base = OTHER; note = 2'-O-methylguanosine-3'-phosphorothioate
  modified_base 22: mod_base = OTHER; note = 2'-O-methylguanosine-3'-phosphorothioate
  modified_base 23: mod_base = OTHER; note = 2'-O-methyladenosine-3'-phosphate
tgtactctagagaaatataagga

SEQ ID NO: 4046 - RNA, 23 nt, synthetic construct
  source 1..23: mol_type = other RNA
  modified_base 1: mod_base = OTHER; note = Vinyl-phosphonate 2'-O-methyluridine-3'-phosphorothioate
  modified_base 2: mod_base = OTHER; note = 2'-fluoroguanosine-3'-phosphorothioate
  modified_base 3: mod_base = OTHER; note = 2'-O-methyladenosine-3'-phosphate
  modified_base 4: mod_base = OTHER; note = 2'-O-methyluridine-3'-phosphate
  modified_base 5: mod_base = OTHER; note = 2'-O-methyladenosine-3'-phosphate
  modified_base 6: mod_base = OTHER; note = 2'-fluoroadenosine-3'-phosphate
  modified_base 7: mod_base = OTHER; note = 2'-O-methyladenosine-3'-phosphate
  modified_base 8: mod_base = OTHER; note = 2'-fluoroadenosine-3'-phosphate
  modified_base 9: mod_base = OTHER; note = 2'-fluoroguanosine-3'-phosphate
  modified_base 10: mod_base = OTHER; note = 2'-O-methyladenosine-3'-phosphate
  modified_base 11: mod_base = OTHER; note = 2'-O-methyluridine-3'-phosphate
  modified_base 12: mod_base = OTHER; note = 2'-O-methyluridine-3'-phosphate
  modified_base 13: mod_base = OTHER; note = 2'-O-methylcytidine-3'-phosphate
  modified_base 14: mod_base = OTHER; note = 2'-fluorouridine-3'-phosphate
  modified_base 15: mod_base = OTHER; note = 2'-O-methyluridine-3'-phosphate
  modified_base 16: mod_base = OTHER; note = 2'-fluoroguanosine-3'-phosphate
  modified_base 17: mod_base = OTHER; note = 2'-O-methylguanosine-3'-phosphate
  modified_base 18: mod_base = OTHER; note = 2'-O-methyladenosine-3'-phosphate
  modified_base 19: mod_base = OTHER; note = 2'-O-methylguanosine-3'-phosphate
  modified_base 20: mod_base = OTHER; note = 2'-O-methyluridine-3'-phosphate
  modified_base 21: mod_base = OTHER; note = 2'-O-methyluridine-3'-phosphorothioate
  modified_base 22: mod_base = OTHER; note = 2'-O-methyluridine-3'-phosphorothioate
  modified_base 23: mod_base = OTHER; note = 2'-O-methyluridine-3'-phosphate
tgataaaagattcttggagtttt

SEQ ID NO: 4047 - RNA, 23 nt, synthetic construct
  source 1..23: mol_type = other RNA
  modified_base 1: mod_base = OTHER; note = Vinyl-phosphonate 2'-O-methyluridine-3'-phosphorothioate
  modified_base 2: mod_base = OTHER; note = 2'-fluorouridine -3'-phosphorothioate
  modified_base 3: mod_base = OTHER; note = 2'-O-methyladenosine-3'-phosphate
  modified_base 4: mod_base = OTHER; note = 2'-O-methyladenosine-3'-phosphate
  modified_base 5: mod_base = OTHER; note = 2'-O-methyluridine-3'-phosphate
  modified_base 6: mod_base = OTHER; note = 2'-fluoroguanosine-3'-phosphate
  modified_base 7: mod_base = OTHER; note = 2'-O-methylcytidine-3'-phosphate
  modified_base 8: mod_base = OTHER; note = 2'-fluoroadenosine-3'-phosphate
  modified_base 9: mod_base = OTHER; note = 2'-fluoroguanosine-3'-phosphate
  modified_base 10: mod_base = OTHER; note = 2'-O-methylguanosine-3'-phosphate
  modified_base 11: mod_base = OTHER; note = 2'-O-methyladenosine-3'-phosphate
  modified_base 12: mod_base = OTHER; note = 2'-O-methyladenosine-3'-phosphate
  modified_base 13: mod_base = OTHER; note = 2'-O-methyluridine-3'-phosphate
  modified_base 14: mod_base = OTHER; note = 2'-fluoroguanosine-3'-phosphate
  modified_base 15: mod_base = OTHER; note = 2'-O-methyluridine-3'-phosphate
  modified_base 16: mod_base = OTHER; note = 2'-fluorouridine-3'-phosphate
  modified_base 17: mod_base = OTHER; note = 2'-O-methyluridine-3'-phosphate
  modified_base 18: mod_base = OTHER; note = 2'-O-methylguanosine-3'-phosphate
  modified_base 19: mod_base = OTHER; note = 2'-O-methyladenosine-3'-phosphate
  modified_base 20: mod_base = OTHER; note = 2'-O-methyladenosine-3'-phosphate
  modified_base 21: mod_base = OTHER; note = 2'-O-methylguanosine-3'-phosphorothioate
  modified_base 22: mod_base = OTHER; note = 2'-O-methyladenosine-3'-phosphorothioate
  modified_base 23: mod_base = OTHER; note = 2'-O-methylcytidine-3'-phosphate
ttaatgcaggaatgtttgaagac

SEQ ID NO: 4048 - RNA, 23 nt, synthetic construct
  source 1..23: mol_type = other RNA
  modified_base 1: mod_base = OTHER; note = Vinyl-phosphonate 2'-O-methyluridine-3'-phosphorothioate
  modified_base 2: mod_base = OTHER; note = 2'-fluorocytidine-3'-phosphorothioate
  modified_base 3: mod_base = OTHER; note = 2'-O-methyluridine-3'-phosphate
  modified_base 4: mod_base = OTHER; note = 2'-O-methyladenosine-3'-phosphate
  modified_base 5: mod_base = OTHER; note = 2'-O-methylguanosine-3'-phosphate
  modified_base 6: mod_base = OTHER; note = 2'-fluorouridine-3'-phosphate
  modified_base 7: mod_base = OTHER; note = 2'-O-methyluridine-3'-phosphate
  modified_base 8: mod_base = OTHER; note = 2'-fluoroguanosine-3'-phosphate
  modified_base 9: mod_base = OTHER; note = 2'-fluoroadenosine-3'-phosphate
  modified_base 10: mod_base = OTHER; note = 2'-O-methylguanosine-3'-phosphate
  modified_base 11: mod_base = OTHER; note = 2'-O-methylguanosine-3'-phosphate
  modified_base 12: mod_base = OTHER; note = 2'-O-methyladenosine-3'-phosphate
  modified_base 13: mod_base = OTHER; note = 2'-O-methylguanosine-3'-phosphate
  modified_base 14: mod_base = OTHER; note = 2'-fluoroadenosine-3'-phosphate
  modified_base 15: mod_base = OTHER; note = 2'-O-methyladenosine-3'-phosphate
  modified_base 16: mod_base = OTHER; note = 2'-fluoroguanosine-3'-phosphate
  modified_base 17: mod_base = OTHER; note = 2'-O-methyladenosine-3'-phosphate
  modified_base 18: mod_base = OTHER; note = 2'-O-methyladenosine-3'-phosphate
  modified_base 19: mod_base = OTHER; note = 2'-O-methylcytidine-3'-phosphate
  modified_base 20: mod_base = OTHER; note = 2'-O-methylguanosine-3'-phosphate
  modified_base 21: mod_base = OTHER; note = 2'-O-methyladenosine-3'-phosphorothioate
  modified_base 22: mod_base = OTHER; note = 2'-O-methyluridine-3'-phosphorothioate
  modified_base 23: mod_base = OTHER; note = 2'-O-methylcytidine-3'-phosphate
tctagttgaggagaagaacgatc

SEQ ID NO: 4049 - RNA, 23 nt, synthetic construct
  source 1..23: mol_type = other RNA
  modified_base 1: mod_base = OTHER; note = Vinyl-phosphonate 2'-O-methyluridine-3'-phosphorothioate
  modified_base 2: mod_base = OTHER; note = 2'-fluoroguanosine-3'-phosphorothioate
  modified_base 3: mod_base = OTHER; note = 2'-O-methyluridine-3'-phosphate
  modified_base 4: mod_base = OTHER; note = 2'-O-methylguanosine-3'-phosphate
  modified_base 5: mod_base = OTHER; note = 2'-O-methyluridine-3'-phosphate
  modified_base 6: mod_base = OTHER; note = 2'-fluoroguanosine-3'-phosphate
  modified_base 7: mod_base = OTHER; note = 2'-O-methyladenosine-3'-phosphate
  modified_base 8: mod_base = OTHER; note = 2'-fluoroguanosine-3'-phosphate
  modified_base 9: mod_base = OTHER; note = 2'-fluoroadenosine-3'-phosphate
  modified_base 10: mod_base = OTHER; note = 2'-O-methylguanosine-3'-phosphate
  modified_base 11: mod_base = OTHER; note = 2'-O-methylguanosine-3'-phosphate
  modified_base 12: mod_base = OTHER; note = 2'-O-methyladenosine-3'-phosphate
  modified_base 13: mod_base = OTHER; note = 2'-O-methyluridine-3'-phosphate
  modified_base 14: mod_base = OTHER; note = 2'-fluorouridine-3'-phosphate
  modified_base 15: mod_base = OTHER; note = 2'-O-methyladenosine-3'-phosphate
  modified_base 16: mod_base = OTHER; note = 2'-fluoroadenosine-3'-phosphate
  modified_base 17: mod_base = OTHER; note = 2'-O-methyluridine-3'-phosphate
  modified_base 18: mod_base = OTHER; note = 2'-O-methylcytidine-3'-phosphate
  modified_base 19: mod_base = OTHER; note = 2'-O-methyluridine-3'-phosphate
  modified_base 20: mod_base = OTHER; note = 2'-O-methyluridine-3'-phosphate
  modified_base 21: mod_base = OTHER; note = 2'-O-methyluridine-3'-phosphorothioate
  modified_base 22: mod_base = OTHER; note = 2'-O-methylguanosine-3'-phosphorothioate
  modified_base 23: mod_base = OTHER; note = 2'-O-methylguanosine-3'-phosphate
tgtgtgagaggattaatctttgg

SEQ ID NO: 4050 - RNA, 23 nt, synthetic construct
  source 1..23: mol_type = other RNA
  modified_base 1: mod_base = OTHER; note = Vinyl-phosphonate 2'-O-methyluridine-3'-phosphorothioate
  modified_base 2: mod_base = OTHER; note = 2'-fluoroguanosine-3'-phosphorothioate
  modified_base 3: mod_base = OTHER; note = 2'-O-methyluridine-3'-phosphate
  modified_base 4: mod_base = OTHER; note = 2'-O-methyladenosine-3'-phosphate
  modified_base 5: mod_base = OTHER; note = 2'-O-methyluridine-3'-phosphate
  modified_base 6: mod_base = OTHER; note = 2'-fluorocytidine-3'-phosphate
  modified_base 7: mod_base = OTHER; note = 2'-O-methyluridine-3'-phosphate
  modified_base 8: mod_base = OTHER; note = 2'-fluorouridine-3'-phosphate
  modified_base 9: mod_base = OTHER; note = 2'-fluorouridine-3'-phosphate
  modified_base 10: mod_base = OTHER; note = 2'-O-methylguanosine-3'-phosphate
  modified_base 11: mod_base = OTHER; note = 2'-O-methyladenosine-3'-phosphate
  modified_base 12: mod_base = OTHER; note = 2'-O-methyluridine-3'-phosphate
  modified_base 13: mod_base = OTHER; note = 2'-O-methylguanosine-3'-phosphate
  modified_base 14: mod_base = OTHER; note = 2'-fluoroadenosine-3'-phosphate
  modified_base 15: mod_base = OTHER; note = 2'-O-methylguanosine-3'-phosphate
  modified_base 16: mod_base = OTHER; note = 2'-fluoroguanosine-3'-phosphate
  modified_base 17: mod_base = OTHER; note = 2'-O-methyluridine-3'-phosphate
  modified_base 18: mod_base = OTHER; note = 2'-O-methyluridine-3'-phosphate
  modified_base 19: mod_base = OTHER; note = 2'-O-methyladenosine-3'-phosphate
  modified_base 20: mod_base = OTHER; note = 2'-O-methylguanosine-3'-phosphate
  modified_base 21: mod_base = OTHER; note = 2'-O-methyluridine-3'-phosphorothioate
  modified_base 22: mod_base = OTHER; note = 2'-O-methyluridine-3'-phosphorothioate
  modified_base 23: mod_base = OTHER; note = 2'-O-methyluridine-3'-phosphate
tgtatctttgatgaggttagttt

SEQ ID NO: 4051 - RNA, 23 nt, synthetic construct
  source 1..23: mol_type = other RNA
  modified_base 1: mod_base = OTHER; note = Vinyl-phosphonate 2'-O-methyluridine-3'-phosphorothioate
  modified_base 2: mod_base = OTHER; note = 2'-fluorouridine -3'-phosphorothioate
  modified_base 3: mod_base = OTHER; note = 2'-O-methyluridine-3'-phosphate
  modified_base 4: mod_base = OTHER; note = 2'-O-methyluridine-3'-phosphate
  modified_base 5: mod_base = OTHER; note = 2'-O-methyladenosine-3'-phosphate
  modified_base 6: mod_base = OTHER; note = 2'-fluorouridine-3'-phosphate
  modified_base 7: mod_base = OTHER; note = 2'-O-methyluridine-3'-phosphate
  modified_base 8: mod_base = OTHER; note = 2'-fluoroadenosine-3'-phosphate
  modified_base 9: mod_base = OTHER; note = 2'-fluoroguanosine-3'-phosphate
  modified_base 10: mod_base = OTHER; note = 2'-O-methyluridine-3'-phosphate
  modified_base 11: mod_base = OTHER; note = 2'-O-methyladenosine-3'-phosphate
  modified_base 12: mod_base = OTHER; note = 2'-O-methyladenosine-3'-phosphate
  modified_base 13: mod_base = OTHER; note = 2'-O-methyluridine-3'-phosphate
  modified_base 14: mod_base = OTHER; note = 2'-fluoroadenosine-3'-phosphate
  modified_base 15: mod_base = OTHER; note = 2'-O-methyladenosine-3'-phosphate
  modified_base 16: mod_base = OTHER; note = 2'-fluoroguanosine-3'-phosphate
  modified_base 17: mod_base = OTHER; note = 2'-O-methyluridine-3'-phosphate
  modified_base 18: mod_base = OTHER; note = 2'-O-methylguanosine-3'-phosphate
  modified_base 19: mod_base = OTHER; note = 2'-O-methylguanosine-3'-phosphate
  modified_base 20: mod_base = OTHER; note = 2'-O-methyluridine-3'-phosphate
  modified_base 21: mod_base = OTHER; note = 2'-O-methylguanosine-3'-phosphorothioate
  modified_base 22: mod_base = OTHER; note = 2'-O-methylguanosine-3'-phosphorothioate
  modified_base 23: mod_base = OTHER; note = 2'-O-methylguanosine-3'-phosphate
ttttattagtaataagtggtggg

SEQ ID NO: 4052 - RNA, 23 nt, synthetic construct
  source 1..23: mol_type = other RNA
  modified_base 1: mod_base = OTHER; note = Vinyl-phosphonate 2'-O-methyluridine-3'-phosphorothioate
  modified_base 2: mod_base = OTHER; note = 2'-fluoroadenosine-3'-phosphorothioate
  modified_base 3: mod_base = OTHER; note = 2'-O-methyladenosine-3'-phosphate
  modified_base 4: mod_base = OTHER; note = 2'-O-methyladenosine-3'-phosphate
  modified_base 5: mod_base = OTHER; note = 2'-O-methylguanosine-3'-phosphate
  modified_base 6: mod_base = OTHER; note = 2'-fluoroadenosine-3'-phosphate
  modified_base 7: mod_base = OTHER; note = 2'-O-methyladenosine-3'-phosphate
  modified_base 8: mod_base = OTHER; note = 2'-fluorouridine-3'-phosphate
  modified_base 9: mod_base = OTHER; note = 2'-fluoroadenosine-3'-phosphate
  modified_base 10: mod_base = OTHER; note = 2'-O-methyluridine-3'-phosphate
  modified_base 11: mod_base = OTHER; note = 2'-O-methyluridine-3'-phosphate
  modified_base 12: mod_base = OTHER; note = 2'-O-methyluridine-3'-phosphate
  modified_base 13: mod_base = OTHER; note = 2'-O-methylcytidine-3'-phosphate
  modified_base 14: mod_base = OTHER; note = 2'-fluorouridine-3'-phosphate
  modified_base 15: mod_base = OTHER; note = 2'-O-methyladenosine-3'-phosphate
  modified_base 16: mod_base = OTHER; note = 2'-fluoroguanosine-3'-phosphate
  modified_base 17: mod_base = OTHER; note = 2'-O-methyluridine-3'-phosphate
  modified_base 18: mod_base = OTHER; note = 2'-O-methyladenosine-3'-phosphate
  modified_base 19: mod_base = OTHER; note = 2'-O-methylcytidine-3'-phosphate
  modified_base 20: mod_base = OTHER; note = 2'-O-methylcytidine-3'-phosphate
  modified_base 21: mod_base = OTHER; note = 2'-O-methyladenosine-3'-phosphorothioate
  modified_base 22: mod_base = OTHER; note = 2'-O-methylguanosine-3'-phosphorothioate
  modified_base 23: mod_base = OTHER; note = 2'-O-methylcytidine-3'-phosphate
taaagaatatttctagtaccagc

SEQ ID NO: 4053 - RNA, 23 nt, synthetic construct
  source 1..23: mol_type = other RNA
  modified_base 1: mod_base = OTHER; note = Vinyl-phosphonate 2'-O-methyluridine-3'-phosphorothioate
  modified_base 2: mod_base = OTHER; note = 2'-fluorouridine -3'-phosphorothioate
  modified_base 3: mod_base = OTHER; note = 2'-O-methyladenosine-3'-phosphate
  modified_base 4: mod_base = OTHER; note = 2'-O-methylguanosine-3'-phosphate
  modified_base 5: mod_base = OTHER; note = 2'-O-methyladenosine-3'-phosphate
  modified_base 6: mod_base = OTHER; note = 2'-fluoroguanosine-3'-phosphate
  modified_base 7: mod_base = OTHER; note = 2'-O-methyluridine-3'-phosphate
  modified_base 8: mod_base = OTHER; note = 2'-fluoroguanosine-3'-phosphate
  modified_base 9: mod_base = OTHER; note = 2'-fluoroadenosine-3'-phosphate
  modified_base 10: mod_base = OTHER; note = 2'-O-methyladenosine-3'-phosphate
  modified_base 11: mod_base = OTHER; note = 2'-O-methylcytidine-3'-phosphate
  modified_base 12: mod_base = OTHER; note = 2'-O-methyladenosine-3'-phosphate
  modified_base 13: mod_base = OTHER; note = 2'-O-methyladenosine-3'-phosphate
  modified_base 14: mod_base = OTHER; note = 2'-fluoroadenosine-3'-phosphate
  modified_base 15: mod_base = OTHER; note = 2'-O-methyluridine-3'-phosphate
  modified_base 16: mod_base = OTHER; note = 2'-fluoroguanosine-3'-phosphate
  modified_base 17: mod_base = OTHER; note = 2'-O-methyladenosine-3'-phosphate
  modified_base 18: mod_base = OTHER; note = 2'-O-methylcytidine-3'-phosphate
  modified_base 19: mod_base = OTHER; note = 2'-O-methyladenosine-3'-phosphate
  modified_base 20: mod_base = OTHER; note = 2'-O-methylguanosine-3'-phosphate
  modified_base 21: mod_base = OTHER; note = 2'-O-methylcytidine-3'-phosphorothioate
  modified_base 22: mod_base = OTHER; note = 2'-O-methyluridine-3'-phosphorothioate
  modified_base 23: mod_base = OTHER; note = 2'-O-methyladenosine-3'-phosphate
ttagagtgaacaaatgacagcta

SEQ ID NO: 4054 - RNA, 23 nt, synthetic construct
  source 1..23: mol_type = other RNA
  modified_base 1: mod_base = OTHER; note = Vinyl-phosphonate 2'-O-methyluridine-3'-phosphorothioate
  modified_base 2: mod_base = OTHER; note = 2'-fluorouridine -3'-phosphorothioate
  modified_base 3: mod_base = OTHER; note = 2'-O-methyladenosine-3'-phosphate
  modified_base 4: mod_base = OTHER; note = 2'-O-methylguanosine-3'-phosphate
  modified_base 5: mod_base = OTHER; note = 2'-O-methyluridine-3'-phosphate
  modified_base 6: mod_base = OTHER; note = 2'-fluorouridine-3'-phosphate
  modified_base 7: mod_base = OTHER; note = 2'-O-methylcytidine-3'-phosphate
  modified_base 8: mod_base = OTHER; note = 2'-fluoroadenosine-3'-phosphate
  modified_base 9: mod_base = OTHER; note = 2'-fluorouridine-3'-phosphate
  modified_base 10: mod_base = OTHER; note = 2'-O-methyladenosine-3'-phosphate
  modified_base 11: mod_base = OTHER; note = 2'-O-methyladenosine-3'-phosphate
  modified_base 12: mod_base = OTHER; note = 2'-O-methyladenosine-3'-phosphate
  modified_base 13: mod_base = OTHER; note = 2'-O-methyluridine-3'-phosphate
  modified_base 14: mod_base = OTHER; note = 2'-fluorouridine-3'-phosphate
  modified_base 15: mod_base = OTHER; note = 2'-O-methylguanosine-3'-phosphate
  modified_base 16: mod_base = OTHER; note = 2'-fluorouridine-3'-phosphate
  modified_base 17: mod_base = OTHER; note = 2'-O-methyluridine-3'-phosphate
  modified_base 18: mod_base = OTHER; note = 2'-O-methylguanosine-3'-phosphate
  modified_base 19: mod_base = OTHER; note = 2'-O-methyladenosine-3'-phosphate
  modified_base 20: mod_base = OTHER; note = 2'-O-methylguanosine-3'-phosphate
  modified_base 21: mod_base = OTHER; note = 2'-O-methyluridine-3'-phosphorothioate
  modified_base 22: mod_base = OTHER; note = 2'-O-methylguanosine-3'-phosphorothioate
  modified_base 23: mod_base = OTHER; note = 2'-O-methylguanosine-3'-phosphate
ttagttcataaattgttgagtgg

SEQ ID NO: 4055 - RNA, 23 nt, synthetic construct
  source 1..23: mol_type = other RNA
  modified_base 1: mod_base = OTHER; note = Vinyl-phosphonate 2'-O-methyluridine-3'-phosphorothioate
  modified_base 2: mod_base = OTHER; note = 2'-fluorouridine -3'-phosphorothioate
  modified_base 3: mod_base = OTHER; note = 2'-O-methyluridine-3'-phosphate
  modified_base 4: mod_base = OTHER; note = 2'-O-methylcytidine-3'-phosphate
  modified_base 5: mod_base = OTHER; note = 2'-O-methyluridine-3'-phosphate
  modified_base 6: mod_base = OTHER; note = 2'-fluoroadenosine-3'-phosphate
  modified_base 7: mod_base = OTHER; note = 2'-O-methyluridine-3'-phosphate
  modified_base 8: mod_base = OTHER; note = 2'-fluorouridine-3'-phosphate
  modified_base 9: mod_base = OTHER; note = 2'-fluoroadenosine-3'-phosphate
  modified_base 10: mod_base = OTHER; note = 2'-O-methyladenosine-3'-phosphate
  modified_base 11: mod_base = OTHER; note = 2'-O-methyluridine-3'-phosphate
  modified_base 12: mod_base = OTHER; note = 2'-O-methylguanosine-3'-phosphate
  modified_base 13: mod_base = OTHER; note = 2'-O-methyladenosine-3'-phosphate
  modified_base 14: mod_base = OTHER; note = 2'-fluoroguanosine-3'-phosphate
  modified_base 15: mod_base = OTHER; note = 2'-O-methyluridine-3'-phosphate
  modified_base 16: mod_base = OTHER; note = 2'-fluorocytidine-3'-phosphate
  modified_base 17: mod_base = OTHER; note = 2'-O-methyladenosine-3'-phosphate
  modified_base 18: mod_base = OTHER; note = 2'-O-methyluridine-3'-phosphate
  modified_base 19: mod_base = OTHER; note = 2'-O-methyladenosine-3'-phosphate
  modified_base 20: mod_base = OTHER; note = 2'-O-methylcytidine-3'-phosphate
  modified_base 21: mod_base = OTHER; note = 2'-O-methyluridine-3'-phosphorothioate
  modified_base 22: mod_base = OTHER; note = 2'-O-methylcytidine-3'-phosphorothioate
  modified_base 23: mod_base = OTHER; note = 2'-O-methyluridine-3'-phosphate
tttctattaatgagtcatactct

SEQ ID NO: 4056 - RNA, 23 nt, synthetic construct
  source 1..23: mol_type = other RNA
  modified_base 1: mod_base = OTHER; note = Vinyl-phosphonate 2'-O-methyluridine-3'-phosphorothioate
  modified_base 2: mod_base = OTHER; note = 2'-fluorocytidine-3'-phosphorothioate
  modified_base 3: mod_base = OTHER; note = 2'-O-methyluridine-3'-phosphate
  modified_base 4: mod_base = OTHER; note = 2'-O-methyluridine-3'-phosphate
  modified_base 5: mod_base = OTHER; note = 2'-O-methyladenosine-3'-phosphate
  modified_base 6: mod_base = OTHER; note = 2'-fluorouridine-3'-phosphate
  modified_base 7: mod_base = OTHER; note = 2'-O-methyluridine-3'-phosphate
  modified_base 8: mod_base = OTHER; note = 2'-fluoroadenosine-3'-phosphate
  modified_base 9: mod_base = OTHER; note = 2'-fluoroadenosine-3'-phosphate
  modified_base 10: mod_base = OTHER; note = 2'-O-methylguanosine-3'-phosphate
  modified_base 11: mod_base = OTHER; note = 2'-O-methyladenosine-3'-phosphate
  modified_base 12: mod_base = OTHER; note = 2'-O-methyladenosine-3'-phosphate
  modified_base 13: mod_base = OTHER; note = 2'-O-methyladenosine-3'-phosphate
  modified_base 14: mod_base = OTHER; note = 2'-fluoroadenosine-3'-phosphate
  modified_base 15: mod_base = OTHER; note = 2'-O-methyluridine-3'-phosphate
  modified_base 16: mod_base = OTHER; note = 2'-fluorocytidine-3'-phosphate
  modified_base 17: mod_base = OTHER; note = 2'-O-methyladenosine-3'-phosphate
  modified_base 18: mod_base = OTHER; note = 2'-O-methylguanosine-3'-phosphate
  modified_base 19: mod_base = OTHER; note = 2'-O-methylcytidine-3'-phosphate
  modified_base 20: mod_base = OTHER; note = 2'-O-methyladenosine-3'-phosphate
  modified_base 21: mod_base = OTHER; note = 2'-O-methylguanosine-3'-phosphorothioate
  modified_base 22: mod_base = OTHER; note = 2'-O-methyluridine-3'-phosphorothioate
  modified_base 23: mod_base = OTHER; note = 2'-O-methyladenosine-3'-phosphate
tcttattaagaaaatcagcagta

SEQ ID NO: 4057 - RNA, 23 nt, synthetic construct
  source 1..23: mol_type = other RNA
  modified_base 1: mod_base = OTHER; note = Vinyl-phosphonate 2'-O-methyluridine-3'-phosphorothioate
  modified_base 2: mod_base = OTHER; note = 2'-fluoroadenosine-3'-phosphorothioate
  modified_base 3: mod_base = OTHER; note = 2'-O-methyladenosine-3'-phosphate
  modified_base 4: mod_base = OTHER; note = 2'-O-methylguanosine-3'-phosphate
  modified_base 5: mod_base = OTHER; note = 2'-O-methyladenosine-3'-phosphate
  modified_base 6: mod_base = OTHER; note = 2'-fluorouridine-3'-phosphate
  modified_base 7: mod_base = OTHER; note = 2'-O-methylguanosine-3'-phosphate
  modified_base 8: mod_base = OTHER; note = 2'-fluorouridine-3'-phosphate
  modified_base 9: mod_base = OTHER; note = 2'-fluoroguanosine-3'-phosphate
  modified_base 10: mod_base = OTHER; note = 2'-O-methylguanosine-3'-phosphate
  modified_base 11: mod_base = OTHER; note = 2'-O-methyladenosine-3'-phosphate
  modified_base 12: mod_base = OTHER; note = 2'-O-methyluridine-3'-phosphate
  modified_base 13: mod_base = OTHER; note = 2'-O-methylcytidine-3'-phosphate
  modified_base 14: mod_base = OTHER; note = 2'-fluorouridine-3'-phosphate
  modified_base 15: mod_base = OTHER; note = 2'-O-methyladenosine-3'-phosphate
  modified_base 16: mod_base = OTHER; note = 2'-fluoroadenosine-3'-phosphate
  modified_base 17: mod_base = OTHER; note = 2'-O-methyladenosine-3'-phosphate
  modified_base 18: mod_base = OTHER; note = 2'-O-methylguanosine-3'-phosphate
  modified_base 19: mod_base = OTHER; note = 2'-O-methyladenosine-3'-phosphate
  modified_base 20: mod_base = OTHER; note = 2'-O-methyluridine-3'-phosphate
  modified_base 21: mod_base = OTHER; note = 2'-O-methyladenosine-3'-phosphorothioate
  modified_base 22: mod_base = OTHER; note = 2'-O-methyladenosine-3'-phosphorothioate
  modified_base 23: mod_base = OTHER; note = 2'-O-methylcytidine-3'-phosphate
taagatgtggatctaaagataac

SEQ ID NO: 4058 - RNA, 23 nt, synthetic construct
  source 1..23: mol_type = other RNA
  modified_base 1: mod_base = OTHER; note = Vinyl-phosphonate 2'-O-methyluridine-3'-phosphorothioate
  modified_base 2: mod_base = OTHER; note = 2'-fluorouridine -3'-phosphorothioate
  modified_base 3: mod_base = OTHER; note = 2'-O-methyluridine-3'-phosphate
  modified_base 4: mod_base = OTHER; note = 2'-O-methylguanosine-3'-phosphate
  modified_base 5: mod_base = OTHER; note = 2'-O-methyluridine-3'-phosphate
  modified_base 6: mod_base = OTHER; note = 2'-fluoroguanosine-3'-phosphate
  modified_base 7: mod_base = OTHER; note = 2'-O-methyladenosine-3'-phosphate
  modified_base 8: mod_base = OTHER; note = 2'-fluorouridine-3'-phosphate
  modified_base 9: mod_base = OTHER; note = 2'-fluoroadenosine-3'-phosphate
  modified_base 10: mod_base = OTHER; note = 2'-O-methyladenosine-3'-phosphate
  modified_base 11: mod_base = OTHER; note = 2'-O-methylguanosine-3'-phosphate
  modified_base 12: mod_base = OTHER; note = 2'-O-methylguanosine-3'-phosphate
  modified_base 13: mod_base = OTHER; note = 2'-O-methyladenosine-3'-phosphate
  modified_base 14: mod_base = OTHER; note = 2'-fluoroadenosine-3'-phosphate
  modified_base 15: mod_base = OTHER; note = 2'-O-methyluridine-3'-phosphate
  modified_base 16: mod_base = OTHER; note = 2'-fluoroguanosine-3'-phosphate
  modified_base 17: mod_base = OTHER; note = 2'-O-methyluridine-3'-phosphate
  modified_base 18: mod_base = OTHER; note = 2'-O-methylcytidine-3'-phosphate
  modified_base 19: mod_base = OTHER; note = 2'-O-methyluridine-3'-phosphate
  modified_base 20: mod_base = OTHER; note = 2'-O-methylcytidine-3'-phosphate
  modified_base 21: mod_base = OTHER; note = 2'-O-methylguanosine-3'-phosphorothioate
  modified_base 22: mod_base = OTHER; note = 2'-O-methyladenosine-3'-phosphorothioate
  modified_base 23: mod_base = OTHER; note = 2'-O-methyluridine-3'-phosphate
tttgtgataaggaatgtctcgat

SEQ ID NO: 4059 - RNA, 23 nt, synthetic construct
  source 1..23: mol_type = other RNA
  modified_base 1: mod_base = OTHER; note = Vinyl-phosphonate 2'-O-methyluridine-3'-phosphorothioate
  modified_base 2: mod_base = OTHER; note = 2'-fluoroguanosine-3'-phosphorothioate
  modified_base 3: mod_base = OTHER; note = 2'-O-methyladenosine-3'-phosphate
  modified_base 4: mod_base = OTHER; note = 2'-O-methyladenosine-3'-phosphate
  modified_base 5: mod_base = OTHER; note = 2'-O-methyladenosine-3'-phosphate
  modified_base 6: mod_base = OTHER; note = 2'-fluorouridine-3'-phosphate
  modified_base 7: mod_base = OTHER; note = 2'-O-methyluridine-3'-phosphate
  modified_base 8: mod_base = OTHER; note = 2'-fluoroadenosine-3'-phosphate
  modified_base 9: mod_base = OTHER; note = 2'-fluoroadenosine-3'-phosphate
  modified_base 10: mod_base = OTHER; note = 2'-O-methyluridine-3'-phosphate
  modified_base 11: mod_base = OTHER; note = 2'-O-methylcytidine-3'-phosphate
  modified_base 12: mod_base = OTHER; note = 2'-O-methyluridine-3'-phosphate
  modified_base 13: mod_base = OTHER; note = 2'-O-methylguanosine-3'-phosphate
  modified_base 14: mod_base = OTHER; note = 2'-fluoroadenosine-3'-phosphate
  modified_base 15: mod_base = OTHER; note = 2'-O-methyluridine-3'-phosphate
  modified_base 16: mod_base = OTHER; note = 2'-fluorouridine-3'-phosphate
  modified_base 17: mod_base = OTHER; note = 2'-O-methylcytidine-3'-phosphate
  modified_base 18: mod_base = OTHER; note = 2'-O-methyladenosine-3'-phosphate
  modified_base 19: mod_base = OTHER; note = 2'-O-methylguanosine-3'-phosphate
  modified_base 20: mod_base = OTHER; note = 2'-O-methyluridine-3'-phosphate
  modified_base 21: mod_base = OTHER; note = 2'-O-methyladenosine-3'-phosphorothioate
  modified_base 22: mod_base = OTHER; note = 2'-O-methyladenosine-3'-phosphorothioate
  modified_base 23: mod_base = OTHER; note = 2'-O-methylcytidine-3'-phosphate
tgaaattaatctgattcagtaac

SEQ ID NO: 4060 - RNA, 23 nt, synthetic construct
  source 1..23: mol_type = other RNA
  modified_base 1: mod_base = OTHER; note = Vinyl-phosphonate 2'-O-methyluridine-3'-phosphorothioate
  modified_base 2: mod_base = OTHER; note = 2'-fluorocytidine-3'-phosphorothioate
  modified_base 3: mod_base = OTHER; note = 2'-O-methyladenosine-3'-phosphate
  modified_base 4: mod_base = OTHER; note = 2'-O-methylguanosine-3'-phosphate
  modified_base 5: mod_base = OTHER; note = 2'-O-methyluridine-3'-phosphate
  modified_base 6: mod_base = OTHER; note = 2'-fluoroguanosine-3'-phosphate
  modified_base 7: mod_base = OTHER; note = 2'-O-methyladenosine-3'-phosphate
  modified_base 8: mod_base = OTHER; note = 2'-fluoroadenosine-3'-phosphate
  modified_base 9: mod_base = OTHER; note = 2'-fluoroguanosine-3'-phosphate
  modified_base 10: mod_base = OTHER; note = 2'-O-methylguanosine-3'-phosphate
  modified_base 11: mod_base = OTHER; note = 2'-O-methyladenosine-3'-phosphate
  modified_base 12: mod_base = OTHER; note = 2'-O-methyluridine-3'-phosphate
  modified_base 13: mod_base = OTHER; note = 2'-O-methyluridine-3'-phosphate
  modified_base 14: mod_base = OTHER; note = 2'-fluorouridine-3'-phosphate
  modified_base 15: mod_base = OTHER; note = 2'-O-methyladenosine-3'-phosphate
  modified_base 16: mod_base = OTHER; note = 2'-fluoroadenosine-3'-phosphate
  modified_base 17: mod_base = OTHER; note = 2'-O-methylguanosine-3'-phosphate
  modified_base 18: mod_base = OTHER; note = 2'-O-methyluridine-3'-phosphate
  modified_base 19: mod_base = OTHER; note = 2'-O-methyladenosine-3'-phosphate
  modified_base 20: mod_base = OTHER; note = 2'-O-methyladenosine-3'-phosphate
  modified_base 21: mod_base = OTHER; note = 2'-O-methylguanosine-3'-phosphorothioate
  modified_base 22: mod_base = OTHER; note = 2'-O-methylguanosine-3'-phosphorothioate
  modified_base 23: mod_base = OTHER; note = 2'-O-methylguanosine-3'-phosphate
tcagtgaaggatttaagtaaggg

SEQ ID NO: 4061 - RNA, 23 nt, synthetic construct
  source 1..23: mol_type = other RNA
  modified_base 1: mod_base = OTHER; note = Vinyl-phosphonate 2'-O-methyluridine-3'-phosphorothioate
  modified_base 2: mod_base = OTHER; note = 2'-fluoroadenosine-3'-phosphorothioate
  modified_base 3: mod_base = OTHER; note = 2'-O-methylguanosine-3'-phosphate
  modified_base 4: mod_base = OTHER; note = 2'-O-methyluridine-3'-phosphate
  modified_base 5: mod_base = OTHER; note = 2'-O-methyluridine-3'-phosphate
  modified_base 6: mod_base = OTHER; note = 2'-fluorouridine-3'-phosphate
  modified_base 7: mod_base = OTHER; note = 2'-O-methylguanosine-3'-phosphate
  modified_base 8: mod_base = OTHER; note = 2'-fluoroadenosine-3'-phosphate
  modified_base 9: mod_base = OTHER; note = 2'-fluoroadenosine-3'-phosphate
  modified_base 10: mod_base = OTHER; note = 2'-O-methyluridine-3'-phosphate
  modified_base 11: mod_base = OTHER; note = 2'-O-methylguanosine-3'-phosphate
  modified_base 12: mod_base = OTHER; note = 2'-O-methyladenosine-3'-phosphate
  modified_base 13: mod_base = OTHER; note = 2'-O-methyluridine-3'-phosphate
  modified_base 14: mod_base = OTHER; note = 2'-fluorouridine-3'-phosphate
  modified_base 15: mod_base = OTHER; note = 2'-O-methylcytidine-3'-phosphate
  modified_base 16: mod_base = OTHER; note = 2'-fluorouridine-3'-phosphate
  modified_base 17: mod_base = OTHER; note = 2'-O-methyluridine-3'-phosphate
  modified_base 18: mod_base = OTHER; note = 2'-O-methyluridine-3'-phosphate
  modified_base 19: mod_base = OTHER; note = 2'-O-methylcytidine-3'-phosphate
  modified_base 20: mod_base = OTHER; note = 2'-O-methylguanosine-3'-phosphate
  modified_base 21: mod_base = OTHER; note = 2'-O-methyladenosine-3'-phosphorothioate
  modified_base 22: mod_base = OTHER; note = 2'-O-methylguanosine-3'-phosphorothioate
  modified_base 23: mod_base = OTHER; note = 2'-O-methyladenosine-3'-phosphate
tagtttgaatgattctttcgaga

SEQ ID NO: 4062 - RNA, 23 nt, synthetic construct
  source 1..23: mol_type = other RNA
  modified_base 1: mod_base = OTHER; note = Vinyl-phosphonate 2'-O-methyluridine-3'-phosphorothioate
  modified_base 2: mod_base = OTHER; note = 2'-fluorouridine -3'-phosphorothioate
  modified_base 3: mod_base = OTHER; note = 2'-O-methyladenosine-3'-phosphate
  modified_base 4: mod_base = OTHER; note = 2'-O-methyladenosine-3'-phosphate
  modified_base 5: mod_base = OTHER; note = 2'-O-methylguanosine-3'-phosphate
  modified_base 6: mod_base = OTHER; note = 2'-fluorouridine-3'-phosphate
  modified_base 7: mod_base = OTHER; note = 2'-O-methyladenosine-3'-phosphate
  modified_base 8: mod_base = OTHER; note = 2'-fluoroguanosine-3'-phosphate
  modified_base 9: mod_base = OTHER; note = 2'-fluorouridine-3'-phosphate
  modified_base 10: mod_base = OTHER; note = 2'-O-methylguanosine-3'-phosphate
  modified_base 11: mod_base = OTHER; note = 2'-O-methyladenosine-3'-phosphate
  modified_base 12: mod_base = OTHER; note = 2'-O-methyluridine-3'-phosphate
  modified_base 13: mod_base = OTHER; note = 2'-O-methyladenosine-3'-phosphate
  modified_base 14: mod_base = OTHER; note = 2'-fluoroguanosine-3'-phosphate
  modified_base 15: mod_base = OTHER; note = 2'-O-methylguanosine-3'-phosphate
  modified_base 16: mod_base = OTHER; note = 2'-fluorouridine-3'-phosphate
  modified_base 17: mod_base = OTHER; note = 2'-O-methylcytidine-3'-phosphate
  modified_base 18: mod_base = OTHER; note = 2'-O-methyladenosine-3'-phosphate
  modified_base 19: mod_base = OTHER; note = 2'-O-methyluridine-3'-phosphate
  modified_base 20: mod_base = OTHER; note = 2'-O-methyluridine-3'-phosphate
  modified_base 21: mod_base = OTHER; note = 2'-O-methyluridine-3'-phosphorothioate
  modified_base 22: mod_base = OTHER; note = 2'-O-methylcytidine-3'-phosphorothioate
  modified_base 23: mod_base = OTHER; note = 2'-O-methyluridine-3'-phosphate
ttaagtagtgataggtcatttct

SEQ ID NO: 4063 - RNA, 23 nt, synthetic construct
  source 1..23: mol_type = other RNA
  modified_base 1: mod_base = OTHER; note = Vinyl-phosphonate 2'-O-methyluridine-3'-phosphorothioate
  modified_base 2: mod_base = OTHER; note = 2'-fluorocytidine-3'-phosphorothioate
  modified_base 3: mod_base = OTHER; note = 2'-O-methylguanosine-3'-phosphate
  modified_base 4: mod_base = OTHER; note = 2'-O-methyluridine-3'-phosphate
  modified_base 5: mod_base = OTHER; note = 2'-O-methyladenosine-3'-phosphate
  modified_base 6: mod_base = OTHER; note = 2'-fluoroguanosine-3'-phosphate
  modified_base 7: mod_base = OTHER; note = 2'-O-methyladenosine-3'-phosphate
  modified_base 8: mod_base = OTHER; note = 2'-fluoroguanosine-3'-phosphate
  modified_base 9: mod_base = OTHER; note = 2'-fluoroadenosine-3'-phosphate
  modified_base 10: mod_base = OTHER; note = 2'-O-methylguanosine-3'-phosphate
  modified_base 11: mod_base = OTHER; note = 2'-O-methylguanosine-3'-phosphate
  modified_base 12: mod_base = OTHER; note = 2'-O-methyladenosine-3'-phosphate
  modified_base 13: mod_base = OTHER; note = 2'-O-methyladenosine-3'-phosphate
  modified_base 14: mod_base = OTHER; note = 2'-fluoroadenosine-3'-phosphate
  modified_base 15: mod_base = OTHER; note = 2'-O-methyluridine-3'-phosphate
  modified_base 16: mod_base = OTHER; note = 2'-fluoroguanosine-3'-phosphate
  modified_base 17: mod_base = OTHER; note = 2'-O-methyladenosine-3'-phosphate
  modified_base 18: mod_base = OTHER; note = 2'-O-methylcytidine-3'-phosphate
  modified_base 19: mod_base = OTHER; note = 2'-O-methyluridine-3'-phosphate
  modified_base 20: mod_base = OTHER; note = 2'-O-methyluridine-3'-phosphate
  modified_base 21: mod_base = OTHER; note = 2'-O-methylguanosine-3'-phosphorothioate
  modified_base 22: mod_base = OTHER; note = 2'-O-methyluridine-3'-phosphorothioate
  modified_base 23: mod_base = OTHER; note = 2'-O-methylguanosine-3'-phosphate
tcgtagagaggaaatgacttgtg

SEQ ID NO: 4064 - RNA, 23 nt, synthetic construct
  source 1..23: mol_type = other RNA
  modified_base 1: mod_base = OTHER; note = Vinyl-phosphonate 2'-O-methyluridine-3'-phosphorothioate
  modified_base 2: mod_base = OTHER; note = 2'-fluoroadenosine-3'-phosphorothioate
  modified_base 3: mod_base = OTHER; note = 2'-O-methylguanosine-3'-phosphate
  modified_base 4: mod_base = OTHER; note = 2'-O-methyladenosine-3'-phosphate
  modified_base 5: mod_base = OTHER; note = 2'-O-methyluridine-3'-phosphate
  modified_base 6: mod_base = OTHER; note = 2'-fluoroadenosine-3'-phosphate
  modified_base 7: mod_base = OTHER; note = 2'-O-methyladenosine-3'-phosphate
  modified_base 8: mod_base = OTHER; note = 2'-fluoroguanosine-3'-phosphate
  modified_base 9: mod_base = OTHER; note = 2'-fluorouridine-3'-phosphate
  modified_base 10: mod_base = OTHER; note = 2'-O-methyladenosine-3'-phosphate
  modified_base 11: mod_base = OTHER; note = 2'-O-methyladenosine-3'-phosphate
  modified_base 12: mod_base = OTHER; note = 2'-O-methylguanosine-3'-phosphate
  modified_base 13: mod_base = OTHER; note = 2'-O-methyladenosine-3'-phosphate
  modified_base 14: mod_base = OTHER; note = 2'-fluoroadenosine-3'-phosphate
  modified_base 15: mod_base = OTHER; note = 2'-O-methyladenosine-3'-phosphate
  modified_base 16: mod_base = OTHER; note = 2'-fluorocytidine-3'-phosphate
  modified_base 17: mod_base = OTHER; note = 2'-O-methyluridine-3'-phosphate
  modified_base 18: mod_base = OTHER; note = 2'-O-methylguanosine-3'-phosphate
  modified_base 19: mod_base = OTHER; note = 2'-O-methylcytidine-3'-phosphate
  modified_base 20: mod_base = OTHER; note = 2'-O-methyladenosine-3'-phosphate
  modified_base 21: mod_base = OTHER; note = 2'-O-methyluridine-3'-phosphorothioate
  modified_base 22: mod_base = OTHER; note = 2'-O-methylguanosine-3'-phosphorothioate
  modified_base 23: mod_base = OTHER; note = 2'-O-methylcytidine-3'-phosphate
tagataagtaagaaactgcatgc

SEQ ID NO: 4065 - RNA, 23 nt, synthetic construct
  source 1..23: mol_type = other RNA
  modified_base 1: mod_base = OTHER; note = Vinyl-phosphonate 2'-O-methyluridine-3'-phosphorothioate
  modified_base 2: mod_base = OTHER; note = 2'-fluorouridine -3'-phosphorothioate
  modified_base 3: mod_base = OTHER; note = 2'-O-methylguanosine-3'-phosphate
  modified_base 4: mod_base = OTHER; note = 2'-O-methyladenosine-3'-phosphate
  modified_base 5: mod_base = OTHER; note = 2'-O-methyladenosine-3'-phosphate
  modified_base 6: mod_base = OTHER; note = 2'-fluorocytidine-3'-phosphate
  modified_base 7: mod_base = OTHER; note = 2'-O-methyladenosine-3'-phosphate
  modified_base 8: mod_base = OTHER; note = 2'-fluoroguanosine-3'-phosphate
  modified_base 9: mod_base = OTHER; note = 2'-fluorouridine-3'-phosphate
  modified_base 10: mod_base = OTHER; note = 2'-O-methylguanosine-3'-phosphate
  modified_base 11: mod_base = OTHER; note = 2'-O-methyluridine-3'-phosphate
  modified_base 12: mod_base = OTHER; note = 2'-O-methyladenosine-3'-phosphate
  modified_base 13: mod_base = OTHER; note = 2'-O-methyluridine-3'-phosphate
  modified_base 14: mod_base = OTHER; note = 2'-fluorouridine-3'-phosphate
  modified_base 15: mod_base = OTHER; note = 2'-O-methylguanosine-3'-phosphate
  modified_base 16: mod_base = OTHER; note = 2'-fluorocytidine-3'-phosphate
  modified_base 17: mod_base = OTHER; note = 2'-O-methyladenosine-3'-phosphate
  modified_base 18: mod_base = OTHER; note = 2'-O-methyluridine-3'-phosphate
  modified_base 19: mod_base = OTHER; note = 2'-O-methyluridine-3'-phosphate
  modified_base 20: mod_base = OTHER; note = 2'-O-methylguanosine-3'-phosphate
  modified_base 21: mod_base = OTHER; note = 2'-O-methyladenosine-3'-phosphorothioate
  modified_base 22: mod_base = OTHER; note = 2'-O-methylguanosine-3'-phosphorothioate
  modified_base 23: mod_base = OTHER; note = 2'-O-methylcytidine-3'-phosphate
ttgaacagtgtattgcattgagc

SEQ ID NO: 4066 - RNA, 23 nt, synthetic construct
  source 1..23: mol_type = other RNA
  modified_base 1: mod_base = OTHER; note = Vinyl-phosphonate 2'-O-methyluridine-3'-phosphorothioate
  modified_base 2: mod_base = OTHER; note = 2'-fluorouridine -3'-phosphorothioate
  modified_base 3: mod_base = OTHER; note = 2'-O-methylguanosine-3'-phosphate
  modified_base 4: mod_base = OTHER; note = 2'-O-methyluridine-3'-phosphate
  modified_base 5: mod_base = OTHER; note = 2'-O-methylguanosine-3'-phosphate
  modified_base 6: mod_base = OTHER; note = 2'-fluorouridine-3'-phosphate
  modified_base 7: mod_base = OTHER; note = 2'-O-methylcytidine-3'-phosphate
  modified_base 8: mod_base = OTHER; note = 2'-fluoroadenosine-3'-phosphate
  modified_base 9: mod_base = OTHER; note = 2'-fluoroguanosine-3'-phosphate
  modified_base 10: mod_base = OTHER; note = 2'-O-methyluridine-3'-phosphate
  modified_base 11: mod_base = OTHER; note = 2'-O-methyladenosine-3'-phosphate
  modified_base 12: mod_base = OTHER; note = 2'-O-methylguanosine-3'-phosphate
  modified_base 13: mod_base = OTHER; note = 2'-O-methylguanosine-3'-phosphate
  modified_base 14: mod_base = OTHER; note = 2'-fluorouridine-3'-phosphate
  modified_base 15: mod_base = OTHER; note = 2'-O-methyladenosine-3'-phosphate
  modified_base 16: mod_base = OTHER; note = 2'-fluorocytidine-3'-phosphate
  modified_base 17: mod_base = OTHER; note = 2'-O-methyladenosine-3'-phosphate
  modified_base 18: mod_base = OTHER; note = 2'-O-methyluridine-3'-phosphate
  modified_base 19: mod_base = OTHER; note = 2'-O-methyladenosine-3'-phosphate
  modified_base 20: mod_base = OTHER; note = 2'-O-methylguanosine-3'-phosphate
  modified_base 21: mod_base = OTHER; note = 2'-O-methyladenosine-3'-phosphorothioate
  modified_base 22: mod_base = OTHER; note = 2'-O-methyluridine-3'-phosphorothioate
  modified_base 23: mod_base = OTHER; note = 2'-O-methyladenosine-3'-phosphate
ttgtgtcagtaggtacatagata

SEQ ID NO: 4067 - RNA, 23 nt, synthetic construct
  source 1..23: mol_type = other RNA
  modified_base 1: mod_base = OTHER; note = Vinyl-phosphonate 2'-O-methyluridine-3'-phosphorothioate
  modified_base 2: mod_base = OTHER; note = 2'-fluorouridine -3'-phosphorothioate
  modified_base 3: mod_base = OTHER; note = 2'-O-methyladenosine-3'-phosphate
  modified_base 4: mod_base = OTHER; note = 2'-O-methyladenosine-3'-phosphate
  modified_base 5: mod_base = OTHER; note = 2'-O-methylguanosine-3'-phosphate
  modified_base 6: mod_base = OTHER; note = 2'-fluoroadenosine-3'-phosphate
  modified_base 7: mod_base = OTHER; note = 2'-O-methyluridine-3'-phosphate
  modified_base 8: mod_base = OTHER; note = 2'-fluoroadenosine-3'-phosphate
  modified_base 9: mod_base = OTHER; note = 2'-fluoroadenosine-3'-phosphate
  modified_base 10: mod_base = OTHER; note = 2'-O-methylguanosine-3'-phosphate
  modified_base 11: mod_base = OTHER; note = 2'-O-methyladenosine-3'-phosphate
  modified_base 12: mod_base = OTHER; note = 2'-O-methylcytidine-3'-phosphate
  modified_base 13: mod_base = OTHER; note = 2'-O-methyluridine-3'-phosphate
  modified_base 14: mod_base = OTHER; note = 2'-fluoroguanosine-3'-phosphate
  modified_base 15: mod_base = OTHER; note = 2'-O-methylguanosine-3'-phosphate
  modified_base 16: mod_base = OTHER; note = 2'-fluoroadenosine-3'-phosphate
  modified_base 17: mod_base = OTHER; note = 2'-O-methyladenosine-3'-phosphate
  modified_base 18: mod_base = OTHER; note = 2'-O-methyluridine-3'-phosphate
  modified_base 19: mod_base = OTHER; note = 2'-O-methyluridine-3'-phosphate
  modified_base 20: mod_base = OTHER; note = 2'-O-methylcytidine-3'-phosphate
  modified_base 21: mod_base = OTHER; note = 2'-O-methyladenosine-3'-phosphorothioate
  modified_base 22: mod_base = OTHER; note = 2'-O-methyladenosine-3'-phosphorothioate
  modified_base 23: mod_base = OTHER; note = 2'-O-methyladenosine-3'-phosphate
ttaagataagactggaattcaaa

SEQ ID NO: 4068 - RNA, 23 nt, synthetic construct
  source 1..23: mol_type = other RNA
  modified_base 1: mod_base = OTHER; note = Vinyl-phosphonate 2'-O-methyluridine-3'-phosphorothioate
  modified_base 2: mod_base = OTHER; note = 2'-fluorouridine -3'-phosphorothioate
  modified_base 3: mod_base = OTHER; note = 2'-O-methyladenosine-3'-phosphate
  modified_base 4: mod_base = OTHER; note = 2'-O-methylguanosine-3'-phosphate
  modified_base 5: mod_base = OTHER; note = 2'-O-methyluridine-3'-phosphate
  modified_base 6: mod_base = OTHER; note = 2'-fluorouridine-3'-phosphate
  modified_base 7: mod_base = OTHER; note = 2'-O-methyluridine-3'-phosphate
  modified_base 8: mod_base = OTHER; note = 2'-fluorouridine-3'-phosphate
  modified_base 9: mod_base = OTHER; note = 2'-fluoroguanosine-3'-phosphate
  modified_base 10: mod_base = OTHER; note = 2'-O-methylguanosine-3'-phosphate
  modified_base 11: mod_base = OTHER; note = 2'-O-methyluridine-3'-phosphate
  modified_base 12: mod_base = OTHER; note = 2'-O-methyladenosine-3'-phosphate
  modified_base 13: mod_base = OTHER; note = 2'-O-methyluridine-3'-phosphate
  modified_base 14: mod_base = OTHER; note = 2'-fluorouridine-3'-phosphate
  modified_base 15: mod_base = OTHER; note = 2'-O-methyladenosine-3'-phosphate
  modified_base 16: mod_base = OTHER; note = 2'-fluorocytidine-3'-phosphate
  modified_base 17: mod_base = OTHER; note = 2'-O-methyladenosine-3'-phosphate
  modified_base 18: mod_base = OTHER; note = 2'-O-methylguanosine-3'-phosphate
  modified_base 19: mod_base = OTHER; note = 2'-O-methylcytidine-3'-phosphate
  modified_base 20: mod_base = OTHER; note = 2'-O-methyladenosine-3'-phosphate
  modified_base 21: mod_base = OTHER; note = 2'-O-methyladenosine-3'-phosphorothioate
  modified_base 22: mod_base = OTHER; note = 2'-O-methyladenosine-3'-phosphorothioate
  modified_base 23: mod_base = OTHER; note = 2'-O-methyluridine-3'-phosphate
ttagttttggtattacagcaaat

SEQ ID NO: 4069 - RNA, 23 nt, synthetic construct
  source 1..23: mol_type = other RNA
  modified_base 1: mod_base = OTHER; note = Vinyl-phosphonate 2'-O-methyluridine-3'-phosphorothioate
  modified_base 2: mod_base = OTHER; note = 2'-fluorouridine -3'-phosphorothioate
  modified_base 3: mod_base = OTHER; note = 2'-O-methylguanosine-3'-phosphate
  modified_base 4: mod_base = OTHER; note = 2'-O-methyladenosine-3'-phosphate
  modified_base 5: mod_base = OTHER; note = 2'-O-methyluridine-3'-phosphate
  modified_base 6: mod_base = OTHER; note = 2'-fluorouridine-3'-phosphate
  modified_base 7: mod_base = OTHER; note = 2'-O-methyluridine-3'-phosphate
  modified_base 8: mod_base = OTHER; note = 2'-fluoroguanosine-3'-phosphate
  modified_base 9: mod_base = OTHER; note = 2'-fluoroadenosine-3'-phosphate
  modified_base 10: mod_base = OTHER; note = 2'-O-methyladenosine-3'-phosphate
  modified_base 11: mod_base = OTHER; note = 2'-O-methyladenosine-3'-phosphate
  modified_base 12: mod_base = OTHER; note = 2'-O-methylguanosine-3'-phosphate
  modified_base 13: mod_base = OTHER; note = 2'-O-methyladenosine-3'-phosphate
  modified_base 14: mod_base = OTHER; note = 2'-fluoroadenosine-3'-phosphate
  modified_base 15: mod_base = OTHER; note = 2'-O-methylguanosine-3'-phosphate
  modified_base 16: mod_base = OTHER; note = 2'-fluorouridine-3'-phosphate
  modified_base 17: mod_base = OTHER; note = 2'-O-methylguanosine-3'-phosphate
  modified_base 18: mod_base = OTHER; note = 2'-O-methyladenosine-3'-phosphate
  modified_base 19: mod_base = OTHER; note = 2'-O-methyluridine-3'-phosphate
  modified_base 20: mod_base = OTHER; note = 2'-O-methylcytidine-3'-phosphate
  modified_base 21: mod_base = OTHER; note = 2'-O-methylcytidine-3'-phosphorothioate
  modified_base 22: mod_base = OTHER; note = 2'-O-methyladenosine-3'-phosphorothioate
  modified_base 23: mod_base = OTHER; note = 2'-O-methyladenosine-3'-phosphate
ttgatttgaaagaagtgatccaa

SEQ ID NO: 4070 - RNA, 23 nt, synthetic construct
  source 1..23: mol_type = other RNA
  modified_base 1: mod_base = OTHER; note = Vinyl-phosphonate 2'-O-methyluridine-3'-phosphorothioate
  modified_base 2: mod_base = OTHER; note = 2'-fluorouridine -3'-phosphorothioate
  modified_base 3: mod_base = OTHER; note = 2'-O-methyladenosine-3'-phosphate
  modified_base 4: mod_base = OTHER; note = 2'-O-methyladenosine-3'-phosphate
  modified_base 5: mod_base = OTHER; note = 2'-O-methylguanosine-3'-phosphate
  modified_base 6: mod_base = OTHER; note = 2'-fluoroadenosine-3'-phosphate
  modified_base 7: mod_base = OTHER; note = 2'-O-methyladenosine-3'-phosphate
  modified_base 8: mod_base = OTHER; note = 2'-fluorouridine-3'-phosphate
  modified_base 9: mod_base = OTHER; note = 2'-fluoroadenosine-3'-phosphate
  modified_base 10: mod_base = OTHER; note = 2'-O-methylguanosine-3'-phosphate
  modified_base 11: mod_base = OTHER; note = 2'-O-methyluridine-3'-phosphate
  modified_base 12: mod_base = OTHER; note = 2'-O-methyluridine-3'-phosphate
  modified_base 13: mod_base = OTHER; note = 2'-O-methyluridine-3'-phosphate
  modified_base 14: mod_base = OTHER; note = 2'-fluorouridine-3'-phosphate
  modified_base 15: mod_base = OTHER; note = 2'-O-methylcytidine-3'-phosphate
  modified_base 16: mod_base = OTHER; note = 2'-fluorouridine-3'-phosphate
  modified_base 17: mod_base = OTHER; note = 2'-O-methyladenosine-3'-phosphate
  modified_base 18: mod_base = OTHER; note = 2'-O-methylguanosine-3'-phosphate
  modified_base 19: mod_base = OTHER; note = 2'-O-methyluridine-3'-phosphate
  modified_base 20: mod_base = OTHER; note = 2'-O-methyluridine-3'-phosphate
  modified_base 21: mod_base = OTHER; note = 2'-O-methylcytidine-3'-phosphorothioate
  modified_base 22: mod_base = OTHER; note = 2'-O-methylcytidine-3'-phosphorothioate
  modified_base 23: mod_base = OTHER; note = 2'-O-methyluridine-3'-phosphate
ttaagaatagttttctagttcct

SEQ ID NO: 4071 - RNA, 23 nt, synthetic construct
  source 1..23: mol_type = other RNA
  modified_base 1: mod_base = OTHER; note = Vinyl-phosphonate 2'-O-methyluridine-3'-phosphorothioate
  modified_base 2: mod_base = OTHER; note = 2'-fluoroadenosine-3'-phosphorothioate
  modified_base 3: mod_base = OTHER; note = 2'-O-methyladenosine-3'-phosphate
  modified_base 4: mod_base = OTHER; note = 2'-O-methylcytidine-3'-phosphate
  modified_base 5: mod_base = OTHER; note = 2'-O-methyladenosine-3'-phosphate
  modified_base 6: mod_base = OTHER; note = 2'-fluoroguanosine-3'-phosphate
  modified_base 7: mod_base = OTHER; note = 2'-O-methyladenosine-3'-phosphate
  modified_base 8: mod_base = OTHER; note = 2'-fluorocytidine-3'-phosphate
  modified_base 9: mod_base = OTHER; note = 2'-fluoroadenosine-3'-phosphate
  modified_base 10: mod_base = OTHER; note = 2'-O-methylguanosine-3'-phosphate
  modified_base 11: mod_base = OTHER; note = 2'-O-methyluridine-3'-phosphate
  modified_base 12: mod_base = OTHER; note = 2'-O-methyladenosine-3'-phosphate
  modified_base 13: mod_base = OTHER; note = 2'-O-methyluridine-3'-phosphate
  modified_base 14: mod_base = OTHER; note = 2'-fluoroguanosine-3'-phosphate
  modified_base 15: mod_base = OTHER; note = 2'-O-methylguanosine-3'-phosphate
  modified_base 16: mod_base = OTHER; note = 2'-fluoroadenosine-3'-phosphate
  modified_base 17: mod_base = OTHER; note = 2'-O-methyladenosine-3'-phosphate
  modified_base 18: mod_base = OTHER; note = 2'-O-methyladenosine-3'-phosphate
  modified_base 19: mod_base = OTHER; note = 2'-O-methyluridine-3'-phosphate
  modified_base 20: mod_base = OTHER; note = 2'-O-methylguanosine-3'-phosphate
  modified_base 21: mod_base = OTHER; note = 2'-O-methyluridine-3'-phosphorothioate
  modified_base 22: mod_base = OTHER; note = 2'-O-methylguanosine-3'-phosphorothioate
  modified_base 23: mod_base = OTHER; note = 2'-O-methyladenosine-3'-phosphate
taacagacagtatggaaatgtga

SEQ ID NO: 4072 - RNA, 23 nt, synthetic construct
  source 1..23: mol_type = other RNA
  modified_base 1: mod_base = OTHER; note = Vinyl-phosphonate 2'-O-methyluridine-3'-phosphorothioate
  modified_base 2: mod_base = OTHER; note = 2'-fluoroadenosine-3'-phosphorothioate
  modified_base 3: mod_base = OTHER; note = 2'-O-methyluridine-3'-phosphate
  modified_base 4: mod_base = OTHER; note = 2'-O-methyluridine-3'-phosphate
  modified_base 5: mod_base = OTHER; note = 2'-O-methylguanosine-3'-phosphate
  modified_base 6: mod_base = OTHER; note = 2'-fluoroadenosine-3'-phosphate
  modified_base 7: mod_base = OTHER; note = 2'-O-methylcytidine-3'-phosphate
  modified_base 8: mod_base = OTHER; note = 2'-fluoroadenosine-3'-phosphate
  modified_base 9: mod_base = OTHER; note = 2'-fluorocytidine-3'-phosphate
  modified_base 10: mod_base = OTHER; note = 2'-O-methyluridine-3'-phosphate
  modified_base 11: mod_base = OTHER; note = 2'-O-methylguanosine-3'-phosphate
  modified_base 12: mod_base = OTHER; note = 2'-O-methyluridine-3'-phosphate
  modified_base 13: mod_base = OTHER; note = 2'-O-methylguanosine-3'-phosphate
  modified_base 14: mod_base = OTHER; note = 2'-fluoroadenosine-3'-phosphate
  modified_base 15: mod_base = OTHER; note = 2'-O-methyladenosine-3'-phosphate
  modified_base 16: mod_base = OTHER; note = 2'-fluoroguanosine-3'-phosphate
  modified_base 17: mod_base = OTHER; note = 2'-O-methylguanosine-3'-phosphate
  modified_base 18: mod_base = OTHER; note = 2'-O-methyladenosine-3'-phosphate
  modified_base 19: mod_base = OTHER; note = 2'-O-methyluridine-3'-phosphate
  modified_base 20: mod_base = OTHER; note = 2'-O-methylcytidine-3'-phosphate
  modified_base 21: mod_base = OTHER; note = 2'-O-methyladenosine-3'-phosphorothioate
  modified_base 22: mod_base = OTHER; note = 2'-O-methyladenosine-3'-phosphorothioate
  modified_base 23: mod_base = OTHER; note = 2'-O-methyladenosine-3'-phosphate
tattgacactgtgaaggatcaaa

SEQ ID NO: 4073 - RNA, 23 nt, synthetic construct
  source 1..23: mol_type = other RNA
  modified_base 1: mod_base = OTHER; note = Vinyl-phosphonate 2'-O-methyluridine-3'-phosphorothioate
  modified_base 2: mod_base = OTHER; note = 2'-fluorouridine -3'-phosphorothioate
  modified_base 3: mod_base = OTHER; note = 2'-O-methyluridine-3'-phosphate
  modified_base 4: mod_base = OTHER; note = 2'-O-methyluridine-3'-phosphate
  modified_base 5: mod_base = OTHER; note = 2'-O-methyladenosine-3'-phosphate
  modified_base 6: mod_base = OTHER; note = 2'-fluorocytidine-3'-phosphate
  modified_base 7: mod_base = OTHER; note = 2'-O-methyluridine-3'-phosphate
  modified_base 8: mod_base = OTHER; note = 2'-fluorouridine-3'-phosphate
  modified_base 9: mod_base = OTHER; note = 2'-fluoroguanosine-3'-phosphate
  modified_base 10: mod_base = OTHER; note = 2'-O-methyluridine-3'-phosphate
  modified_base 11: mod_base = OTHER; note = 2'-O-methyluridine-3'-phosphate
  modified_base 12: mod_base = OTHER; note = 2'-O-methylcytidine-3'-phosphate
  modified_base 13: mod_base = OTHER; note = 2'-O-methyluridine-3'-phosphate
  modified_base 14: mod_base = OTHER; note = 2'-fluorocytidine-3'-phosphate
  modified_base 15: mod_base = OTHER; note = 2'-O-methyladenosine-3'-phosphate
  modified_base 16: mod_base = OTHER; note = 2'-fluoroguanosine-3'-phosphate
  modified_base 17: mod_base = OTHER; note = 2'-O-methyladenosine-3'-phosphate
  modified_base 18: mod_base = OTHER; note = 2'-O-methyladenosine-3'-phosphate
  modified_base 19: mod_base = OTHER; note = 2'-O-methyladenosine-3'-phosphate
  modified_base 20: mod_base = OTHER; note = 2'-O-methyluridine-3'-phosphate
  modified_base 21: mod_base = OTHER; note = 2'-O-methylcytidine-3'-phosphorothioate
  modified_base 22: mod_base = OTHER; note = 2'-O-methyladenosine-3'-phosphorothioate
  modified_base 23: mod_base = OTHER; note = 2'-O-methylguanosine-3'-phosphate
ttttacttgttctcagaaatcag

SEQ ID NO: 4074 - RNA, 23 nt, synthetic construct
  source 1..23: mol_type = other RNA
  modified_base 1: mod_base = OTHER; note = Vinyl-phosphonate 2'-O-methyluridine-3'-phosphorothioate
  modified_base 2: mod_base = OTHER; note = 2'-fluoroadenosine-3'-phosphorothioate
  modified_base 3: mod_base = OTHER; note = 2'-O-methyladenosine-3'-phosphate
  modified_base 4: mod_base = OTHER; note = 2'-O-methyladenosine-3'-phosphate
  modified_base 5: mod_base = OTHER; note = 2'-O-methyluridine-3'-phosphate
  modified_base 6: mod_base = OTHER; note = 2'-fluoroguanosine-3'-phosphate
  modified_base 7: mod_base = OTHER; note = 2'-O-methyluridine-3'-phosphate
  modified_base 8: mod_base = OTHER; note = 2'-fluoroadenosine-3'-phosphate
  modified_base 9: mod_base = OTHER; note = 2'-fluorouridine-3'-phosphate
  modified_base 10: mod_base = OTHER; note = 2'-O-methyluridine-3'-phosphate
  modified_base 11: mod_base = OTHER; note = 2'-O-methyluridine-3'-phosphate
  modified_base 12: mod_base = OTHER; note = 2'-O-methylcytidine-3'-phosphate
  modified_base 13: mod_base = OTHER; note = 2'-O-methyladenosine-3'-phosphate
  modified_base 14: mod_base = OTHER; note = 2'-fluorocytidine-3'-phosphate
  modified_base 15: mod_base = OTHER; note = 2'-O-methyladenosine-3'-phosphate
  modified_base 16: mod_base = OTHER; note = 2'-fluoroadenosine-3'-phosphate
  modified_base 17: mod_base = OTHER; note = 2'-O-methylguanosine-3'-phosphate
  modified_base 18: mod_base = OTHER; note = 2'-O-methyluridine-3'-phosphate
  modified_base 19: mod_base = OTHER; note = 2'-O-methyladenosine-3'-phosphate
  modified_base 20: mod_base = OTHER; note = 2'-O-methylguanosine-3'-phosphate
  modified_base 21: mod_base = OTHER; note = 2'-O-methylguanosine-3'-phosphorothioate
  modified_base 22: mod_base = OTHER; note = 2'-O-methylguanosine-3'-phosphorothioate
  modified_base 23: mod_base = OTHER; note = 2'-O-methyluridine-3'-phosphate
taaatgtatttcacaagtagggt

SEQ ID NO: 4075 - RNA, 23 nt, synthetic construct
  source 1..23: mol_type = other RNA
  modified_base 1: mod_base = OTHER; note = Vinyl-phosphonate 2'-O-methyluridine-3'-phosphorothioate
  modified_base 2: mod_base = OTHER; note = 2'-fluoroadenosine-3'-phosphorothioate
  modified_base 3: mod_base = OTHER; note = 2'-O-methyladenosine-3'-phosphate
  modified_base 4: mod_base = OTHER; note = 2'-O-methyladenosine-3'-phosphate
  modified_base 5: mod_base = OTHER; note = 2'-O-methyluridine-3'-phosphate
  modified_base 6: mod_base = OTHER; note = 2'-fluorouridine-3'-phosphate
  modified_base 7: mod_base = OTHER; note = 2'-O-methylguanosine-3'-phosphate
  modified_base 8: mod_base = OTHER; note = 2'-fluoroguanosine-3'-phosphate
  modified_base 9: mod_base = OTHER; note = 2'-fluoroadenosine-3'-phosphate
  modified_base 10: mod_base = OTHER; note = 2'-O-methyladenosine-3'-phosphate
  modified_base 11: mod_base = OTHER; note = 2'-O-methyladenosine-3'-phosphate
  modified_base 12: mod_base = OTHER; note = 2'-O-methyladenosine-3'-phosphate
  modified_base 13: mod_base = OTHER; note = 2'-O-methyluridine-3'-phosphate
  modified_base 14: mod_base = OTHER; note = 2'-fluorouridine-3'-phosphate
  modified_base 15: mod_base = OTHER; note = 2'-O-methylcytidine-3'-phosphate
  modified_base 16: mod_base = OTHER; note = 2'-fluorocytidine-3'-phosphate
  modified_base 17: mod_base = OTHER; note = 2'-O-methyladenosine-3'-phosphate
  modified_base 18: mod_base = OTHER; note = 2'-O-methylguanosine-3'-phosphate
  modified_base 19: mod_base = OTHER; note = 2'-O-methyluridine-3'-phosphate
  modified_base 20: mod_base = OTHER; note = 2'-O-methyluridine-3'-phosphate
  modified_base 21: mod_base = OTHER; note = 2'-O-methylguanosine-3'-phosphorothioate
  modified_base 22: mod_base = OTHER; note = 2'-O-methylcytidine-3'-phosphorothioate
  modified_base 23: mod_base = OTHER; note = 2'-O-methyluridine-3'-phosphate
taaattggaaaattccagttgct

SEQ ID NO: 4076 - RNA, 23 nt, synthetic construct
  source 1..23: mol_type = other RNA
  modified_base 1: mod_base = OTHER; note = Vinyl-phosphonate 2'-O-methyluridine-3'-phosphorothioate
  modified_base 2: mod_base = OTHER; note = 2'-fluorouridine -3'-phosphorothioate
  modified_base 3: mod_base = OTHER; note = 2'-O-methyladenosine-3'-phosphate
  modified_base 4: mod_base = OTHER; note = 2'-O-methyladenosine-3'-phosphate
  modified_base 5: mod_base = OTHER; note = 2'-O-methylcytidine-3'-phosphate
  modified_base 6: mod_base = OTHER; note = 2'-fluorouridine-3'-phosphate
  modified_base 7: mod_base = OTHER; note = 2'-O-methylcytidine-3'-phosphate
  modified_base 8: mod_base = OTHER; note = 2'-fluorouridine-3'-phosphate
  modified_base 9: mod_base = OTHER; note = 2'-fluorocytidine-3'-phosphate
  modified_base 10: mod_base = OTHER; note = 2'-O-methyladenosine-3'-phosphate
  modified_base 11: mod_base = OTHER; note = 2'-O-methyluridine-3'-phosphate
  modified_base 12: mod_base = OTHER; note = 2'-O-methylcytidine-3'-phosphate
  modified_base 13: mod_base = OTHER; note = 2'-O-methyladenosine-3'-phosphate
  modified_base 14: mod_base = OTHER; note = 2'-fluoroguanosine-3'-phosphate
  modified_base 15: mod_base = OTHER; note = 2'-O-methylguanosine-3'-phosphate
  modified_base 16: mod_base = OTHER; note = 2'-fluoroadenosine-3'-phosphate
  modified_base 17: mod_base = OTHER; note = 2'-O-methyluridine-3'-phosphate
  modified_base 18: mod_base = OTHER; note = 2'-O-methyluridine-3'-phosphate
  modified_base 19: mod_base = OTHER; note = 2'-O-methyladenosine-3'-phosphate
  modified_base 20: mod_base = OTHER; note = 2'-O-methylguanosine-3'-phosphate
  modified_base 21: mod_base = OTHER; note = 2'-O-methyladenosine-3'-phosphorothioate
  modified_base 22: mod_base = OTHER; note = 2'-O-methylguanosine-3'-phosphorothioate
  modified_base 23: mod_base = OTHER; note = 2'-O-methylcytidine-3'-phosphate
ttaactctcatcaggattagagc

SEQ ID NO: 4077 - RNA, 23 nt, synthetic construct
  source 1..23: mol_type = other RNA
  modified_base 1: mod_base = OTHER; note = Vinyl-phosphonate 2'-O-methyluridine-3'-phosphorothioate
  modified_base 2: mod_base = OTHER; note = 2'-fluoroadenosine-3'-phosphorothioate
  modified_base 3: mod_base = OTHER; note = 2'-O-methylguanosine-3'-phosphate
  modified_base 4: mod_base = OTHER; note = 2'-O-methyladenosine-3'-phosphate
  modified_base 5: mod_base = OTHER; note = 2'-O-methyladenosine-3'-phosphate
  modified_base 6: mod_base = OTHER; note = 2'-fluorouridine-3'-phosphate
  modified_base 7: mod_base = OTHER; note = 2'-O-methyluridine-3'-phosphate
  modified_base 8: mod_base = OTHER; note = 2'-fluorouridine-3'-phosphate
  modified_base 9: mod_base = OTHER; note = 2'-fluorouridine-3'-phosphate
  modified_base 10: mod_base = OTHER; note = 2'-O-methylguanosine-3'-phosphate
  modified_base 11: mod_base = OTHER; note = 2'-O-methyladenosine-3'-phosphate
  modified_base 12: mod_base = OTHER; note = 2'-O-methyluridine-3'-phosphate
  modified_base 13: mod_base = OTHER; note = 2'-O-methyladenosine-3'-phosphate
  modified_base 14: mod_base = OTHER; note = 2'-fluoroadenosine-3'-phosphate
  modified_base 15: mod_base = OTHER; note = 2'-O-methyluridine-3'-phosphate
  modified_base 16: mod_base = OTHER; note = 2'-fluoroguanosine-3'-phosphate
  modified_base 17: mod_base = OTHER; note = 2'-O-methyladenosine-3'-phosphate
  modified_base 18: mod_base = OTHER; note = 2'-O-methylguanosine-3'-phosphate
  modified_base 19: mod_base = OTHER; note = 2'-O-methylguanosine-3'-phosphate
  modified_base 20: mod_base = OTHER; note = 2'-O-methylcytidine-3'-phosphate
  modified_base 21: mod_base = OTHER; note = 2'-O-methyluridine-3'-phosphorothioate
  modified_base 22: mod_base = OTHER; note = 2'-O-methyluridine-3'-phosphorothioate
  modified_base 23: mod_base = OTHER; note = 2'-O-methyladenosine-3'-phosphate
tagaattttgataatgaggctta

SEQ ID NO: 4078 - RNA, 23 nt, synthetic construct
  source 1..23: mol_type = other RNA
  modified_base 1: mod_base = OTHER; note = Vinyl-phosphonate 2'-O-methyluridine-3'-phosphorothioate
  modified_base 2: mod_base = OTHER; note = 2'-fluoroadenosine-3'-phosphorothioate
  modified_base 3: mod_base = OTHER; note = 2'-O-methylguanosine-3'-phosphate
  modified_base 4: mod_base = OTHER; note = 2'-O-methyluridine-3'-phosphate
  modified_base 5: mod_base = OTHER; note = 2'-O-methyladenosine-3'-phosphate
  modified_base 6: mod_base = OTHER; note = 2'-fluoroadenosine-3'-phosphate
  modified_base 7: mod_base = OTHER; note = 2'-O-methyladenosine-3'-phosphate
  modified_base 8: mod_base = OTHER; note = 2'-fluoroadenosine-3'-phosphate
  modified_base 9: mod_base = OTHER; note = 2'-fluoroadenosine-3'-phosphate
  modified_base 10: mod_base = OTHER; note = 2'-O-methylguanosine-3'-phosphate
  modified_base 11: mod_base = OTHER; note = 2'-O-methylcytidine-3'-phosphate
  modified_base 12: mod_base = OTHER; note = 2'-O-methyladenosine-3'-phosphate
  modified_base 13: mod_base = OTHER; note = 2'-O-methyluridine-3'-phosphate
  modified_base 14: mod_base = OTHER; note = 2'-fluorocytidine-3'-phosphate
  modified_base 15: mod_base = OTHER; note = 2'-O-methyladenosine-3'-phosphate
  modified_base 16: mod_base = OTHER; note = 2'-fluoroguanosine-3'-phosphate
  modified_base 17: mod_base = OTHER; note = 2'-O-methyladenosine-3'-phosphate
  modified_base 18: mod_base = OTHER; note = 2'-O-methyladenosine-3'-phosphate
  modified_base 19: mod_base = OTHER; note = 2'-O-methyladenosine-3'-phosphate
  modified_base 20: mod_base = OTHER; note = 2'-O-methyluridine-3'-phosphate
  modified_base 21: mod_base = OTHER; note = 2'-O-methyluridine-3'-phosphorothioate
  modified_base 22: mod_base = OTHER; note = 2'-O-methylguanosine-3'-phosphorothioate
  modified_base 23: mod_base = OTHER; note = 2'-O-methyladenosine-3'-phosphate
tagtaaaaagcatcagaaattga

SEQ ID NO: 4079 - RNA, 23 nt, synthetic construct
  source 1..23: mol_type = other RNA
  modified_base 1: mod_base = OTHER; note = Vinyl-phosphonate 2'-O-methyluridine-3'-phosphorothioate
  modified_base 2: mod_base = OTHER; note = 2'-fluorouridine -3'-phosphorothioate
  modified_base 3: mod_base = OTHER; note = 2'-O-methyladenosine-3'-phosphate
  modified_base 4: mod_base = OTHER; note = 2'-O-methyladenosine-3'-phosphate
  modified_base 5: mod_base = OTHER; note = 2'-O-methylguanosine-3'-phosphate
  modified_base 6: mod_base = OTHER; note = 2'-fluoroadenosine-3'-phosphate
  modified_base 7: mod_base = OTHER; note = 2'-O-methyluridine-3'-phosphate
  modified_base 8: mod_base = OTHER; note = 2'-fluorouridine-3'-phosphate
  modified_base 9: mod_base = OTHER; note = 2'-fluorouridine-3'-phosphate
  modified_base 10: mod_base = OTHER; note = 2'-O-methylcytidine-3'-phosphate
  modified_base 11: mod_base = OTHER; note = 2'-O-methyladenosine-3'-phosphate
  modified_base 12: mod_base = OTHER; note = 2'-O-methyluridine-3'-phosphate
  modified_base 13: mod_base = OTHER; note = 2'-O-methylcytidine-3'-phosphate
  modified_base 14: mod_base = OTHER; note = 2'-fluorouridine-3'-phosphate
  modified_base 15: mod_base = OTHER; note = 2'-O-methyladenosine-3'-phosphate
  modified_base 16: mod_base = OTHER; note = 2'-fluoroadenosine-3'-phosphate
  modified_base 17: mod_base = OTHER; note = 2'-O-methyluridine-3'-phosphate
  modified_base 18: mod_base = OTHER; note = 2'-O-methylguanosine-3'-phosphate
  modified_base 19: mod_base = OTHER; note = 2'-O-methylguanosine-3'-phosphate
  modified_base 20: mod_base = OTHER; note = 2'-O-methyluridine-3'-phosphate
  modified_base 21: mod_base = OTHER; note = 2'-O-methyladenosine-3'-phosphorothioate
  modified_base 22: mod_base = OTHER; note = 2'-O-methylcytidine-3'-phosphorothioate
  modified_base 23: mod_base = OTHER; note = 2'-O-methyladenosine-3'-phosphate
ttaagatttcatctaatggtaca

SEQ ID NO: 4080 - RNA, 23 nt, synthetic construct
  source 1..23: mol_type = other RNA
  modified_base 1: mod_base = OTHER; note = Vinyl-phosphonate 2'-O-methyluridine-3'-phosphorothioate
  modified_base 2: mod_base = OTHER; note = 2'-fluoroadenosine-3'-phosphorothioate
  modified_base 3: mod_base = OTHER; note = 2'-O-methyluridine-3'-phosphate
  modified_base 4: mod_base = OTHER; note = 2'-O-methylguanosine-3'-phosphate
  modified_base 5: mod_base = OTHER; note = 2'-O-methylguanosine-3'-phosphate
  modified_base 6: mod_base = OTHER; note = 2'-fluorouridine-3'-phosphate
  modified_base 7: mod_base = OTHER; note = 2'-O-methyluridine-3'-phosphate
  modified_base 8: mod_base = OTHER; note = 2'-fluoroguanosine-3'-phosphate
  modified_base 9: mod_base = OTHER; note = 2'-fluoroguanosine-3'-phosphate
  modified_base 10: mod_base = OTHER; note = 2'-O-methyladenosine-3'-phosphate
  modified_base 11: mod_base = OTHER; note = 2'-O-methyladenosine-3'-phosphate
  modified_base 12: mod_base = OTHER; note = 2'-O-methylguanosine-3'-phosphate
  modified_base 13: mod_base = OTHER; note = 2'-O-methyladenosine-3'-phosphate
  modified_base 14: mod_base = OTHER; note = 2'-fluoroadenosine-3'-phosphate
  modified_base 15: mod_base = OTHER; note = 2'-O-methyluridine-3'-phosphate
  modified_base 16: mod_base = OTHER; note = 2'-fluorouridine-3'-phosphate
  modified_base 17: mod_base = OTHER; note = 2'-O-methylcytidine-3'-phosphate
  modified_base 18: mod_base = OTHER; note = 2'-O-methyladenosine-3'-phosphate
  modified_base 19: mod_base = OTHER; note = 2'-O-methylcytidine-3'-phosphate
  modified_base 20: mod_base = OTHER; note = 2'-O-methyladenosine-3'-phosphate
  modified_base 21: mod_base = OTHER; note = 2'-O-methylguanosine-3'-phosphorothioate
  modified_base 22: mod_base = OTHER; note = 2'-O-methylguanosine-3'-phosphorothioate
  modified_base 23: mod_base = OTHER; note = 2'-O-methyladenosine-3'-phosphate
tatggttggaagaattcacagga

SEQ ID NO: 4081 - RNA, 23 nt, synthetic construct
  source 1..23: mol_type = other RNA
  modified_base 1: mod_base = OTHER; note = Vinyl-phosphonate 2'-O-methyluridine-3'-phosphorothioate
  modified_base 2: mod_base = OTHER; note = 2'-fluoroadenosine-3'-phosphorothioate
  modified_base 3: mod_base = OTHER; note = 2'-O-methyluridine-3'-phosphate
  modified_base 4: mod_base = OTHER; note = 2'-O-methyladenosine-3'-phosphate
  modified_base 5: mod_base = OTHER; note = 2'-O-methyladenosine-3'-phosphate
  modified_base 6: mod_base = OTHER; note = 2'-fluoroadenosine-3'-phosphate
  modified_base 7: mod_base = OTHER; note = 2'-O-methyladenosine-3'-phosphate
  modified_base 8: mod_base = OTHER; note = 2'-fluoroadenosine-3'-phosphate
  modified_base 9: mod_base = OTHER; note = 2'-fluorouridine-3'-phosphate
  modified_base 10: mod_base = OTHER; note = 2'-O-methylcytidine-3'-phosphate
  modified_base 11: mod_base = OTHER; note = 2'-O-methyluridine-3'-phosphate
  modified_base 12: mod_base = OTHER; note = 2'-O-methylguanosine-3'-phosphate
  modified_base 13: mod_base = OTHER; note = 2'-O-methylguanosine-3'-phosphate
  modified_base 14: mod_base = OTHER; note = 2'-fluoroadenosine-3'-phosphate
  modified_base 15: mod_base = OTHER; note = 2'-O-methylguanosine-3'-phosphate
  modified_base 16: mod_base = OTHER; note = 2'-fluorouridine-3'-phosphate
  modified_base 17: mod_base = OTHER; note = 2'-O-methyladenosine-3'-phosphate
  modified_base 18: mod_base = OTHER; note = 2'-O-methyluridine-3'-phosphate
  modified_base 19: mod_base = OTHER; note = 2'-O-methyluridine-3'-phosphate
  modified_base 20: mod_base = OTHER; note = 2'-O-methyladenosine-3'-phosphate
  modified_base 21: mod_base = OTHER; note = 2'-O-methylguanosine-3'-phosphorothioate
  modified_base 22: mod_base = OTHER; note = 2'-O-methylguanosine-3'-phosphorothioate
  modified_base 23: mod_base = OTHER; note = 2'-O-methyluridine-3'-phosphate
tataaaaatctggagtattaggt

SEQ ID NO: 4082 - RNA, 23 nt, synthetic construct
  source 1..23: mol_type = other RNA
  modified_base 1: mod_base = OTHER; note = Vinyl-phosphonate 2'-O-methyluridine-3'-phosphorothioate
  modified_base 2: mod_base = OTHER; note = 2'-fluorouridine -3'-phosphorothioate
  modified_base 3: mod_base = OTHER; note = 2'-O-methyluridine-3'-phosphate
  modified_base 4: mod_base = OTHER; note = 2'-O-methyluridine-3'-phosphate
  modified_base 5: mod_base = OTHER; note = 2'-O-methyladenosine-3'-phosphate
  modified_base 6: mod_base = OTHER; note = 2'-fluorouridine-3'-phosphate
  modified_base 7: mod_base = OTHER; note = 2'-O-methyluridine-3'-phosphate
  modified_base 8: mod_base = OTHER; note = 2'-fluorocytidine-3'-phosphate
  modified_base 9: mod_base = OTHER; note = 2'-fluoroadenosine-3'-phosphate
  modified_base 10: mod_base = OTHER; note = 2'-O-methyladenosine-3'-phosphate
  modified_base 11: mod_base = OTHER; note = 2'-O-methyluridine-3'-phosphate
  modified_base 12: mod_base = OTHER; note = 2'-O-methylguanosine-3'-phosphate
  modified_base 13: mod_base = OTHER; note = 2'-O-methyluridine-3'-phosphate
  modified_base 14: mod_base = OTHER; note = 2'-fluoroadenosine-3'-phosphate
  modified_base 15: mod_base = OTHER; note = 2'-O-methyluridine-3'-phosphate
  modified_base 16: mod_base = OTHER; note = 2'-fluoroguanosine-3'-phosphate
  modified_base 17: mod_base = OTHER; note = 2'-O-methyluridine-3'-phosphate
  modified_base 18: mod_base = OTHER; note = 2'-O-methylguanosine-3'-phosphate
  modified_base 19: mod_base = OTHER; note = 2'-O-methyluridine-3'-phosphate
  modified_base 20: mod_base = OTHER; note = 2'-O-methylcytidine-3'-phosphate
  modified_base 21: mod_base = OTHER; note = 2'-O-methylcytidine-3'-phosphorothioate
  modified_base 22: mod_base = OTHER; note = 2'-O-methyluridine-3'-phosphorothioate
  modified_base 23: mod_base = OTHER; note = 2'-O-methyluridine-3'-phosphate
ttttattcaatgtatgtgtcctt

SEQ ID NO: 4083 - RNA, 23 nt, synthetic construct
  source 1..23: mol_type = other RNA
  modified_base 1: mod_base = OTHER; note = Vinyl-phosphonate 2'-O-methyluridine-3'-phosphorothioate
  modified_base 2: mod_base = OTHER; note = 2'-fluorocytidine-3'-phosphorothioate
  modified_base 3: mod_base = OTHER; note = 2'-O-methyladenosine-3'-phosphate
  modified_base 4: mod_base = OTHER; note = 2'-O-methyladenosine-3'-phosphate
  modified_base 5: mod_base = OTHER; note = 2'-O-methyladenosine-3'-phosphate
  modified_base 6: mod_base = OTHER; note = 2'-fluoroguanosine-3'-phosphate
  modified_base 7: mod_base = OTHER; note = 2'-O-methylcytidine-3'-phosphate
  modified_base 8: mod_base = OTHER; note = 2'-fluoroadenosine-3'-phosphate
  modified_base 9: mod_base = OTHER; note = 2'-fluoroguanosine-3'-phosphate
  modified_base 10: mod_base = OTHER; note = 2'-O-methylcytidine-3'-phosphate
  modified_base 11: mod_base = OTHER; note = 2'-O-methyladenosine-3'-phosphate
  modified_base 12: mod_base = OTHER; note = 2'-O-methyluridine-3'-phosphate
  modified_base 13: mod_base = OTHER; note = 2'-O-methyluridine-3'-phosphate
  modified_base 14: mod_base = OTHER; note = 2'-fluoroadenosine-3'-phosphate
  modified_base 15: mod_base = OTHER; note = 2'-O-methyluridine-3'-phosphate
  modified_base 16: mod_base = OTHER; note = 2'-fluoroguanosine-3'-phosphate
  modified_base 17: mod_base = OTHER; note = 2'-O-methyladenosine-3'-phosphate
  modified_base 18: mod_base = OTHER; note = 2'-O-methylcytidine-3'-phosphate
  modified_base 19: mod_base = OTHER; note = 2'-O-methyladenosine-3'-phosphate
  modified_base 20: mod_base = OTHER; note = 2'-O-methyladenosine-3'-phosphate
  modified_base 21: mod_base = OTHER; note = 2'-O-methyladenosine-3'-phosphorothioate
  modified_base 22: mod_base = OTHER; note = 2'-O-methylguanosine-3'-phosphorothioate
  modified_base 23: mod_base = OTHER; note = 2'-O-methyluridine-3'-phosphate
tcaaagcagcattatgacaaagt

SEQ ID NO: 4084 - RNA, 23 nt, synthetic construct
  source 1..23: mol_type = other RNA
  modified_base 1: mod_base = OTHER; note = Vinyl-phosphonate 2'-O-methyluridine-3'-phosphorothioate
  modified_base 2: mod_base = OTHER; note = 2'-fluoroguanosine-3'-phosphorothioate
  modified_base 3: mod_base = OTHER; note = 2'-O-methyladenosine-3'-phosphate
  modified_base 4: mod_base = OTHER; note = 2'-O-methyladenosine-3'-phosphate
  modified_base 5: mod_base = OTHER; note = 2'-O-methyladenosine-3'-phosphate
  modified_base 6: mod_base = OTHER; note = 2'-fluorouridine-3'-phosphate
  modified_base 7: mod_base = OTHER; note = 2'-O-methyluridine-3'-phosphate
  modified_base 8: mod_base = OTHER; note = 2'-fluoroadenosine-3'-phosphate
  modified_base 9: mod_base = OTHER; note = 2'-fluoroadenosine-3'-phosphate
  modified_base 10: mod_base = OTHER; note = 2'-O-methylcytidine-3'-phosphate
  modified_base 11: mod_base = OTHER; note = 2'-O-methyladenosine-3'-phosphate
  modified_base 12: mod_base = OTHER; note = 2'-O-methylguanosine-3'-phosphate
  modified_base 13: mod_base = OTHER; note = 2'-O-methyladenosine-3'-phosphate
  modified_base 14: mod_base = OTHER; note = 2'-fluoroadenosine-3'-phosphate
  modified_base 15: mod_base = OTHER; note = 2'-O-methyladenosine-3'-phosphate
  modified_base 16: mod_base = OTHER; note = 2'-fluoroguanosine-3'-phosphate
  modified_base 17: mod_base = OTHER; note = 2'-O-methyladenosine-3'-phosphate
  modified_base 18: mod_base = OTHER; note = 2'-O-methyluridine-3'-phosphate
  modified_base 19: mod_base = OTHER; note = 2'-O-methylguanosine-3'-phosphate
  modified_base 20: mod_base = OTHER; note = 2'-O-methyladenosine-3'-phosphate
  modified_base 21: mod_base = OTHER; note = 2'-O-methyladenosine-3'-phosphorothioate
  modified_base 22: mod_base = OTHER; note = 2'-O-methylcytidine-3'-phosphorothioate
  modified_base 23: mod_base = OTHER; note = 2'-O-methyladenosine-3'-phosphate
tgaaattaacagaaagatgaaca

SEQ ID NO: 4085 - RNA, 23 nt, synthetic construct
  source 1..23: mol_type = other RNA
  modified_base 1: mod_base = OTHER; note = Vinyl-phosphonate 2'-O-methyluridine-3'-phosphorothioate
  modified_base 2: mod_base = OTHER; note = 2'-fluoroguanosine-3'-phosphorothioate
  modified_base 3: mod_base = OTHER; note = 2'-O-methyladenosine-3'-phosphate
  modified_base 4: mod_base = OTHER; note = 2'-O-methyladenosine-3'-phosphate
  modified_base 5: mod_base = OTHER; note = 2'-O-methyladenosine-3'-phosphate
  modified_base 6: mod_base = OTHER; note = 2'-fluoroadenosine-3'-phosphate
  modified_base 7: mod_base = OTHER; note = 2'-O-methyluridine-3'-phosphate
  modified_base 8: mod_base = OTHER; note = 2'-fluorouridine-3'-phosphate
  modified_base 9: mod_base = OTHER; note = 2'-fluoroadenosine-3'-phosphate
  modified_base 10: mod_base = OTHER; note = 2'-O-methyladenosine-3'-phosphate
  modified_base 11: mod_base = OTHER; note = 2'-O-methyluridine-3'-phosphate
  modified_base 12: mod_base = OTHER; note = 2'-O-methylguanosine-3'-phosphate
  modified_base 13: mod_base = OTHER; note = 2'-O-methylguanosine-3'-phosphate
  modified_base 14: mod_base = OTHER; note = 2'-fluorouridine-3'-phosphate
  modified_base 15: mod_base = OTHER; note = 2'-O-methyluridine-3'-phosphate
  modified_base 16: mod_base = OTHER; note = 2'-fluorouridine-3'-phosphate
  modified_base 17: mod_base = OTHER; note = 2'-O-methylcytidine-3'-phosphate
  modified_base 18: mod_base = OTHER; note = 2'-O-methyladenosine-3'-phosphate
  modified_base 19: mod_base = OTHER; note = 2'-O-methylcytidine-3'-phosphate
  modified_base 20: mod_base = OTHER; note = 2'-O-methyluridine-3'-phosphate
  modified_base 21: mod_base = OTHER; note = 2'-O-methylguanosine-3'-phosphorothioate
  modified_base 22: mod_base = OTHER; note = 2'-O-methyluridine-3'-phosphorothioate
  modified_base 23: mod_base = OTHER; note = 2'-O-methylguanosine-3'-phosphate
tgaaaattaatggtttcactgtg

SEQ ID NO: 4086 - RNA, 23 nt, synthetic construct
  source 1..23: mol_type = other RNA
  modified_base 1: mod_base = OTHER; note = Vinyl-phosphonate 2'-O-methyluridine-3'-phosphorothioate
  modified_base 2: mod_base = OTHER; note = 2'-fluoroadenosine-3'-phosphorothioate
  modified_base 3: mod_base = OTHER; note = 2'-O-methylguanosine-3'-phosphate
  modified_base 4: mod_base = OTHER; note = 2'-O-methyladenosine-3'-phosphate
  modified_base 5: mod_base = OTHER; note = 2'-O-methyladenosine-3'-phosphate
  modified_base 6: mod_base = OTHER; note = 2'-fluoroadenosine-3'-phosphate
  modified_base 7: mod_base = OTHER; note = 2'-O-methyluridine-3'-phosphate
  modified_base 8: mod_base = OTHER; note = 2'-fluorocytidine-3'-phosphate
  modified_base 9: mod_base = OTHER; note = 2'-fluoroadenosine-3'-phosphate
  modified_base 10: mod_base = OTHER; note = 2'-O-methylguanosine-3'-phosphate
  modified_base 11: mod_base = OTHER; note = 2'-O-methyluridine-3'-phosphate
  modified_base 12: mod_base = OTHER; note = 2'-O-methylcytidine-3'-phosphate
  modified_base 13: mod_base = OTHER; note = 2'-O-methyluridine-3'-phosphate
  modified_base 14: mod_base = OTHER; note = 2'-fluorouridine-3'-phosphate
  modified_base 15: mod_base = OTHER; note = 2'-O-methylguanosine-3'-phosphate
  modified_base 16: mod_base = OTHER; note = 2'-fluorocytidine-3'-phosphate
  modified_base 17: mod_base = OTHER; note = 2'-O-methyladenosine-3'-phosphate
  modified_base 18: mod_base = OTHER; note = 2'-O-methylguanosine-3'-phosphate
  modified_base 19: mod_base = OTHER; note = 2'-O-methyluridine-3'-phosphate
  modified_base 20: mod_base = OTHER; note = 2'-O-methyluridine-3'-phosphate
  modified_base 21: mod_base = OTHER; note = 2'-O-methyladenosine-3'-phosphorothioate
  modified_base 22: mod_base = OTHER; note = 2'-O-methylguanosine-3'-phosphorothioate
  modified_base 23: mod_base = OTHER; note = 2'-O-methylguanosine-3'-phosphate
tagaaatcagtcttgcagttagg

SEQ ID NO: 4087 - RNA, 23 nt, synthetic construct
  source 1..23: mol_type = other RNA
  modified_base 1: mod_base = OTHER; note = Vinyl-phosphonate 2'-O-methyluridine-3'-phosphorothioate
  modified_base 2: mod_base = OTHER; note = 2'-fluorouridine -3'-phosphorothioate
  modified_base 3: mod_base = OTHER; note = 2'-O-methyluridine-3'-phosphate
  modified_base 4: mod_base = OTHER; note = 2'-O-methylguanosine-3'-phosphate
  modified_base 5: mod_base = OTHER; note = 2'-O-methyladenosine-3'-phosphate
  modified_base 6: mod_base = OTHER; note = 2'-fluoroguanosine-3'-phosphate
  modified_base 7: mod_base = OTHER; note = 2'-O-methylguanosine-3'-phosphate
  modified_base 8: mod_base = OTHER; note = 2'-fluorouridine-3'-phosphate
  modified_base 9: mod_base = OTHER; note = 2'-fluoroadenosine-3'-phosphate
  modified_base 10: mod_base = OTHER; note = 2'-O-methyladenosine-3'-phosphate
  modified_base 11: mod_base = OTHER; note = 2'-O-methylguanosine-3'-phosphate
  modified_base 12: mod_base = OTHER; note = 2'-O-methylguanosine-3'-phosphate
  modified_base 13: mod_base = OTHER; note = 2'-O-methyladenosine-3'-phosphate
  modified_base 14: mod_base = OTHER; note = 2'-fluoroguanosine-3'-phosphate
  modified_base 15: mod_base = OTHER; note = 2'-O-methylguanosine-3'-phosphate
  modified_base 16: mod_base = OTHER; note = 2'-fluoroadenosine-3'-phosphate
  modified_base 17: mod_base = OTHER; note = 2'-O-methyladenosine-3'-phosphate
  modified_base 18: mod_base = OTHER; note = 2'-O-methyluridine-3'-phosphate
  modified_base 19: mod_base = OTHER; note = 2'-O-methyluridine-3'-phosphate
  modified_base 20: mod_base = OTHER; note = 2'-O-methylcytidine-3'-phosphate
  modified_base 21: mod_base = OTHER; note = 2'-O-methyluridine-3'-phosphorothioate
  modified_base 22: mod_base = OTHER; note = 2'-O-methylcytidine-3'-phosphorothioate
  modified_base 23: mod_base = OTHER; note = 2'-O-methylcytidine-3'-phosphate
tttgaggtaaggaggaattctcc

SEQ ID NO: 4088 - RNA, 23 nt, synthetic construct
  source 1..23: mol_type = other RNA
  modified_base 1: mod_base = OTHER; note = Vinyl-phosphonate 2'-O-methyluridine-3'-phosphorothioate
  modified_base 2: mod_base = OTHER; note = 2'-fluoroadenosine-3'-phosphorothioate
  modified_base 3: mod_base = OTHER; note = 2'-O-methylcytidine-3'-phosphate
  modified_base 4: mod_base = OTHER; note = 2'-O-methyladenosine-3'-phosphate
  modified_base 5: mod_base = OTHER; note = 2'-O-methyladenosine-3'-phosphate
  modified_base 6: mod_base = OTHER; note = 2'-fluoroadenosine-3'-phosphate
  modified_base 7: mod_base = OTHER; note = 2'-O-methylguanosine-3'-phosphate
  modified_base 8: mod_base = OTHER; note = 2'-fluorouridine-3'-phosphate
  modified_base 9: mod_base = OTHER; note = 2'-fluoroadenosine-3'-phosphate
  modified_base 10: mod_base = OTHER; note = 2'-O-methyladenosine-3'-phosphate
  modified_base 11: mod_base = OTHER; note = 2'-O-methylguanosine-3'-phosphate
  modified_base 12: mod_base = OTHER; note = 2'-O-methyladenosine-3'-phosphate
  modified_base 13: mod_base = OTHER; note = 2'-O-methyluridine-3'-phosphate
  modified_base 14: mod_base = OTHER; note = 2'-fluorocytidine-3'-phosphate
  modified_base 15: mod_base = OTHER; note = 2'-O-methyluridine-3'-phosphate
  modified_base 16: mod_base = OTHER; note = 2'-fluoroguanosine-3'-phosphate
  modified_base 17: mod_base = OTHER; note = 2'-O-methyluridine-3'-phosphate
  modified_base 18: mod_base = OTHER; note = 2'-O-methyladenosine-3'-phosphate
  modified_base 19: mod_base = OTHER; note = 2'-O-methyladenosine-3'-phosphate
  modified_base 20: mod_base = OTHER; note = 2'-O-methyluridine-3'-phosphate
  modified_base 21: mod_base = OTHER; note = 2'-O-methyladenosine-3'-phosphorothioate
  modified_base 22: mod_base = OTHER; note = 2'-O-methyluridine-3'-phosphorothioate
  modified_base 23: mod_base = OTHER; note = 2'-O-methylguanosine-3'-phosphate
tacaaagtaagatctgtaatatg

SEQ ID NO: 4089 - RNA, 23 nt, synthetic construct
  source 1..23: mol_type = other RNA
  modified_base 1: mod_base = OTHER; note = Vinyl-phosphonate 2'-O-methyluridine-3'-phosphorothioate
  modified_base 2: mod_base = OTHER; note = 2'-fluoroadenosine-3'-phosphorothioate
  modified_base 3: mod_base = OTHER; note = 2'-O-methyladenosine-3'-phosphate
  modified_base 4: mod_base = OTHER; note = 2'-O-methyluridine-3'-phosphate
  modified_base 5: mod_base = OTHER; note = 2'-O-methyluridine-3'-phosphate
  modified_base 6: mod_base = OTHER; note = 2'-fluoroguanosine-3'-phosphate
  modified_base 7: mod_base = OTHER; note = 2'-O-methyladenosine-3'-phosphate
  modified_base 8: mod_base = OTHER; note = 2'-fluorouridine-3'-phosphate
  modified_base 9: mod_base = OTHER; note = 2'-fluoroadenosine-3'-phosphate
  modified_base 10: mod_base = OTHER; note = 2'-O-methyluridine-3'-phosphate
  modified_base 11: mod_base = OTHER; note = 2'-O-methylcytidine-3'-phosphate
  modified_base 12: mod_base = OTHER; note = 2'-O-methyluridine-3'-phosphate
  modified_base 13: mod_base = OTHER; note = 2'-O-methyluridine-3'-phosphate
  modified_base 14: mod_base = OTHER; note = 2'-fluorouridine-3'-phosphate
  modified_base 15: mod_base = OTHER; note = 2'-O-methylcytidine-3'-phosphate
  modified_base 16: mod_base = OTHER; note = 2'-fluoroadenosine-3'-phosphate
  modified_base 17: mod_base = OTHER; note = 2'-O-methylguanosine-3'-phosphate
  modified_base 18: mod_base = OTHER; note = 2'-O-methyladenosine-3'-phosphate
  modified_base 19: mod_base = OTHER; note = 2'-O-methyluridine-3'-phosphate
  modified_base 20: mod_base = OTHER; note = 2'-O-methyladenosine-3'-phosphate
  modified_base 21: mod_base = OTHER; note = 2'-O-methyladenosine-3'-phosphorothioate
  modified_base 22: mod_base = OTHER; note = 2'-O-methylguanosine-3'-phosphorothioate
  modified_base 23: mod_base = OTHER; note = 2'-O-methylcytidine-3'-phosphate
taattgatatctttcagataagc

SEQ ID NO: 4090 - RNA, 23 nt, synthetic construct
  source 1..23: mol_type = other RNA
  modified_base 1: mod_base = OTHER; note = Vinyl-phosphonate 2'-O-methyluridine-3'-phosphorothioate
  modified_base 2: mod_base = OTHER; note = 2'-fluorouridine -3'-phosphorothioate
  modified_base 3: mod_base = OTHER; note = 2'-O-methylguanosine-3'-phosphate
  modified_base 4: mod_base = OTHER; note = 2'-O-methyladenosine-3'-phosphate
  modified_base 5: mod_base = OTHER; note = 2'-O-methyluridine-3'-phosphate
  modified_base 6: mod_base = OTHER; note = 2'-fluorouridine-3'-phosphate
  modified_base 7: mod_base = OTHER; note = 2'-O-methyluridine-3'-phosphate
  modified_base 8: mod_base = OTHER; note = 2'-fluorouridine-3'-phosphate
  modified_base 9: mod_base = OTHER; note = 2'-fluorocytidine-3'-phosphate
  modified_base 10: mod_base = OTHER; note = 2'-O-methylcytidine-3'-phosphate
  modified_base 11: mod_base = OTHER; note = 2'-O-methyladenosine-3'-phosphate
  modified_base 12: mod_base = OTHER; note = 2'-O-methylguanosine-3'-phosphate
  modified_base 13: mod_base = OTHER; note = 2'-O-methyladenosine-3'-phosphate
  modified_base 14: mod_base = OTHER; note = 2'-fluoroadenosine-3'-phosphate
  modified_base 15: mod_base = OTHER; note = 2'-O-methylcytidine-3'-phosphate
  modified_base 16: mod_base = OTHER; note = 2'-fluoroadenosine-3'-phosphate
  modified_base 17: mod_base = OTHER; note = 2'-O-methylguanosine-3'-phosphate
  modified_base 18: mod_base = OTHER; note = 2'-O-methyladenosine-3'-phosphate
  modified_base 19: mod_base = OTHER; note = 2'-O-methyluridine-3'-phosphate
  modified_base 20: mod_base = OTHER; note = 2'-O-methylcytidine-3'-phosphate
  modified_base 21: mod_base = OTHER; note = 2'-O-methyluridine-3'-phosphorothioate
  modified_base 22: mod_base = OTHER; note = 2'-O-methylguanosine-3'-phosphorothioate
  modified_base 23: mod_base = OTHER; note = 2'-O-methyluridine-3'-phosphate
ttgattttccagaacagatctgt

SEQ ID NO: 4091 - RNA, 23 nt, synthetic construct
  source 1..23: mol_type = other RNA
  modified_base 1: mod_base = OTHER; note = Vinyl-phosphonate 2'-O-methyluridine-3'-phosphorothioate
  modified_base 2: mod_base = OTHER; note = 2'-fluoroguanosine-3'-phosphorothioate
  modified_base 3: mod_base = OTHER; note = 2'-O-methyladenosine-3'-phosphate
  modified_base 4: mod_base = OTHER; note = 2'-O-methyladenosine-3'-phosphate
  modified_base 5: mod_base = OTHER; note = 2'-O-methylguanosine-3'-phosphate
  modified_base 6: mod_base = OTHER; note = 2'-fluoroguanosine-3'-phosphate
  modified_base 7: mod_base = OTHER; note = 2'-O-methyladenosine-3'-phosphate
  modified_base 8: mod_base = OTHER; note = 2'-fluoroadenosine-3'-phosphate
  modified_base 9: mod_base = OTHER; note = 2'-fluoroguanosine-3'-phosphate
  modified_base 10: mod_base = OTHER; note = 2'-O-methyluridine-3'-phosphate
  modified_base 11: mod_base = OTHER; note = 2'-O-methyluridine-3'-phosphate
  modified_base 12: mod_base = OTHER; note = 2'-O-methylguanosine-3'-phosphate
  modified_base 13: mod_base = OTHER; note = 2'-O-methyluridine-3'-phosphate
  modified_base 14: mod_base = OTHER; note = 2'-fluoroadenosine-3'-phosphate
  modified_base 15: mod_base = OTHER; note = 2'-O-methyluridine-3'-phosphate
  modified_base 16: mod_base = OTHER; note = 2'-fluorouridine-3'-phosphate
  modified_base 17: mod_base = OTHER; note = 2'-O-methylcytidine-3'-phosphate
  modified_base 18: mod_base = OTHER; note = 2'-O-methyluridine-3'-phosphate
  modified_base 19: mod_base = OTHER; note = 2'-O-methylguanosine-3'-phosphate
  modified_base 20: mod_base = OTHER; note = 2'-O-methylguanosine-3'-phosphate
  modified_base 21: mod_base = OTHER; note = 2'-O-methylguanosine-3'-phosphorothioate
  modified_base 22: mod_base = OTHER; note = 2'-O-methylcytidine-3'-phosphorothioate
  modified_base 23: mod_base = OTHER; note = 2'-O-methylguanosine-3'-phosphate
tgaaggaagttgtattctgggcg

SEQ ID NO: 4092 - RNA, 23 nt, synthetic construct
  source 1..23: mol_type = other RNA
  modified_base 1: mod_base = OTHER; note = Vinyl-phosphonate 2'-O-methyluridine-3'-phosphorothioate
  modified_base 2: mod_base = OTHER; note = 2'-fluorouridine -3'-phosphorothioate
  modified_base 3: mod_base = OTHER; note = 2'-O-methyluridine-3'-phosphate
  modified_base 4: mod_base = OTHER; note = 2'-O-methyluridine-3'-phosphate
  modified_base 5: mod_base = OTHER; note = 2'-O-methyladenosine-3'-phosphate
  modified_base 6: mod_base = OTHER; note = 2'-fluoroguanosine-3'-phosphate
  modified_base 7: mod_base = OTHER; note = 2'-O-methylcytidine-3'-phosphate
  modified_base 8: mod_base = OTHER; note = 2'-fluoroadenosine-3'-phosphate
  modified_base 9: mod_base = OTHER; note = 2'-fluorocytidine-3'-phosphate
  modified_base 10: mod_base = OTHER; note = 2'-O-methyluridine-3'-phosphate
  modified_base 11: mod_base = OTHER; note = 2'-O-methylguanosine-3'-phosphate
  modified_base 12: mod_base = OTHER; note = 2'-O-methyladenosine-3'-phosphate
  modified_base 13: mod_base = OTHER; note = 2'-O-methyladenosine-3'-phosphate
  modified_base 14: mod_base = OTHER; note = 2'-fluoroadenosine-3'-phosphate
  modified_base 15: mod_base = OTHER; note = 2'-O-methylguanosine-3'-phosphate
  modified_base 16: mod_base = OTHER; note = 2'-fluoroadenosine-3'-phosphate
  modified_base 17: mod_base = OTHER; note = 2'-O-methyluridine-3'-phosphate
  modified_base 18: mod_base = OTHER; note = 2'-O-methylcytidine-3'-phosphate
  modified_base 19: mod_base = OTHER; note = 2'-O-methyladenosine-3'-phosphate
  modified_base 20: mod_base = OTHER; note = 2'-O-methyladenosine-3'-phosphate
  modified_base 21: mod_base = OTHER; note = 2'-O-methylcytidine-3'-phosphorothioate
  modified_base 22: mod_base = OTHER; note = 2'-O-methyluridine-3'-phosphorothioate
  modified_base 23: mod_base = OTHER; note = 2'-O-methylcytidine-3'-phosphate
ttttagcactgaaagatcaactc

SEQ ID NO: 4093 - RNA, 23 nt, synthetic construct
  source 1..23: mol_type = other RNA
  modified_base 1: mod_base = OTHER; note = Vinyl-phosphonate 2'-O-methyluridine-3'-phosphorothioate
  modified_base 2: mod_base = OTHER; note = 2'-fluoroguanosine-3'-phosphorothioate
  modified_base 3: mod_base = OTHER; note = 2'-O-methyluridine-3'-phosphate
  modified_base 4: mod_base = OTHER; note = 2'-O-methylcytidine-3'-phosphate
  modified_base 5: mod_base = OTHER; note = 2'-O-methyluridine-3'-phosphate
  modified_base 6: mod_base = OTHER; note = 2'-fluoroadenosine-3'-phosphate
  modified_base 7: mod_base = OTHER; note = 2'-O-methyladenosine-3'-phosphate
  modified_base 8: mod_base = OTHER; note = 2'-fluorouridine-3'-phosphate
  modified_base 9: mod_base = OTHER; note = 2'-fluoroadenosine-3'-phosphate
  modified_base 10: mod_base = OTHER; note = 2'-O-methyladenosine-3'-phosphate
  modified_base 11: mod_base = OTHER; note = 2'-O-methyladenosine-3'-phosphate
  modified_base 12: mod_base = OTHER; note = 2'-O-methyluridine-3'-phosphate
  modified_base 13: mod_base = OTHER; note = 2'-O-methyladenosine-3'-phosphate
  modified_base 14: mod_base = OTHER; note = 2'-fluoroadenosine-3'-phosphate
  modified_base 15: mod_base = OTHER; note = 2'-O-methyladenosine-3'-phosphate
  modified_base 16: mod_base = OTHER; note = 2'-fluoroguanosine-3'-phosphate
  modified_base 17: mod_base = OTHER; note = 2'-O-methylcytidine-3'-phosphate
  modified_base 18: mod_base = OTHER; note = 2'-O-methyluridine-3'-phosphate
  modified_base 19: mod_base = OTHER; note = 2'-O-methyluridine-3'-phosphate
  modified_base 20: mod_base = OTHER; note = 2'-O-methyladenosine-3'-phosphate
  modified_base 21: mod_base = OTHER; note = 2'-O-methylguanosine-3'-phosphorothioate
  modified_base 22: mod_base = OTHER; note = 2'-O-methyluridine-3'-phosphorothioate
  modified_base 23: mod_base = OTHER; note = 2'-O-methylguanosine-3'-phosphate
tgtctaataaataaagcttagtg

SEQ ID NO: 4094 - RNA, 23 nt, synthetic construct
  source 1..23: mol_type = other RNA
  modified_base 1: mod_base = OTHER; note = Vinyl-phosphonate 2'-O-methyluridine-3'-phosphorothioate
  modified_base 2: mod_base = OTHER; note = 2'-fluoroadenosine-3'-phosphorothioate
  modified_base 3: mod_base = OTHER; note = 2'-O-methyladenosine-3'-phosphate
  modified_base 4: mod_base = OTHER; note = 2'-O-methyladenosine-3'-phosphate
  modified_base 5: mod_base = OTHER; note = 2'-O-methylguanosine-3'-phosphate
  modified_base 6: mod_base = OTHER; note = 2'-fluoroadenosine-3'-phosphate
  modified_base 7: mod_base = OTHER; note = 2'-O-methyluridine-3'-phosphate
  modified_base 8: mod_base = OTHER; note = 2'-fluoroadenosine-3'-phosphate
  modified_base 9: mod_base = OTHER; note = 2'-fluorouridine-3'-phosphate
  modified_base 10: mod_base = OTHER; note = 2'-O-methyladenosine-3'-phosphate
  modified_base 11: mod_base = OTHER; note = 2'-O-methylguanosine-3'-phosphate
  modified_base 12: mod_base = OTHER; note = 2'-O-methyladenosine-3'-phosphate
  modified_base 13: mod_base = OTHER; note = 2'-O-methyluridine-3'-phosphate
  modified_base 14: mod_base = OTHER; note = 2'-fluorouridine-3'-phosphate
  modified_base 15: mod_base = OTHER; note = 2'-O-methylcytidine-3'-phosphate
  modified_base 16: mod_base = OTHER; note = 2'-fluorocytidine-3'-phosphate
  modified_base 17: mod_base = OTHER; note = 2'-O-methyladenosine-3'-phosphate
  modified_base 18: mod_base = OTHER; note = 2'-O-methyladenosine-3'-phosphate
  modified_base 19: mod_base = OTHER; note = 2'-O-methylguanosine-3'-phosphate
  modified_base 20: mod_base = OTHER; note = 2'-O-methylcytidine-3'-phosphate
  modified_base 21: mod_base = OTHER; note = 2'-O-methyluridine-3'-phosphorothioate
  modified_base 22: mod_base = OTHER; note = 2'-O-methylguanosine-3'-phosphorothioate
  modified_base 23: mod_base = OTHER; note = 2'-O-methyladenosine-3'-phosphate
taaagatatagattccaagctga

SEQ ID NO: 4095 - RNA, 23 nt, synthetic construct
  source 1..23: mol_type = other RNA
  modified_base 1: mod_base = OTHER; note = Vinyl-phosphonate 2'-O-methyluridine-3'-phosphorothioate
  modified_base 2: mod_base = OTHER; note = 2'-fluorouridine -3'-phosphorothioate
  modified_base 3: mod_base = OTHER; note = 2'-O-methyluridine-3'-phosphate
  modified_base 4: mod_base = OTHER; note = 2'-O-methyladenosine-3'-phosphate
  modified_base 5: mod_base = OTHER; note = 2'-O-methylguanosine-3'-phosphate
  modified_base 6: mod_base = OTHER; note = 2'-fluoroguanosine-3'-phosphate
  modified_base 7: mod_base = OTHER; note = 2'-O-methylcytidine-3'-phosphate
  modified_base 8: mod_base = OTHER; note = 2'-fluorouridine-3'-phosphate
  modified_base 9: mod_base = OTHER; note = 2'-fluorouridine-3'-phosphate
  modified_base 10: mod_base = OTHER; note = 2'-O-methylcytidine-3'-phosphate
  modified_base 11: mod_base = OTHER; note = 2'-O-methyladenosine-3'-phosphate
  modified_base 12: mod_base = OTHER; note = 2'-O-methylguanosine-3'-phosphate
  modified_base 13: mod_base = OTHER; note = 2'-O-methyladenosine-3'-phosphate
  modified_base 14: mod_base = OTHER; note = 2'-fluoroadenosine-3'-phosphate
  modified_base 15: mod_base = OTHER; note = 2'-O-methyladenosine-3'-phosphate
  modified_base 16: mod_base = OTHER; note = 2'-fluorouridine-3'-phosphate
  modified_base 17: mod_base = OTHER; note = 2'-O-methyladenosine-3'-phosphate
  modified_base 18: mod_base = OTHER; note = 2'-O-methyladenosine-3'-phosphate
  modified_base 19: mod_base = OTHER; note = 2'-O-methyluridine-3'-phosphate
  modified_base 20: mod_base = OTHER; note = 2'-O-methyladenosine-3'-phosphate
  modified_base 21: mod_base = OTHER; note = 2'-O-methyladenosine-3'-phosphorothioate
  modified_base 22: mod_base = OTHER; note = 2'-O-methylguanosine-3'-phosphorothioate
  modified_base 23: mod_base = OTHER; note = 2'-O-methyluridine-3'-phosphate
tttaggcttcagaaataataagt

SEQ ID NO: 4096 - RNA, 23 nt, synthetic construct
  source 1..23: mol_type = other RNA
  modified_base 1: mod_base = OTHER; note = Vinyl-phosphonate 2'-O-methyluridine-3'-phosphorothioate
  modified_base 2: mod_base = OTHER; note = 2'-fluorouridine -3'-phosphorothioate
  modified_base 3: mod_base = OTHER; note = 2'-O-methyluridine-3'-phosphate
  modified_base 4: mod_base = OTHER; note = 2'-O-methyluridine-3'-phosphate
  modified_base 5: mod_base = OTHER; note = 2'-O-methylguanosine-3'-phosphate
  modified_base 6: mod_base = OTHER; note = 2'-fluorouridine-3'-phosphate
  modified_base 7: mod_base = OTHER; note = 2'-O-methyluridine-3'-phosphate
  modified_base 8: mod_base = OTHER; note = 2'-fluoroadenosine-3'-phosphate
  modified_base 9: mod_base = OTHER; note = 2'-fluoroadenosine-3'-phosphate
  modified_base 10: mod_base = OTHER; note = 2'-O-methyladenosine-3'-phosphate
  modified_base 11: mod_base = OTHER; note = 2'-O-methyluridine-3'-phosphate
  modified_base 12: mod_base = OTHER; note = 2'-O-methyladenosine-3'-phosphate
  modified_base 13: mod_base = OTHER; note = 2'-O-methylcytidine-3'-phosphate
  modified_base 14: mod_base = OTHER; note = 2'-fluoroadenosine-3'-phosphate
  modified_base 15: mod_base = OTHER; note = 2'-O-methyladenosine-3'-phosphate
  modified_base 16: mod_base = OTHER; note = 2'-fluorocytidine-3'-phosphate
  modified_base 17: mod_base = OTHER; note = 2'-O-methyladenosine-3'-phosphate
  modified_base 18: mod_base = OTHER; note = 2'-O-methyladenosine-3'-phosphate
  modified_base 19: mod_base = OTHER; note = 2'-O-methyladenosine-3'-phosphate
  modified_base 20: mod_base = OTHER; note = 2'-O-methylguanosine-3'-phosphate
  modified_base 21: mod_base = OTHER; note = 2'-O-methylguanosine-3'-phosphorothioate
  modified_base 22: mod_base = OTHER; note = 2'-O-methyluridine-3'-phosphorothioate
  modified_base 23: mod_base = OTHER; note = 2'-O-methylcytidine-3'-phosphate
ttttgttaaatacaacaaaggtc

SEQ ID NO: 4097 - RNA, 23 nt, synthetic construct
  source 1..23: mol_type = other RNA
  modified_base 1: mod_base = OTHER; note = Vinyl-phosphonate 2'-O-methyluridine-3'-phosphorothioate
  modified_base 2: mod_base = OTHER; note = 2'-fluorouridine -3'-phosphorothioate
  modified_base 3: mod_base = OTHER; note = 2'-O-methylguanosine-3'-phosphate
  modified_base 4: mod_base = OTHER; note = 2'-O-methyladenosine-3'-phosphate
  modified_base 5: mod_base = OTHER; note = 2'-O-methyluridine-3'-phosphate
  modified_base 6: mod_base = OTHER; note = 2'-fluorocytidine-3'-phosphate
  modified_base 7: mod_base = OTHER; note = 2'-O-methylguanosine-3'-phosphate
  modified_base 8: mod_base = OTHER; note = 2'-fluoroadenosine-3'-phosphate
  modified_base 9: mod_base = OTHER; note = 2'-fluorouridine-3'-phosphate
  modified_base 10: mod_base = OTHER; note = 2'-O-methyluridine-3'-phosphate
  modified_base 11: mod_base = OTHER; note = 2'-O-methyladenosine-3'-phosphate
  modified_base 12: mod_base = OTHER; note = 2'-O-methylguanosine-3'-phosphate
  modified_base 13: mod_base = OTHER; note = 2'-O-methyluridine-3'-phosphate
  modified_base 14: mod_base = OTHER; note = 2'-fluorouridine-3'-phosphate
  modified_base 15: mod_base = OTHER; note = 2'-O-methyladenosine-3'-phosphate
  modified_base 16: mod_base = OTHER; note = 2'-fluoroguanosine-3'-phosphate
  modified_base 17: mod_base = OTHER; note = 2'-O-methyladenosine-3'-phosphate
  modified_base 18: mod_base = OTHER; note = 2'-O-methylguanosine-3'-phosphate
  modified_base 19: mod_base = OTHER; note = 2'-O-methyladenosine-3'-phosphate
  modified_base 20: mod_base = OTHER; note = 2'-O-methylguanosine-3'-phosphate
  modified_base 21: mod_base = OTHER; note = 2'-O-methylcytidine-3'-phosphorothioate
  modified_base 22: mod_base = OTHER; note = 2'-O-methylcytidine-3'-phosphorothioate
  modified_base 23: mod_base = OTHER; note = 2'-O-methyladenosine-3'-phosphate
ttgatcgattagttagagagcca

SEQ ID NO: 4098 - RNA, 23 nt, synthetic construct
  source 1..23: mol_type = other RNA
  modified_base 1: mod_base = OTHER; note = Vinyl-phosphonate 2'-O-methyluridine-3'-phosphorothioate
  modified_base 2: mod_base = OTHER; note = 2'-fluoroadenosine-3'-phosphorothioate
  modified_base 3: mod_base = OTHER; note = 2'-O-methyluridine-3'-phosphate
  modified_base 4: mod_base = OTHER; note = 2'-O-methyluridine-3'-phosphate
  modified_base 5: mod_base = OTHER; note = 2'-O-methyluridine-3'-phosphate
  modified_base 6: mod_base = OTHER; note = 2'-fluorocytidine-3'-phosphate
  modified_base 7: mod_base = OTHER; note = 2'-O-methyluridine-3'-phosphate
  modified_base 8: mod_base = OTHER; note = 2'-fluoroguanosine-3'-phosphate
  modified_base 9: mod_base = OTHER; note = 2'-fluorouridine-3'-phosphate
  modified_base 10: mod_base = OTHER; note = 2'-O-methylcytidine-3'-phosphate
  modified_base 11: mod_base = OTHER; note = 2'-O-methyladenosine-3'-phosphate
  modified_base 12: mod_base = OTHER; note = 2'-O-methyluridine-3'-phosphate
  modified_base 13: mod_base = OTHER; note = 2'-O-methylguanosine-3'-phosphate
  modified_base 14: mod_base = OTHER; note = 2'-fluorouridine-3'-phosphate
  modified_base 15: mod_base = OTHER; note = 2'-O-methyladenosine-3'-phosphate
  modified_base 16: mod_base = OTHER; note = 2'-fluoroguanosine-3'-phosphate
  modified_base 17: mod_base = OTHER; note = 2'-O-methyluridine-3'-phosphate
  modified_base 18: mod_base = OTHER; note = 2'-O-methylcytidine-3'-phosphate
  modified_base 19: mod_base = OTHER; note = 2'-O-methyluridine-3'-phosphate
  modified_base 20: mod_base = OTHER; note = 2'-O-methyluridine-3'-phosphate
  modified_base 21: mod_base = OTHER; note = 2'-O-methyluridine-3'-phosphorothioate
  modified_base 22: mod_base = OTHER; note = 2'-O-methyladenosine-3'-phosphorothioate
  modified_base 23: mod_base = OTHER; note = 2'-O-methylguanosine-3'-phosphate
tatttctgtcatgtagtctttag

SEQ ID NO: 4099 - RNA, 23 nt, synthetic construct
  source 1..23: mol_type = other RNA
  modified_base 1: mod_base = OTHER; note = Vinyl-phosphonate 2'-O-methyluridine-3'-phosphorothioate
  modified_base 2: mod_base = OTHER; note = 2'-fluorocytidine-3'-phosphorothioate
  modified_base 3: mod_base = OTHER; note = 2'-O-methyluridine-3'-phosphate
  modified_base 4: mod_base = OTHER; note = 2'-O-methyluridine-3'-phosphate
  modified_base 5: mod_base = OTHER; note = 2'-O-methyluridine-3'-phosphate
  modified_base 6: mod_base = OTHER; note = 2'-fluoroadenosine-3'-phosphate
  modified_base 7: mod_base = OTHER; note = 2'-O-methyladenosine-3'-phosphate
  modified_base 8: mod_base = OTHER; note = 2'-fluoroadenosine-3'-phosphate
  modified_base 9: mod_base = OTHER; note = 2'-fluoroadenosine-3'-phosphate
  modified_base 10: mod_base = OTHER; note = 2'-O-methyladenosine-3'-phosphate
  modified_base 11: mod_base = OTHER; note = 2'-O-methyluridine-3'-phosphate
  modified_base 12: mod_base = OTHER; note = 2'-O-methyladenosine-3'-phosphate
  modified_base 13: mod_base = OTHER; note = 2'-O-methylcytidine-3'-phosphate
  modified_base 14: mod_base = OTHER; note = 2'-fluoroguanosine-3'-phosphate
  modified_base 15: mod_base = OTHER; note = 2'-O-methyladenosine-3'-phosphate
  modified_base 16: mod_base = OTHER; note = 2'-fluoroadenosine-3'-phosphate
  modified_base 17: mod_base = OTHER; note = 2'-O-methyluridine-3'-phosphate
  modified_base 18: mod_base = OTHER; note = 2'-O-methylcytidine-3'-phosphate
  modified_base 19: mod_base = OTHER; note = 2'-O-methylcytidine-3'-phosphate
  modified_base 20: mod_base = OTHER; note = 2'-O-methyluridine-3'-phosphate
  modified_base 21: mod_base = OTHER; note = 2'-O-methylguanosine-3'-phosphorothioate
  modified_base 22: mod_base = OTHER; note = 2'-O-methyladenosine-3'-phosphorothioate
  modified_base 23: mod_base = OTHER; note = 2'-O-methylguanosine-3'-phosphate
tctttaaaaatacgaatcctgag

SEQ ID NO: 4100 - RNA, 23 nt, synthetic construct
  source 1..23: mol_type = other RNA
  modified_base 1: mod_base = OTHER; note = Vinyl-phosphonate 2'-O-methyluridine-3'-phosphorothioate
  modified_base 2: mod_base = OTHER; note = 2'-fluoroadenosine-3'-phosphorothioate
  modified_base 3: mod_base = OTHER; note = 2'-O-methyluridine-3'-phosphate
  modified_base 4: mod_base = OTHER; note = 2'-O-methylguanosine-3'-phosphate
  modified_base 5: mod_base = OTHER; note = 2'-O-methyluridine-3'-phosphate
  modified_base 6: mod_base = OTHER; note = 2'-fluorocytidine-3'-phosphate
  modified_base 7: mod_base = OTHER; note = 2'-O-methyladenosine-3'-phosphate
  modified_base 8: mod_base = OTHER; note = 2'-fluoroadenosine-3'-phosphate
  modified_base 9: mod_base = OTHER; note = 2'-fluorouridine-3'-phosphate
  modified_base 10: mod_base = OTHER; note = 2'-O-methyluridine-3'-phosphate
  modified_base 11: mod_base = OTHER; note = 2'-O-methyladenosine-3'-phosphate
  modified_base 12: mod_base = OTHER; note = 2'-O-methylcytidine-3'-phosphate
  modified_base 13: mod_base = OTHER; note = 2'-O-methyluridine-3'-phosphate
  modified_base 14: mod_base = OTHER; note = 2'-fluorouridine-3'-phosphate
  modified_base 15: mod_base = OTHER; note = 2'-O-methyladenosine-3'-phosphate
  modified_base 16: mod_base = OTHER; note = 2'-fluoroguanosine-3'-phosphate
  modified_base 17: mod_base = OTHER; note = 2'-O-methylcytidine-3'-phosphate
  modified_base 18: mod_base = OTHER; note = 2'-O-methyladenosine-3'-phosphate
  modified_base 19: mod_base = OTHER; note = 2'-O-methyladenosine-3'-phosphate
  modified_base 20: mod_base = OTHER; note = 2'-O-methylguanosine-3'-phosphate
  modified_base 21: mod_base = OTHER; note = 2'-O-methylguanosine-3'-phosphorothioate
  modified_base 22: mod_base = OTHER; note = 2'-O-methylguanosine-3'-phosphorothioate
  modified_base 23: mod_base = OTHER; note = 2'-O-methyluridine-3'-phosphate
tatgtcaattacttagcaagggt

SEQ ID NO: 4101 - RNA, 23 nt, synthetic construct
  source 1..23: mol_type = other RNA
  modified_base 1: mod_base = OTHER; note = Vinyl-phosphonate 2'-O-methyluridine-3'-phosphorothioate
  modified_base 2: mod_base = OTHER; note = 2'-fluorouridine -3'-phosphorothioate
  modified_base 3: mod_base = OTHER; note = 2'-O-methyluridine-3'-phosphate
  modified_base 4: mod_base = OTHER; note = 2'-O-methylcytidine-3'-phosphate
  modified_base 5: mod_base = OTHER; note = 2'-O-methylcytidine-3'-phosphate
  modified_base 6: mod_base = OTHER; note = 2'-fluorouridine-3'-phosphate
  modified_base 7: mod_base = OTHER; note = 2'-O-methylguanosine-3'-phosphate
  modified_base 8: mod_base = OTHER; note = 2'-fluorouridine-3'-phosphate
  modified_base 9: mod_base = OTHER; note = 2'-fluoroguanosine-3'-phosphate
  modified_base 10: mod_base = OTHER; note = 2'-O-methyladenosine-3'-phosphate
  modified_base 11: mod_base = OTHER; note = 2'-O-methyladenosine-3'-phosphate
  modified_base 12: mod_base = OTHER; note = 2'-O-methyladenosine-3'-phosphate
  modified_base 13: mod_base = OTHER; note = 2'-O-methylguanosine-3'-phosphate
  modified_base 14: mod_base = OTHER; note = 2'-fluorouridine-3'-phosphate
  modified_base 15: mod_base = OTHER; note = 2'-O-methylguanosine-3'-phosphate
  modified_base 16: mod_base = OTHER; note = 2'-fluorocytidine-3'-phosphate
  modified_base 17: mod_base = OTHER; note = 2'-O-methyladenosine-3'-phosphate
  modified_base 18: mod_base = OTHER; note = 2'-O-methyluridine-3'-phosphate
  modified_base 19: mod_base = OTHER; note = 2'-O-methyladenosine-3'-phosphate
  modified_base 20: mod_base = OTHER; note = 2'-O-methylguanosine-3'-phosphate
  modified_base 21: mod_base = OTHER; note = 2'-O-methylguanosine-3'-phosphorothioate
  modified_base 22: mod_base = OTHER; note = 2'-O-methyladenosine-3'-phosphorothioate
  modified_base 23: mod_base = OTHER; note = 2'-O-methylguanosine-3'-phosphate
tttcctgtgaaagtgcataggag

SEQ ID NO: 4102 - RNA, 23 nt, synthetic construct
  source 1..23: mol_type = other RNA
  modified_base 1: mod_base = OTHER; note = Vinyl-phosphonate 2'-O-methyluridine-3'-phosphorothioate
  modified_base 2: mod_base = OTHER; note = 2'-fluoroguanosine-3'-phosphorothioate
  modified_base 3: mod_base = OTHER; note = 2'-O-methyluridine-3'-phosphate
  modified_base 4: mod_base = OTHER; note = 2'-O-methyluridine-3'-phosphate
  modified_base 5: mod_base = OTHER; note = 2'-O-methylguanosine-3'-phosphate
  modified_base 6: mod_base = OTHER; note = 2'-fluoroadenosine-3'-phosphate
  modified_base 7: mod_base = OTHER; note = 2'-O-methyladenosine-3'-phosphate
  modified_base 8: mod_base = OTHER; note = 2'-fluoroadenosine-3'-phosphate
  modified_base 9: mod_base = OTHER; note = 2'-fluorocytidine-3'-phosphate
  modified_base 10: mod_base = OTHER; note = 2'-O-methyladenosine-3'-phosphate
  modified_base 11: mod_base = OTHER; note = 2'-O-methyluridine-3'-phosphate
  modified_base 12: mod_base = OTHER; note = 2'-O-methyladenosine-3'-phosphate
  modified_base 13: mod_base = OTHER; note = 2'-O-methyluridine-3'-phosphate
  modified_base 14: mod_base = OTHER; note = 2'-fluorouridine-3'-phosphate
  modified_base 15: mod_base = OTHER; note = 2'-O-methyluridine-3'-phosphate
  modified_base 16: mod_base = OTHER; note = 2'-fluorocytidine-3'-phosphate
  modified_base 17: mod_base = OTHER; note = 2'-O-methyladenosine-3'-phosphate
  modified_base 18: mod_base = OTHER; note = 2'-O-methylguanosine-3'-phosphate
  modified_base 19: mod_base = OTHER; note = 2'-O-methylcytidine-3'-phosphate
  modified_base 20: mod_base = OTHER; note = 2'-O-methyladenosine-3'-phosphate
  modified_base 21: mod_base = OTHER; note = 2'-O-methyluridine-3'-phosphorothioate
  modified_base 22: mod_base = OTHER; note = 2'-O-methyluridine-3'-phosphorothioate
  modified_base 23: mod_base = OTHER; note = 2'-O-methyluridine-3'-phosphate
tgttgaaacatatttcagcattt

SEQ ID NO: 4103 - RNA, 23 nt, synthetic construct
  source 1..23: mol_type = other RNA
  modified_base 1: mod_base = OTHER; note = Vinyl-phosphonate 2'-O-methyluridine-3'-phosphorothioate
  modified_base 2: mod_base = OTHER; note = 2'-fluoroadenosine-3'-phosphorothioate
  modified_base 3: mod_base = OTHER; note = 2'-O-methylguanosine-3'-phosphate
  modified_base 4: mod_base = OTHER; note = 2'-O-methyluridine-3'-phosphate
  modified_base 5: mod_base = OTHER; note = 2'-O-methyladenosine-3'-phosphate
  modified_base 6: mod_base = OTHER; note = 2'-fluoroguanosine-3'-phosphate
  modified_base 7: mod_base = OTHER; note = 2'-O-methyladenosine-3'-phosphate
  modified_base 8: mod_base = OTHER; note = 2'-fluorouridine-3'-phosphate
  modified_base 9: mod_base = OTHER; note = 2'-fluorouridine-3'-phosphate
  modified_base 10: mod_base = OTHER; note = 2'-O-methyluridine-3'-phosphate
  modified_base 11: mod_base = OTHER; note = 2'-O-methylguanosine-3'-phosphate
  modified_base 12: mod_base = OTHER; note = 2'-O-methyladenosine-3'-phosphate
  modified_base 13: mod_base = OTHER; note = 2'-O-methyladenosine-3'-phosphate
  modified_base 14: mod_base = OTHER; note = 2'-fluorouridine-3'-phosphate
  modified_base 15: mod_base = OTHER; note = 2'-O-methyluridine-3'-phosphate
  modified_base 16: mod_base = OTHER; note = 2'-fluoroadenosine-3'-phosphate
  modified_base 17: mod_base = OTHER; note = 2'-O-methyladenosine-3'-phosphate
  modified_base 18: mod_base = OTHER; note = 2'-O-methyladenosine-3'-phosphate
  modified_base 19: mod_base = OTHER; note = 2'-O-methyladenosine-3'-phosphate
  modified_base 20: mod_base = OTHER; note = 2'-O-methylguanosine-3'-phosphate
  modified_base 21: mod_base = OTHER; note = 2'-O-methylguanosine-3'-phosphorothioate
  modified_base 22: mod_base = OTHER; note = 2'-O-methylcytidine-3'-phosphorothioate
  modified_base 23: mod_base = OTHER; note = 2'-O-methylcytidine-3'-phosphate
tagtagatttgaattaaaaggcc

SEQ ID NO: 4104 - RNA, 23 nt, synthetic construct
  source 1..23: mol_type = other RNA
  modified_base 1: mod_base = OTHER; note = Vinyl-phosphonate 2'-O-methyluridine-3'-phosphorothioate
  modified_base 2: mod_base = OTHER; note = 2'-fluorouridine -3'-phosphorothioate
  modified_base 3: mod_base = OTHER; note = 2'-O-methyluridine-3'-phosphate
  modified_base 4: mod_base = OTHER; note = 2'-O-methyladenosine-3'-phosphate
  modified_base 5: mod_base = OTHER; note = 2'-O-methyladenosine-3'-phosphate
  modified_base 6: mod_base = OTHER; note = 2'-fluoroadenosine-3'-phosphate
  modified_base 7: mod_base = OTHER; note = 2'-O-methyluridine-3'-phosphate
  modified_base 8: mod_base = OTHER; note = 2'-fluorocytidine-3'-phosphate
  modified_base 9: mod_base = OTHER; note = 2'-fluorocytidine-3'-phosphate
  modified_base 10: mod_base = OTHER; note = 2'-O-methyladenosine-3'-phosphate
  modified_base 11: mod_base = OTHER; note = 2'-O-methyladenosine-3'-phosphate
  modified_base 12: mod_base = OTHER; note = 2'-O-methyluridine-3'-phosphate
  modified_base 13: mod_base = OTHER; note = 2'-O-methyladenosine-3'-phosphate
  modified_base 14: mod_base = OTHER; note = 2'-fluoroadenosine-3'-phosphate
  modified_base 15: mod_base = OTHER; note = 2'-O-methylguanosine-3'-phosphate
  modified_base 16: mod_base = OTHER; note = 2'-fluorouridine-3'-phosphate
  modified_base 17: mod_base = OTHER; note = 2'-O-methylcytidine-3'-phosphate
  modified_base 18: mod_base = OTHER; note = 2'-O-methylcytidine-3'-phosphate
  modified_base 19: mod_base = OTHER; note = 2'-O-methyladenosine-3'-phosphate
  modified_base 20: mod_base = OTHER; note = 2'-O-methylguanosine-3'-phosphate
  modified_base 21: mod_base = OTHER; note = 2'-O-methyluridine-3'-phosphorothioate
  modified_base 22: mod_base = OTHER; note = 2'-O-methyladenosine-3'-phosphorothioate
  modified_base 23: mod_base = OTHER; note = 2'-O-methyluridine-3'-phosphate
tttaaatccaataagtccagtat

SEQ ID NO: 4105 - RNA, 23 nt, synthetic construct
  source 1..23: mol_type = other RNA
  modified_base 1: mod_base = OTHER; note = Vinyl-phosphonate 2'-O-methyluridine-3'-phosphorothioate
  modified_base 2: mod_base = OTHER; note = 2'-fluorouridine -3'-phosphorothioate
  modified_base 3: mod_base = OTHER; note = 2'-O-methylguanosine-3'-phosphate
  modified_base 4: mod_base = OTHER; note = 2'-O-methyluridine-3'-phosphate
  modified_base 5: mod_base = OTHER; note = 2'-O-methyladenosine-3'-phosphate
  modified_base 6: mod_base = OTHER; note = 2'-fluorocytidine-3'-phosphate
  modified_base 7: mod_base = OTHER; note = 2'-O-methylcytidine-3'-phosphate
  modified_base 8: mod_base = OTHER; note = 2'-fluoroadenosine-3'-phosphate
  modified_base 9: mod_base = OTHER; note = 2'-fluorouridine-3'-phosphate
  modified_base 10: mod_base = OTHER; note = 2'-O-methylcytidine-3'-phosphate
  modified_base 11: mod_base = OTHER; note = 2'-O-methyluridine-3'-phosphate
  modified_base 12: mod_base = OTHER; note = 2'-O-methylguanosine-3'-phosphate
  modified_base 13: mod_base = OTHER; note = 2'-O-methyladenosine-3'-phosphate
  modified_base 14: mod_base = OTHER; note = 2'-fluorouridine-3'-phosphate
  modified_base 15: mod_base = OTHER; note = 2'-O-methyluridine-3'-phosphate
  modified_base 16: mod_base = OTHER; note = 2'-fluorocytidine-3'-phosphate
  modified_base 17: mod_base = OTHER; note = 2'-O-methyladenosine-3'-phosphate
  modified_base 18: mod_base = OTHER; note = 2'-O-methylguanosine-3'-phosphate
  modified_base 19: mod_base = OTHER; note = 2'-O-methyladenosine-3'-phosphate
  modified_base 20: mod_base = OTHER; note = 2'-O-methyluridine-3'-phosphate
  modified_base 21: mod_base = OTHER; note = 2'-O-methylguanosine-3'-phosphorothioate
  modified_base 22: mod_base = OTHER; note = 2'-O-methyluridine-3'-phosphorothioate
  modified_base 23: mod_base = OTHER; note = 2'-O-methyluridine-3'-phosphate
ttgtaccatctgattcagatgtt

SEQ ID NO: 4106 - RNA, 23 nt, synthetic construct
  source 1..23: mol_type = other RNA
  modified_base 1: mod_base = OTHER; note = Vinyl-phosphonate 2'-O-methyluridine-3'-phosphorothioate
  modified_base 2: mod_base = OTHER; note = 2'-fluorocytidine-3'-phosphorothioate
  modified_base 3: mod_base = OTHER; note = 2'-O-methyladenosine-3'-phosphate
  modified_base 4: mod_base = OTHER; note = 2'-O-methylcytidine-3'-phosphate
  modified_base 5: mod_base = OTHER; note = 2'-O-methyladenosine-3'-phosphate
  modified_base 6: mod_base = OTHER; note = 2'-fluoroguanosine-3'-phosphate
  modified_base 7: mod_base = OTHER; note = 2'-O-methyladenosine-3'-phosphate
  modified_base 8: mod_base = OTHER; note = 2'-fluorouridine-3'-phosphate
  modified_base 9: mod_base = OTHER; note = 2'-fluorouridine-3'-phosphate
  modified_base 10: mod_base = OTHER; note = 2'-O-methylguanosine-3'-phosphate
  modified_base 11: mod_base = OTHER; note = 2'-O-methylcytidine-3'-phosphate
  modified_base 12: mod_base = OTHER; note = 2'-O-methyluridine-3'-phosphate
  modified_base 13: mod_base = OTHER; note = 2'-O-methyladenosine-3'-phosphate
  modified_base 14: mod_base = OTHER; note = 2'-fluorouridine-3'-phosphate
  modified_base 15: mod_base = OTHER; note = 2'-O-methylcytidine-3'-phosphate
  modified_base 16: mod_base = OTHER; note = 2'-fluoroadenosine-3'-phosphate
  modified_base 17: mod_base = OTHER; note = 2'-O-methylguanosine-3'-phosphate
  modified_base 18: mod_base = OTHER; note = 2'-O-methyladenosine-3'-phosphate
  modified_base 19: mod_base = OTHER; note = 2'-O-methyladenosine-3'-phosphate
  modified_base 20: mod_base = OTHER; note = 2'-O-methyluridine-3'-phosphate
  modified_base 21: mod_base = OTHER; note = 2'-O-methyluridine-3'-phosphorothioate
  modified_base 22: mod_base = OTHER; note = 2'-O-methyluridine-3'-phosphorothioate
  modified_base 23: mod_base = OTHER; note = 2'-O-methylcytidine-3'-phosphate
tcacagattgctatcagaatttc

SEQ ID NO: 4107 - RNA, 23 nt, synthetic construct
  source 1..23: mol_type = other RNA
  modified_base 1: mod_base = OTHER; note = Vinyl-phosphonate 2'-O-methyluridine-3'-phosphorothioate
  modified_base 2: mod_base = OTHER; note = 2'-fluoroadenosine-3'-phosphorothioate
  modified_base 3: mod_base = OTHER; note = 2'-O-methylguanosine-3'-phosphate
  modified_base 4: mod_base = OTHER; note = 2'-O-methyladenosine-3'-phosphate
  modified_base 5: mod_base = OTHER; note = 2'-O-methyluridine-3'-phosphate
  modified_base 6: mod_base = OTHER; note = 2'-fluoroadenosine-3'-phosphate
  modified_base 7: mod_base = OTHER; note = 2'-O-methylguanosine-3'-phosphate
  modified_base 8: mod_base = OTHER; note = 2'-fluorocytidine-3'-phosphate
  modified_base 9: mod_base = OTHER; note = 2'-fluoroadenosine-3'-phosphate
  modified_base 10: mod_base = OTHER; note = 2'-O-methyluridine-3'-phosphate
  modified_base 11: mod_base = OTHER; note = 2'-O-methylcytidine-3'-phosphate
  modified_base 12: mod_base = OTHER; note = 2'-O-methylcytidine-3'-phosphate
  modified_base 13: mod_base = OTHER; note = 2'-O-methyluridine-3'-phosphate
  modified_base 14: mod_base = OTHER; note = 2'-fluorouridine-3'-phosphate
  modified_base 15: mod_base = OTHER; note = 2'-O-methylguanosine-3'-phosphate
  modified_base 16: mod_base = OTHER; note = 2'-fluoroadenosine-3'-phosphate
  modified_base 17: mod_base = OTHER; note = 2'-O-methylcytidine-3'-phosphate
  modified_base 18: mod_base = OTHER; note = 2'-O-methyluridine-3'-phosphate
  modified_base 19: mod_base = OTHER; note = 2'-O-methyluridine-3'-phosphate
  modified_base 20: mod_base = OTHER; note = 2'-O-methylguanosine-3'-phosphate
  modified_base 21: mod_base = OTHER; note = 2'-O-methyladenosine-3'-phosphorothioate
  modified_base 22: mod_base = OTHER; note = 2'-O-methyladenosine-3'-phosphorothioate
  modified_base 23: mod_base = OTHER; note = 2'-O-methyladenosine-3'-phosphate
tagatagcatccttgacttgaaa

SEQ ID NO: 4108 - RNA, 23 nt, synthetic construct
  source 1..23: mol_type = other RNA
  modified_base 1: mod_base = OTHER; note = Vinyl-phosphonate 2'-O-methyluridine-3'-phosphorothioate
  modified_base 2: mod_base = OTHER; note = 2'-fluorouridine -3'-phosphorothioate
  modified_base 3: mod_base = OTHER; note = 2'-O-methyladenosine-3'-phosphate
  modified_base 4: mod_base = OTHER; note = 2'-O-methyluridine-3'-phosphate
  modified_base 5: mod_base = OTHER; note = 2'-O-methylcytidine-3'-phosphate
  modified_base 6: mod_base = OTHER; note = 2'-fluorouridine-3'-phosphate
  modified_base 7: mod_base = OTHER; note = 2'-O-methyluridine-3'-phosphate
  modified_base 8: mod_base = OTHER; note = 2'-fluoroguanosine-3'-phosphate
  modified_base 9: mod_base = OTHER; note = 2'-fluorouridine-3'-phosphate
  modified_base 10: mod_base = OTHER; note = 2'-O-methylguanosine-3'-phosphate
  modified_base 11: mod_base = OTHER; note = 2'-O-methylguanosine-3'-phosphate
  modified_base 12: mod_base = OTHER; note = 2'-O-methyluridine-3'-phosphate
  modified_base 13: mod_base = OTHER; note = 2'-O-methyluridine-3'-phosphate
  modified_base 14: mod_base = OTHER; note = 2'-fluorouridine-3'-phosphate
  modified_base 15: mod_base = OTHER; note = 2'-O-methyluridine-3'-phosphate
  modified_base 16: mod_base = OTHER; note = 2'-fluorocytidine-3'-phosphate
  modified_base 17: mod_base = OTHER; note = 2'-O-methyladenosine-3'-phosphate
  modified_base 18: mod_base = OTHER; note = 2'-O-methylguanosine-3'-phosphate
  modified_base 19: mod_base = OTHER; note = 2'-O-methyluridine-3'-phosphate
  modified_base 20: mod_base = OTHER; note = 2'-O-methylguanosine-3'-phosphate
  modified_base 21: mod_base = OTHER; note = 2'-O-methyladenosine-3'-phosphorothioate
  modified_base 22: mod_base = OTHER; note = 2'-O-methylguanosine-3'-phosphorothioate
  modified_base 23: mod_base = OTHER; note = 2'-O-methylguanosine-3'-phosphate
ttatcttgtggttttcagtgagg

SEQ ID NO: 4109 - RNA, 23 nt, synthetic construct
  source 1..23: mol_type = other RNA
  modified_base 1: mod_base = OTHER; note = Vinyl-phosphonate 2'-O-methyluridine-3'-phosphorothioate
  modified_base 2: mod_base = OTHER; note = 2'-fluorouridine -3'-phosphorothioate
  modified_base 3: mod_base = OTHER; note = 2'-O-methyluridine-3'-phosphate
  modified_base 4: mod_base = OTHER; note = 2'-O-methylguanosine-3'-phosphate
  modified_base 5: mod_base = OTHER; note = 2'-O-methyladenosine-3'-phosphate
  modified_base 6: mod_base = OTHER; note = 2'-fluoroadenosine-3'-phosphate
  modified_base 7: mod_base = OTHER; note = 2'-O-methylguanosine-3'-phosphate
  modified_base 8: mod_base = OTHER; note = 2'-fluoroadenosine-3'-phosphate
  modified_base 9: mod_base = OTHER; note = 2'-fluorocytidine-3'-phosphate
  modified_base 10: mod_base = OTHER; note = 2'-O-methyluridine-3'-phosphate
  modified_base 11: mod_base = OTHER; note = 2'-O-methylguanosine-3'-phosphate
  modified_base 12: mod_base = OTHER; note = 2'-O-methyluridine-3'-phosphate
  modified_base 13: mod_base = OTHER; note = 2'-O-methyluridine-3'-phosphate
  modified_base 14: mod_base = OTHER; note = 2'-fluorocytidine-3'-phosphate
  modified_base 15: mod_base = OTHER; note = 2'-O-methyladenosine-3'-phosphate
  modified_base 16: mod_base = OTHER; note = 2'-fluoroadenosine-3'-phosphate
  modified_base 17: mod_base = OTHER; note = 2'-O-methylcytidine-3'-phosphate
  modified_base 18: mod_base = OTHER; note = 2'-O-methyladenosine-3'-phosphate
  modified_base 19: mod_base = OTHER; note = 2'-O-methylguanosine-3'-phosphate
  modified_base 20: mod_base = OTHER; note = 2'-O-methylguanosine-3'-phosphate
  modified_base 21: mod_base = OTHER; note = 2'-O-methyluridine-3'-phosphorothioate
  modified_base 22: mod_base = OTHER; note = 2'-O-methyladenosine-3'-phosphorothioate
  modified_base 23: mod_base = OTHER; note = 2'-O-methylguanosine-3'-phosphate
tttgaagactgttcaacaggtag

SEQ ID NO: 4110 - RNA, 23 nt, synthetic construct
  source 1..23: mol_type = other RNA
  modified_base 1: mod_base = OTHER; note = Vinyl-phosphonate 2'-O-methyluridine-3'-phosphorothioate
  modified_base 2: mod_base = OTHER; note = 2'-fluoroadenosine-3'-phosphorothioate
  modified_base 3: mod_base = OTHER; note = 2'-O-methyladenosine-3'-phosphate
  modified_base 4: mod_base = OTHER; note = 2'-O-methylcytidine-3'-phosphate
  modified_base 5: mod_base = OTHER; note = 2'-O-methyluridine-3'-phosphate
  modified_base 6: mod_base = OTHER; note = 2'-fluoroguanosine-3'-phosphate
  modified_base 7: mod_base = OTHER; note = 2'-O-methyladenosine-3'-phosphate
  modified_base 8: mod_base = OTHER; note = 2'-fluoroadenosine-3'-phosphate
  modified_base 9: mod_base = OTHER; note = 2'-fluoroadenosine-3'-phosphate
  modified_base 10: mod_base = OTHER; note = 2'-O-methyluridine-3'-phosphate
  modified_base 11: mod_base = OTHER; note = 2'-O-methyladenosine-3'-phosphate
  modified_base 12: mod_base = OTHER; note = 2'-O-methyluridine-3'-phosphate
  modified_base 13: mod_base = OTHER; note = 2'-O-methylguanosine-3'-phosphate
  modified_base 14: mod_base = OTHER; note = 2'-fluorouridine-3'-phosphate
  modified_base 15: mod_base = OTHER; note = 2'-O-methylcytidine-3'-phosphate
  modified_base 16: mod_base = OTHER; note = 2'-fluoroadenosine-3'-phosphate
  modified_base 17: mod_base = OTHER; note = 2'-O-methylcytidine-3'-phosphate
  modified_base 18: mod_base = OTHER; note = 2'-O-methyluridine-3'-phosphate
  modified_base 19: mod_base = OTHER; note = 2'-O-methyluridine-3'-phosphate
  modified_base 20: mod_base = OTHER; note = 2'-O-methylguanosine-3'-phosphate
  modified_base 21: mod_base = OTHER; note = 2'-O-methyladenosine-3'-phosphorothioate
  modified_base 22: mod_base = OTHER; note = 2'-O-methylguanosine-3'-phosphorothioate
  modified_base 23: mod_base = OTHER; note = 2'-O-methyluridine-3'-phosphate
taactgaaatatgtcacttgagt

SEQ ID NO: 4111 - RNA, 23 nt, synthetic construct
  source 1..23: mol_type = other RNA
  modified_base 1: mod_base = OTHER; note = Vinyl-phosphonate 2'-O-methyluridine-3'-phosphorothioate
  modified_base 2: mod_base = OTHER; note = 2'-fluoroadenosine-3'-phosphorothioate
  modified_base 3: mod_base = OTHER; note = 2'-O-methylguanosine-3'-phosphate
  modified_base 4: mod_base = OTHER; note = 2'-O-methylcytidine-3'-phosphate
  modified_base 5: mod_base = OTHER; note = 2'-O-methyladenosine-3'-phosphate
  modified_base 6: mod_base = OTHER; note = 2'-fluoroadenosine-3'-phosphate
  modified_base 7: mod_base = OTHER; note = 2'-O-methyluridine-3'-phosphate
  modified_base 8: mod_base = OTHER; note = 2'-fluorocytidine-3'-phosphate
  modified_base 9: mod_base = OTHER; note = 2'-fluorocytidine-3'-phosphate
  modified_base 10: mod_base = OTHER; note = 2'-O-methyluridine-3'-phosphate
  modified_base 11: mod_base = OTHER; note = 2'-O-methylguanosine-3'-phosphate
  modified_base 12: mod_base = OTHER; note = 2'-O-methyladenosine-3'-phosphate
  modified_base 13: mod_base = OTHER; note = 2'-O-methyladenosine-3'-phosphate
  modified_base 14: mod_base = OTHER; note = 2'-fluoroguanosine-3'-phosphate
  modified_base 15: mod_base = OTHER; note = 2'-O-methyluridine-3'-phosphate
  modified_base 16: mod_base = OTHER; note = 2'-fluorouridine-3'-phosphate
  modified_base 17: mod_base = OTHER; note = 2'-O-methylcytidine-3'-phosphate
  modified_base 18: mod_base = OTHER; note = 2'-O-methylcytidine-3'-phosphate
  modified_base 19: mod_base = OTHER; note = 2'-O-methyluridine-3'-phosphate
  modified_base 20: mod_base = OTHER; note = 2'-O-methylguanosine-3'-phosphate
  modified_base 21: mod_base = OTHER; note = 2'-O-methyladenosine-3'-phosphorothioate
  modified_base 22: mod_base = OTHER; note = 2'-O-methylguanosine-3'-phosphorothioate
  modified_base 23: mod_base = OTHER; note = 2'-O-methylcytidine-3'-phosphate
tagcaatcctgaagttcctgagc

SEQ ID NO: 4112 - RNA, 23 nt, synthetic construct
  source 1..23: mol_type = other RNA
  modified_base 1: mod_base = OTHER; note = Vinyl-phosphonate 2'-O-methyluridine-3'-phosphorothioate
  modified_base 2: mod_base = OTHER; note = 2'-fluorouridine -3'-phosphorothioate
  modified_base 3: mod_base = OTHER; note = 2'-O-methyluridine-3'-phosphate
  modified_base 4: mod_base = OTHER; note = 2'-O-methyladenosine-3'-phosphate
  modified_base 5: mod_base = OTHER; note = 2'-O-methyladenosine-3'-phosphate
  modified_base 6: mod_base = OTHER; note = 2'-fluoroguanosine-3'-phosphate
  modified_base 7: mod_base = OTHER; note = 2'-O-methylcytidine-3'-phosphate
  modified_base 8: mod_base = OTHER; note = 2'-fluorouridine-3'-phosphate
  modified_base 9: mod_base = OTHER; note = 2'-fluoroadenosine-3'-phosphate
  modified_base 10: mod_base = OTHER; note = 2'-O-methylcytidine-3'-phosphate
  modified_base 11: mod_base = OTHER; note = 2'-O-methyluridine-3'-phosphate
  modified_base 12: mod_base = OTHER; note = 2'-O-methyladenosine-3'-phosphate
  modified_base 13: mod_base = OTHER; note = 2'-O-methyladenosine-3'-phosphate
  modified_base 14: mod_base = OTHER; note = 2'-fluorouridine-3'-phosphate
  modified_base 15: mod_base = OTHER; note = 2'-O-methyladenosine-3'-phosphate
  modified_base 16: mod_base = OTHER; note = 2'-fluorocytidine-3'-phosphate
  modified_base 17: mod_base = OTHER; note = 2'-O-methyluridine-3'-phosphate
  modified_base 18: mod_base = OTHER; note = 2'-O-methylcytidine-3'-phosphate
  modified_base 19: mod_base = OTHER; note = 2'-O-methylcytidine-3'-phosphate
  modified_base 20: mod_base = OTHER; note = 2'-O-methylguanosine-3'-phosphate
  modified_base 21: mod_base = OTHER; note = 2'-O-methyluridine-3'-phosphorothioate
  modified_base 22: mod_base = OTHER; note = 2'-O-methyladenosine-3'-phosphorothioate
  modified_base 23: mod_base = OTHER; note = 2'-O-methylguanosine-3'-phosphate
tttaagctactaatactccgtag

SEQ ID NO: 4113 - RNA, 23 nt, synthetic construct
  source 1..23: mol_type = other RNA
  modified_base 1: mod_base = OTHER; note = Vinyl-phosphonate 2'-O-methyluridine-3'-phosphorothioate
  modified_base 2: mod_base = OTHER; note = 2'-fluorouridine -3'-phosphorothioate
  modified_base 3: mod_base = OTHER; note = 2'-O-methylcytidine-3'-phosphate
  modified_base 4: mod_base = OTHER; note = 2'-O-methyladenosine-3'-phosphate
  modified_base 5: mod_base = OTHER; note = 2'-O-methyluridine-3'-phosphate
  modified_base 6: mod_base = OTHER; note = 2'-fluoroadenosine-3'-phosphate
  modified_base 7: mod_base = OTHER; note = 2'-O-methyladenosine-3'-phosphate
  modified_base 8: mod_base = OTHER; note = 2'-fluoroadenosine-3'-phosphate
  modified_base 9: mod_base = OTHER; note = 2'-fluoroadenosine-3'-phosphate
  modified_base 10: mod_base = OTHER; note = 2'-O-methyluridine-3'-phosphate
  modified_base 11: mod_base = OTHER; note = 2'-O-methyluridine-3'-phosphate
  modified_base 12: mod_base = OTHER; note = 2'-O-methylcytidine-3'-phosphate
  modified_base 13: mod_base = OTHER; note = 2'-O-methyladenosine-3'-phosphate
  modified_base 14: mod_base = OTHER; note = 2'-fluorouridine-3'-phosphate
  modified_base 15: mod_base = OTHER; note = 2'-O-methyluridine-3'-phosphate
  modified_base 16: mod_base = OTHER; note = 2'-fluoroguanosine-3'-phosphate
  modified_base 17: mod_base = OTHER; note = 2'-O-methyladenosine-3'-phosphate
  modified_base 18: mod_base = OTHER; note = 2'-O-methylcytidine-3'-phosphate
  modified_base 19: mod_base = OTHER; note = 2'-O-methyladenosine-3'-phosphate
  modified_base 20: mod_base = OTHER; note = 2'-O-methyladenosine-3'-phosphate
  modified_base 21: mod_base = OTHER; note = 2'-O-methyluridine-3'-phosphorothioate
  modified_base 22: mod_base = OTHER; note = 2'-O-methylguanosine-3'-phosphorothioate
  modified_base 23: mod_base = OTHER; note = 2'-O-methylcytidine-3'-phosphate
ttcataaaattcattgacaatgc

SEQ ID NO: 4114 - RNA, 23 nt, synthetic construct
  source 1..23: mol_type = other RNA
  modified_base 1: mod_base = OTHER; note = Vinyl-phosphonate 2'-O-methyluridine-3'-phosphorothioate
  modified_base 2: mod_base = OTHER; note = 2'-fluorouridine -3'-phosphorothioate
  modified_base 3: mod_base = OTHER; note = 2'-O-methylcytidine-3'-phosphate
  modified_base 4: mod_base = OTHER; note = 2'-O-methyladenosine-3'-phosphate
  modified_base 5: mod_base = OTHER; note = 2'-O-methyladenosine-3'-phosphate
  modified_base 6: mod_base = OTHER; note = 2'-fluorouridine-3'-phosphate
  modified_base 7: mod_base = OTHER; note = 2'-O-methyladenosine-3'-phosphate
  modified_base 8: mod_base = OTHER; note = 2'-fluorouridine-3'-phosphate
  modified_base 9: mod_base = OTHER; note = 2'-fluorouridine-3'-phosphate
  modified_base 10: mod_base = OTHER; note = 2'-O-methyluridine-3'-phosphate
  modified_base 11: mod_base = OTHER; note = 2'-O-methylguanosine-3'-phosphate
  modified_base 12: mod_base = OTHER; note = 2'-O-methyluridine-3'-phosphate
  modified_base 13: mod_base = OTHER; note = 2'-O-methyluridine-3'-phosphate
  modified_base 14: mod_base = OTHER; note = 2'-fluorouridine-3'-phosphate
  modified_base 15: mod_base = OTHER; note = 2'-O-methylguanosine-3'-phosphate
  modified_base 16: mod_base = OTHER; note = 2'-fluorocytidine-3'-phosphate
  modified_base 17: mod_base = OTHER; note = 2'-O-methyluridine-3'-phosphate
  modified_base 18: mod_base = OTHER; note = 2'-O-methylguanosine-3'-phosphate
  modified_base 19: mod_base = OTHER; note = 2'-O-methyluridine-3'-phosphate
  modified_base 20: mod_base = OTHER; note = 2'-O-methyluridine-3'-phosphate
  modified_base 21: mod_base = OTHER; note = 2'-O-methylcytidine-3'-phosphorothioate
  modified_base 22: mod_base = OTHER; note = 2'-O-methyladenosine-3'-phosphorothioate
  modified_base 23: mod_base = OTHER; note = 2'-O-methylcytidine-3'-phosphate
ttcaatatttgtttgctgttcac

SEQ ID NO: 4115 - RNA, 23 nt, synthetic construct
  source 1..23: mol_type = other RNA
  modified_base 1: mod_base = OTHER; note = Vinyl-phosphonate 2'-O-methyluridine-3'-phosphorothioate
  modified_base 2: mod_base = OTHER; note = 2'-fluorouridine -3'-phosphorothioate
  modified_base 3: mod_base = OTHER; note = 2'-O-methyladenosine-3'-phosphate
  modified_base 4: mod_base = OTHER; note = 2'-O-methyladenosine-3'-phosphate
  modified_base 5: mod_base = OTHER; note = 2'-O-methyluridine-3'-phosphate
  modified_base 6: mod_base = OTHER; note = 2'-fluoroguanosine-3'-phosphate
  modified_base 7: mod_base = OTHER; note = 2'-O-methylcytidine-3'-phosphate
  modified_base 8: mod_base = OTHER; note = 2'-fluoroadenosine-3'-phosphate
  modified_base 9: mod_base = OTHER; note = 2'-fluorocytidine-3'-phosphate
  modified_base 10: mod_base = OTHER; note = 2'-O-methylguanosine-3'-phosphate
  modified_base 11: mod_base = OTHER; note = 2'-O-methyladenosine-3'-phosphate
  modified_base 12: mod_base = OTHER; note = 2'-O-methyladenosine-3'-phosphate
  modified_base 13: mod_base = OTHER; note = 2'-O-methyladenosine-3'-phosphate
  modified_base 14: mod_base = OTHER; note = 2'-fluoroadenosine-3'-phosphate
  modified_base 15: mod_base = OTHER; note = 2'-O-methyluridine-3'-phosphate
  modified_base 16: mod_base = OTHER; note = 2'-fluoroadenosine-3'-phosphate
  modified_base 17: mod_base = OTHER; note = 2'-O-methylguanosine-3'-phosphate
  modified_base 18: mod_base = OTHER; note = 2'-O-methyluridine-3'-phosphate
  modified_base 19: mod_base = OTHER; note = 2'-O-methyluridine-3'-phosphate
  modified_base 20: mod_base = OTHER; note = 2'-O-methylcytidine-3'-phosphate
  modified_base 21: mod_base = OTHER; note = 2'-O-methyladenosine-3'-phosphorothioate
  modified_base 22: mod_base = OTHER; note = 2'-O-methyluridine-3'-phosphorothioate
  modified_base 23: mod_base = OTHER; note = 2'-O-methyladenosine-3'-phosphate
ttaatgcacgaaaatagttcata

SEQ ID NO: 4116 - RNA, 23 nt, synthetic construct
  source 1..23: mol_type = other RNA
  modified_base 1: mod_base = OTHER; note = Vinyl-phosphonate 2'-O-methyluridine-3'-phosphorothioate
  modified_base 2: mod_base = OTHER; note = 2'-fluorouridine -3'-phosphorothioate
  modified_base 3: mod_base = OTHER; note = 2'-O-methylguanosine-3'-phosphate
  modified_base 4: mod_base = OTHER; note = 2'-O-methyladenosine-3'-phosphate
  modified_base 5: mod_base = OTHER; note = 2'-O-methyladenosine-3'-phosphate
  modified_base 6: mod_base = OTHER; note = 2'-fluoroadenosine-3'-phosphate
  modified_base 7: mod_base = OTHER; note = 2'-O-methyladenosine-3'-phosphate
  modified_base 8: mod_base = OTHER; note = 2'-fluoroadenosine-3'-phosphate
  modified_base 9: mod_base = OTHER; note = 2'-fluorouridine-3'-phosphate
  modified_base 10: mod_base = OTHER; note = 2'-O-methyladenosine-3'-phosphate
  modified_base 11: mod_base = OTHER; note = 2'-O-methyladenosine-3'-phosphate
  modified_base 12: mod_base = OTHER; note = 2'-O-methylguanosine-3'-phosphate
  modified_base 13: mod_base = OTHER; note = 2'-O-methyluridine-3'-phosphate
  modified_base 14: mod_base = OTHER; note = 2'-fluoroadenosine-3'-phosphate
  modified_base 15: mod_base = OTHER; note = 2'-O-methyluridine-3'-phosphate
  modified_base 16: mod_base = OTHER; note = 2'-fluorouridine-3'-phosphate
  modified_base 17: mod_base = OTHER; note = 2'-O-methylcytidine-3'-phosphate
  modified_base 18: mod_base = OTHER; note = 2'-O-methylcytidine-3'-phosphate
  modified_base 19: mod_base = OTHER; note = 2'-O-methyladenosine-3'-phosphate
  modified_base 20: mod_base = OTHER; note = 2'-O-methylguanosine-3'-phosphate
  modified_base 21: mod_base = OTHER; note = 2'-O-methyluridine-3'-phosphorothioate
  modified_base 22: mod_base = OTHER; note = 2'-O-methyluridine-3'-phosphorothioate
  modified_base 23: mod_base = OTHER; note = 2'-O-methylcytidine-3'-phosphate
ttgaaaaataagtattccagttc

SEQ ID NO: 4117 - RNA, 23 nt, synthetic construct
  source 1..23: mol_type = other RNA
  modified_base 1: mod_base = OTHER; note = Vinyl-phosphonate 2'-O-methyluridine-3'-phosphorothioate
  modified_base 2: mod_base = OTHER; note = 2'-fluorocytidine-3'-phosphorothioate
  modified_base 3: mod_base = OTHER; note = 2'-O-methyladenosine-3'-phosphate
  modified_base 4: mod_base = OTHER; note = 2'-O-methylguanosine-3'-phosphate
  modified_base 5: mod_base = OTHER; note = 2'-O-methyladenosine-3'-phosphate
  modified_base 6: mod_base = OTHER; note = 2'-fluoroguanosine-3'-phosphate
  modified_base 7: mod_base = OTHER; note = 2'-O-methyladenosine-3'-phosphate
  modified_base 8: mod_base = OTHER; note = 2'-fluorouridine-3'-phosphate
  modified_base 9: mod_base = OTHER; note = 2'-fluorocytidine-3'-phosphate
  modified_base 10: mod_base = OTHER; note = 2'-O-methyluridine-3'-phosphate
  modified_base 11: mod_base = OTHER; note = 2'-O-methylcytidine-3'-phosphate
  modified_base 12: mod_base = OTHER; note = 2'-O-methyluridine-3'-phosphate
  modified_base 13: mod_base = OTHER; note = 2'-O-methylguanosine-3'-phosphate
  modified_base 14: mod_base = OTHER; note = 2'-fluorocytidine-3'-phosphate
  modified_base 15: mod_base = OTHER; note = 2'-O-methyladenosine-3'-phosphate
  modified_base 16: mod_base = OTHER; note = 2'-fluoroadenosine-3'-phosphate
  modified_base 17: mod_base = OTHER; note = 2'-O-methylguanosine-3'-phosphate
  modified_base 18: mod_base = OTHER; note = 2'-O-methyladenosine-3'-phosphate
  modified_base 19: mod_base = OTHER; note = 2'-O-methyluridine-3'-phosphate
  modified_base 20: mod_base = OTHER; note = 2'-O-methyladenosine-3'-phosphate
  modified_base 21: mod_base = OTHER; note = 2'-O-methyladenosine-3'-phosphorothioate
  modified_base 22: mod_base = OTHER; note = 2'-O-methylcytidine-3'-phosphorothioate
  modified_base 23: mod_base = OTHER; note = 2'-O-methylguanosine-3'-phosphate
tcagagatctctgcaagataacg

SEQ ID NO: 4118 - RNA, 23 nt, synthetic construct
  source 1..23: mol_type = other RNA
  modified_base 1: mod_base = OTHER; note = Vinyl-phosphonate 2'-O-methyluridine-3'-phosphorothioate
  modified_base 2: mod_base = OTHER; note = 2'-fluoroadenosine-3'-phosphorothioate
  modified_base 3: mod_base = OTHER; note = 2'-O-methyluridine-3'-phosphate
  modified_base 4: mod_base = OTHER; note = 2'-O-methylcytidine-3'-phosphate
  modified_base 5: mod_base = OTHER; note = 2'-O-methyladenosine-3'-phosphate
  modified_base 6: mod_base = OTHER; note = 2'-fluoroadenosine-3'-phosphate
  modified_base 7: mod_base = OTHER; note = 2'-O-methyladenosine-3'-phosphate
  modified_base 8: mod_base = OTHER; note = 2'-fluoroadenosine-3'-phosphate
  modified_base 9: mod_base = OTHER; note = 2'-fluoroadenosine-3'-phosphate
  modified_base 10: mod_base = OTHER; note = 2'-O-methyluridine-3'-phosphate
  modified_base 11: mod_base = OTHER; note = 2'-O-methyluridine-3'-phosphate
  modified_base 12: mod_base = OTHER; note = 2'-O-methylcytidine-3'-phosphate
  modified_base 13: mod_base = OTHER; note = 2'-O-methyluridine-3'-phosphate
  modified_base 14: mod_base = OTHER; note = 2'-fluoroadenosine-3'-phosphate
  modified_base 15: mod_base = OTHER; note = 2'-O-methyladenosine-3'-phosphate
  modified_base 16: mod_base = OTHER; note = 2'-fluorocytidine-3'-phosphate
  modified_base 17: mod_base = OTHER; note = 2'-O-methyladenosine-3'-phosphate
  modified_base 18: mod_base = OTHER; note = 2'-O-methylcytidine-3'-phosphate
  modified_base 19: mod_base = OTHER; note = 2'-O-methyluridine-3'-phosphate
  modified_base 20: mod_base = OTHER; note = 2'-O-methyluridine-3'-phosphate
  modified_base 21: mod_base = OTHER; note = 2'-O-methylcytidine-3'-phosphorothioate
  modified_base 22: mod_base = OTHER; note = 2'-O-methylcytidine-3'-phosphorothioate
  modified_base 23: mod_base = OTHER; note = 2'-O-methyladenosine-3'-phosphate
tatcaaaaattctaacacttcca

SEQ ID NO: 4119 - RNA, 23 nt, synthetic construct
  source 1..23: mol_type = other RNA
  modified_base 1: mod_base = OTHER; note = Vinyl-phosphonate 2'-O-methyluridine-3'-phosphorothioate
  modified_base 2: mod_base = OTHER; note = 2'-fluorouridine -3'-phosphorothioate
  modified_base 3: mod_base = OTHER; note = 2'-O-methyluridine-3'-phosphate
  modified_base 4: mod_base = OTHER; note = 2'-O-methylcytidine-3'-phosphate
  modified_base 5: mod_base = OTHER; note = 2'-O-methylcytidine-3'-phosphate
  modified_base 6: mod_base = OTHER; note = 2'-fluoroadenosine-3'-phosphate
  modified_base 7: mod_base = OTHER; note = 2'-O-methylguanosine-3'-phosphate
  modified_base 8: mod_base = OTHER; note = 2'-fluoroadenosine-3'-phosphate
  modified_base 9: mod_base = OTHER; note = 2'-fluoroguanosine-3'-phosphate
  modified_base 10: mod_base = OTHER; note = 2'-O-methyladenosine-3'-phosphate
  modified_base 11: mod_base = OTHER; note = 2'-O-methyluridine-3'-phosphate
  modified_base 12: mod_base = OTHER; note = 2'-O-methylcytidine-3'-phosphate
  modified_base 13: mod_base = OTHER; note = 2'-O-methyluridine-3'-phosphate
  modified_base 14: mod_base = OTHER; note = 2'-fluorouridine-3'-phosphate
  modified_base 15: mod_base = OTHER; note = 2'-O-methyladenosine-3'-phosphate
  modified_base 16: mod_base = OTHER; note = 2'-fluoroadenosine-3'-phosphate
  modified_base 17: mod_base = OTHER; note = 2'-O-methyladenosine-3'-phosphate
  modified_base 18: mod_base = OTHER; note = 2'-O-methyluridine-3'-phosphate
  modified_base 19: mod_base = OTHER; note = 2'-O-methyluridine-3'-phosphate
  modified_base 20: mod_base = OTHER; note = 2'-O-methylguanosine-3'-phosphate
  modified_base 21: mod_base = OTHER; note = 2'-O-methyladenosine-3'-phosphorothioate
  modified_base 22: mod_base = OTHER; note = 2'-O-methyluridine-3'-phosphorothioate
  modified_base 23: mod_base = OTHER; note = 2'-O-methyladenosine-3'-phosphate
tttccagagatcttaaattgata

SEQ ID NO: 4120 - RNA, 23 nt, synthetic construct
  source 1..23: mol_type = other RNA
  modified_base 1: mod_base = OTHER; note = Vinyl-phosphonate 2'-O-methyluridine-3'-phosphorothioate
  modified_base 2: mod_base = OTHER; note = 2'-fluoroadenosine-3'-phosphorothioate
  modified_base 3: mod_base = OTHER; note = 2'-O-methyladenosine-3'-phosphate
  modified_base 4: mod_base = OTHER; note = 2'-O-methylcytidine-3'-phosphate
  modified_base 5: mod_base = OTHER; note = 2'-O-methyladenosine-3'-phosphate
  modified_base 6: mod_base = OTHER; note = 2'-fluorouridine-3'-phosphate
  modified_base 7: mod_base = OTHER; note = 2'-O-methyluridine-3'-phosphate
  modified_base 8: mod_base = OTHER; note = 2'-fluoroguanosine-3'-phosphate
  modified_base 9: mod_base = OTHER; note = 2'-fluorouridine-3'-phosphate
  modified_base 10: mod_base = OTHER; note = 2'-O-methyladenosine-3'-phosphate
  modified_base 11: mod_base = OTHER; note = 2'-O-methyladenosine-3'-phosphate
  modified_base 12: mod_base = OTHER; note = 2'-O-methyladenosine-3'-phosphate
  modified_base 13: mod_base = OTHER; note = 2'-O-methyluridine-3'-phosphate
  modified_base 14: mod_base = OTHER; note = 2'-fluoroadenosine-3'-phosphate
  modified_base 15: mod_base = OTHER; note = 2'-O-methyluridine-3'-phosphate
  modified_base 16: mod_base = OTHER; note = 2'-fluoroguanosine-3'-phosphate
  modified_base 17: mod_base = OTHER; note = 2'-O-methylguanosine-3'-phosphate
  modified_base 18: mod_base = OTHER; note = 2'-O-methyluridine-3'-phosphate
  modified_base 19: mod_base = OTHER; note = 2'-O-methylcytidine-3'-phosphate
  modified_base 20: mod_base = OTHER; note = 2'-O-methylcytidine-3'-phosphate
  modified_base 21: mod_base = OTHER; note = 2'-O-methyladenosine-3'-phosphorothioate
  modified_base 22: mod_base = OTHER; note = 2'-O-methyluridine-3'-phosphorothioate
  modified_base 23: mod_base = OTHER; note = 2'-O-methyluridine-3'-phosphate
taacattgtaaatatggtccatt

SEQ ID NO: 4121 - RNA, 23 nt, synthetic construct
  source 1..23: mol_type = other RNA
  modified_base 1: mod_base = OTHER; note = Vinyl-phosphonate 2'-O-methyluridine-3'-phosphorothioate
  modified_base 2: mod_base = OTHER; note = 2'-fluoroadenosine-3'-phosphorothioate
  modified_base 3: mod_base = OTHER; note = 2'-O-methyladenosine-3'-phosphate
  modified_base 4: mod_base = OTHER; note = 2'-O-methylguanosine-3'-phosphate
  modified_base 5: mod_base = OTHER; note = 2'-O-methylguanosine-3'-phosphate
  modified_base 6: mod_base = OTHER; note = 2'-fluoroadenosine-3'-phosphate
  modified_base 7: mod_base = OTHER; note = 2'-O-methyluridine-3'-phosphate
  modified_base 8: mod_base = OTHER; note = 2'-fluorouridine-3'-phosphate
  modified_base 9: mod_base = OTHER; note = 2'-fluoroguanosine-3'-phosphate
  modified_base 10: mod_base = OTHER; note = 2'-O-methylcytidine-3'-phosphate
  modified_base 11: mod_base = OTHER; note = 2'-O-methyluridine-3'-phosphate
  modified_base 12: mod_base = OTHER; note = 2'-O-methyluridine-3'-phosphate
  modified_base 13: mod_base = OTHER; note = 2'-O-methylcytidine-3'-phosphate
  modified_base 14: mod_base = OTHER; note = 2'-fluoroadenosine-3'-phosphate
  modified_base 15: mod_base = OTHER; note = 2'-O-methyladenosine-3'-phosphate
  modified_base 16: mod_base = OTHER; note = 2'-fluorouridine-3'-phosphate
  modified_base 17: mod_base = OTHER; note = 2'-O-methylguanosine-3'-phosphate
  modified_base 18: mod_base = OTHER; note = 2'-O-methyladenosine-3'-phosphate
  modified_base 19: mod_base = OTHER; note = 2'-O-methylcytidine-3'-phosphate
  modified_base 20: mod_base = OTHER; note = 2'-O-methyluridine-3'-phosphate
  modified_base 21: mod_base = OTHER; note = 2'-O-methyladenosine-3'-phosphorothioate
  modified_base 22: mod_base = OTHER; note = 2'-O-methyladenosine-3'-phosphorothioate
  modified_base 23: mod_base = OTHER; note = 2'-O-methyladenosine-3'-phosphate
taaggattgcttcaatgactaaa

SEQ ID NO: 4122 - RNA, 23 nt, synthetic construct
  source 1..23: mol_type = other RNA
  modified_base 1: mod_base = OTHER; note = Vinyl-phosphonate 2'-O-methyluridine-3'-phosphorothioate
  modified_base 2: mod_base = OTHER; note = 2'-fluoroadenosine-3'-phosphorothioate
  modified_base 3: mod_base = OTHER; note = 2'-O-methyluridine-3'-phosphate
  modified_base 4: mod_base = OTHER; note = 2'-O-methyluridine-3'-phosphate
  modified_base 5: mod_base = OTHER; note = 2'-O-methylguanosine-3'-phosphate
  modified_base 6: mod_base = OTHER; note = 2'-fluorouridine-3'-phosphate
  modified_base 7: mod_base = OTHER; note = 2'-O-methyluridine-3'-phosphate
  modified_base 8: mod_base = OTHER; note = 2'-fluoroadenosine-3'-phosphate
  modified_base 9: mod_base = OTHER; note = 2'-fluoroadenosine-3'-phosphate
  modified_base 10: mod_base = OTHER; note = 2'-O-methyladenosine-3'-phosphate
  modified_base 11: mod_base = OTHER; note = 2'-O-methylcytidine-3'-phosphate
  modified_base 12: mod_base = OTHER; note = 2'-O-methylcytidine-3'-phosphate
  modified_base 13: mod_base = OTHER; note = 2'-O-methyluridine-3'-phosphate
  modified_base 14: mod_base = OTHER; note = 2'-fluoroadenosine-3'-phosphate
  modified_base 15: mod_base = OTHER; note = 2'-O-methyladenosine-3'-phosphate
  modified_base 16: mod_base = OTHER; note = 2'-fluoroadenosine-3'-phosphate
  modified_base 17: mod_base = OTHER; note = 2'-O-methylcytidine-3'-phosphate
  modified_base 18: mod_base = OTHER; note = 2'-O-methyladenosine-3'-phosphate
  modified_base 19: mod_base = OTHER; note = 2'-O-methylguanosine-3'-phosphate
  modified_base 20: mod_base = OTHER; note = 2'-O-methylcytidine-3'-phosphate
  modified_base 21: mod_base = OTHER; note = 2'-O-methyluridine-3'-phosphorothioate
  modified_base 22: mod_base = OTHER; note = 2'-O-methyluridine-3'-phosphorothioate
  modified_base 23: mod_base = OTHER; note = 2'-O-methyluridine-3'-phosphate
tattgttaaacctaaacagcttt

SEQ ID NO: 4123 - RNA, 23 nt, synthetic construct
  source 1..23: mol_type = other RNA
  modified_base 1: mod_base = OTHER; note = Vinyl-phosphonate 2'-O-methyluridine-3'-phosphorothioate
  modified_base 2: mod_base = OTHER; note = 2'-fluorouridine -3'-phosphorothioate
  modified_base 3: mod_base = OTHER; note = 2'-O-methyladenosine-3'-phosphate
  modified_base 4: mod_base = OTHER; note = 2'-O-methyluridine-3'-phosphate
  modified_base 5: mod_base = OTHER; note = 2'-O-methyluridine-3'-phosphate
  modified_base 6: mod_base = OTHER; note = 2'-fluorouridine-3'-phosphate
  modified_base 7: mod_base = OTHER; note = 2'-O-methyladenosine-3'-phosphate
  modified_base 8: mod_base = OTHER; note = 2'-fluorocytidine-3'-phosphate
  modified_base 9: mod_base = OTHER; note = 2'-fluoroadenosine-3'-phosphate
  modified_base 10: mod_base = OTHER; note = 2'-O-methyluridine-3'-phosphate
  modified_base 11: mod_base = OTHER; note = 2'-O-methylcytidine-3'-phosphate
  modified_base 12: mod_base = OTHER; note = 2'-O-methyladenosine-3'-phosphate
  modified_base 13: mod_base = OTHER; note = 2'-O-methyluridine-3'-phosphate
  modified_base 14: mod_base = OTHER; note = 2'-fluorouridine-3'-phosphate
  modified_base 15: mod_base = OTHER; note = 2'-O-methyluridine-3'-phosphate
  modified_base 16: mod_base = OTHER; note = 2'-fluoroguanosine-3'-phosphate
  modified_base 17: mod_base = OTHER; note = 2'-O-methylcytidine-3'-phosphate
  modified_base 18: mod_base = OTHER; note = 2'-O-methylcytidine-3'-phosphate
  modified_base 19: mod_base = OTHER; note = 2'-O-methyluridine-3'-phosphate
  modified_base 20: mod_base = OTHER; note = 2'-O-methyluridine-3'-phosphate
  modified_base 21: mod_base = OTHER; note = 2'-O-methylguanosine-3'-phosphorothioate
  modified_base 22: mod_base = OTHER; note = 2'-O-methylguanosine-3'-phosphorothioate
  modified_base 23: mod_base = OTHER; note = 2'-O-methylcytidine-3'-phosphate
ttatttacatcatttgccttggc

SEQ ID NO: 4124 - RNA, 23 nt, synthetic construct
  source 1..23: mol_type = other RNA
  modified_base 1: mod_base = OTHER; note = Vinyl-phosphonate 2'-O-methyluridine-3'-phosphorothioate
  modified_base 2: mod_base = OTHER; note = 2'-fluoroguanosine-3'-phosphorothioate
  modified_base 3: mod_base = OTHER; note = 2'-O-methyluridine-3'-phosphate
  modified_base 4: mod_base = OTHER; note = 2'-O-methyluridine-3'-phosphate
  modified_base 5: mod_base = OTHER; note = 2'-O-methyluridine-3'-phosphate
  modified_base 6: mod_base = OTHER; note = 2'-fluorocytidine-3'-phosphate
  modified_base 7: mod_base = OTHER; note = 2'-O-methylcytidine-3'-phosphate
  modified_base 8: mod_base = OTHER; note = 2'-fluoroadenosine-3'-phosphate
  modified_base 9: mod_base = OTHER; note = 2'-fluoroguanosine-3'-phosphate
  modified_base 10: mod_base = OTHER; note = 2'-O-methyluridine-3'-phosphate
  modified_base 11: mod_base = OTHER; note = 2'-O-methyladenosine-3'-phosphate
  modified_base 12: mod_base = OTHER; note = 2'-O-methylguanosine-3'-phosphate
  modified_base 13: mod_base = OTHER; note = 2'-O-methyluridine-3'-phosphate
  modified_base 14: mod_base = OTHER; note = 2'-fluoroadenosine-3'-phosphate
  modified_base 15: mod_base = OTHER; note = 2'-O-methyladenosine-3'-phosphate
  modified_base 16: mod_base = OTHER; note = 2'-fluorouridine-3'-phosphate
  modified_base 17: mod_base = OTHER; note = 2'-O-methyluridine-3'-phosphate
  modified_base 18: mod_base = OTHER; note = 2'-O-methylguanosine-3'-phosphate
  modified_base 19: mod_base = OTHER; note = 2'-O-methylguanosine-3'-phosphate
  modified_base 20: mod_base = OTHER; note = 2'-O-methyladenosine-3'-phosphate
  modified_base 21: mod_base = OTHER; note = 2'-O-methyluridine-3'-phosphorothioate
  modified_base 22: mod_base = OTHER; note = 2'-O-methyluridine-3'-phosphorothioate
  modified_base 23: mod_base = OTHER; note = 2'-O-methyluridine-3'-phosphate
tgtttccagtagtaattggattt

SEQ ID NO: 4125 - RNA, 23 nt, synthetic construct
  source 1..23: mol_type = other RNA
  modified_base 1: mod_base = OTHER; note = Vinyl-phosphonate 2'-O-methyluridine-3'-phosphorothioate
  modified_base 2: mod_base = OTHER; note = 2'-fluoroadenosine-3'-phosphorothioate
  modified_base 3: mod_base = OTHER; note = 2'-O-methylguanosine-3'-phosphate
  modified_base 4: mod_base = OTHER; note = 2'-O-methylguanosine-3'-phosphate
  modified_base 5: mod_base = OTHER; note = 2'-O-methyladenosine-3'-phosphate
  modified_base 6: mod_base = OTHER; note = 2'-fluorouridine-3'-phosphate
  modified_base 7: mod_base = OTHER; note = 2'-O-methyladenosine-3'-phosphate
  modified_base 8: mod_base = OTHER; note = 2'-fluorouridine-3'-phosphate
  modified_base 9: mod_base = OTHER; note = 2'-fluoroadenosine-3'-phosphate
  modified_base 10: mod_base = OTHER; note = 2'-O-methyluridine-3'-phosphate
  modified_base 11: mod_base = OTHER; note = 2'-O-methyladenosine-3'-phosphate
  modified_base 12: mod_base = OTHER; note = 2'-O-methyluridine-3'-phosphate
  modified_base 13: mod_base = OTHER; note = 2'-O-methyladenosine-3'-phosphate
  modified_base 14: mod_base = OTHER; note = 2'-fluorouridine-3'-phosphate
  modified_base 15: mod_base = OTHER; note = 2'-O-methyluridine-3'-phosphate
  modified_base 16: mod_base = OTHER; note = 2'-fluoroguanosine-3'-phosphate
  modified_base 17: mod_base = OTHER; note = 2'-O-methyluridine-3'-phosphate
  modified_base 18: mod_base = OTHER; note = 2'-O-methyladenosine-3'-phosphate
  modified_base 19: mod_base = OTHER; note = 2'-O-methyladenosine-3'-phosphate
  modified_base 20: mod_base = OTHER; note = 2'-O-methylguanosine-3'-phosphate
  modified_base 21: mod_base = OTHER; note = 2'-O-methyluridine-3'-phosphorothioate
  modified_base 22: mod_base = OTHER; note = 2'-O-methylguanosine-3'-phosphorothioate
  modified_base 23: mod_base = OTHER; note = 2'-O-methylcytidine-3'-phosphate
taggatatatatattgtaagtgc

SEQ ID NO: 4126 - RNA, 23 nt, synthetic construct
  source 1..23: mol_type = other RNA
  modified_base 1: mod_base = OTHER; note = Vinyl-phosphonate 2'-O-methyluridine-3'-phosphorothioate
  modified_base 2: mod_base = OTHER; note = 2'-fluorouridine -3'-phosphorothioate
  modified_base 3: mod_base = OTHER; note = 2'-O-methylguanosine-3'-phosphate
  modified_base 4: mod_base = OTHER; note = 2'-O-methyluridine-3'-phosphate
  modified_base 5: mod_base = OTHER; note = 2'-O-methylcytidine-3'-phosphate
  modified_base 6: mod_base = OTHER; note = 2'-fluoroadenosine-3'-phosphate
  modified_base 7: mod_base = OTHER; note = 2'-O-methylguanosine-3'-phosphate
  modified_base 8: mod_base = OTHER; note = 2'-fluoroadenosine-3'-phosphate
  modified_base 9: mod_base = OTHER; note = 2'-fluorouridine-3'-phosphate
  modified_base 10: mod_base = OTHER; note = 2'-O-methyladenosine-3'-phosphate
  modified_base 11: mod_base = OTHER; note = 2'-O-methylcytidine-3'-phosphate
  modified_base 12: mod_base = OTHER; note = 2'-O-methylcytidine-3'-phosphate
  modified_base 13: mod_base = OTHER; note = 2'-O-methyladenosine-3'-phosphate
  modified_base 14: mod_base = OTHER; note = 2'-fluoroadenosine-3'-phosphate
  modified_base 15: mod_base = OTHER; note = 2'-O-methyladenosine-3'-phosphate
  modified_base 16: mod_base = OTHER; note = 2'-fluorocytidine-3'-phosphate
  modified_base 17: mod_base = OTHER; note = 2'-O-methyluridine-3'-phosphate
  modified_base 18: mod_base = OTHER; note = 2'-O-methylguanosine-3'-phosphate
  modified_base 19: mod_base = OTHER; note = 2'-O-methylcytidine-3'-phosphate
  modified_base 20: mod_base = OTHER; note = 2'-O-methyladenosine-3'-phosphate
  modified_base 21: mod_base = OTHER; note = 2'-O-methyluridine-3'-phosphorothioate
  modified_base 22: mod_base = OTHER; note = 2'-O-methylguanosine-3'-phosphorothioate
  modified_base 23: mod_base = OTHER; note = 2'-O-methyluridine-3'-phosphate
ttgtcagataccaaactgcatgt

SEQ ID NO: 4127 - RNA, 23 nt, synthetic construct
  source 1..23: mol_type = other RNA
  modified_base 1: mod_base = OTHER; note = Vinyl-phosphonate 2'-O-methyluridine-3'-phosphorothioate
  modified_base 2: mod_base = OTHER; note = 2'-fluoroadenosine-3'-phosphorothioate
  modified_base 3: mod_base = OTHER; note = 2'-O-methylcytidine-3'-phosphate
  modified_base 4: mod_base = OTHER; note = 2'-O-methylcytidine-3'-phosphate
  modified_base 5: mod_base = OTHER; note = 2'-O-methyladenosine-3'-phosphate
  modified_base 6: mod_base = OTHER; note = 2'-fluoroguanosine-3'-phosphate
  modified_base 7: mod_base = OTHER; note = 2'-O-methyluridine-3'-phosphate
  modified_base 8: mod_base = OTHER; note = 2'-fluoroguanosine-3'-phosphate
  modified_base 9: mod_base = OTHER; note = 2'-fluorouridine-3'-phosphate
  modified_base 10: mod_base = OTHER; note = 2'-O-methylcytidine-3'-phosphate
  modified_base 11: mod_base = OTHER; note = 2'-O-methyluridine-3'-phosphate
  modified_base 12: mod_base = OTHER; note = 2'-O-methyluridine-3'-phosphate
  modified_base 13: mod_base = OTHER; note = 2'-O-methylguanosine-3'-phosphate
  modified_base 14: mod_base = OTHER; note = 2'-fluoroadenosine-3'-phosphate
  modified_base 15: mod_base = OTHER; note = 2'-O-methyladenosine-3'-phosphate
  modified_base 16: mod_base = OTHER; note = 2'-fluoroadenosine-3'-phosphate
  modified_base 17: mod_base = OTHER; note = 2'-O-methyluridine-3'-phosphate
  modified_base 18: mod_base = OTHER; note = 2'-O-methyladenosine-3'-phosphate
  modified_base 19: mod_base = OTHER; note = 2'-O-methyladenosine-3'-phosphate
  modified_base 20: mod_base = OTHER; note = 2'-O-methylguanosine-3'-phosphate
  modified_base 21: mod_base = OTHER; note = 2'-O-methylguanosine-3'-phosphorothioate
  modified_base 22: mod_base = OTHER; note = 2'-O-methyluridine-3'-phosphorothioate
  modified_base 23: mod_base = OTHER; note = 2'-O-methyladenosine-3'-phosphate
taccagtgtcttgaaataaggta

SEQ ID NO: 4128 - RNA, 23 nt, synthetic construct
  source 1..23: mol_type = other RNA
  modified_base 1: mod_base = OTHER; note = Vinyl-phosphonate 2'-O-methyluridine-3'-phosphorothioate
  modified_base 2: mod_base = OTHER; note = 2'-fluoroadenosine-3'-phosphorothioate
  modified_base 3: mod_base = OTHER; note = 2'-O-methylcytidine-3'-phosphate
  modified_base 4: mod_base = OTHER; note = 2'-O-methyluridine-3'-phosphate
  modified_base 5: mod_base = OTHER; note = 2'-O-methyladenosine-3'-phosphate
  modified_base 6: mod_base = OTHER; note = 2'-fluoroadenosine-3'-phosphate
  modified_base 7: mod_base = OTHER; note = 2'-O-methyladenosine-3'-phosphate
  modified_base 8: mod_base = OTHER; note = 2'-fluoroguanosine-3'-phosphate
  modified_base 9: mod_base = OTHER; note = 2'-fluoroadenosine-3'-phosphate
  modified_base 10: mod_base = OTHER; note = 2'-O-methyladenosine-3'-phosphate
  modified_base 11: mod_base = OTHER; note = 2'-O-methyluridine-3'-phosphate
  modified_base 12: mod_base = OTHER; note = 2'-O-methyladenosine-3'-phosphate
  modified_base 13: mod_base = OTHER; note = 2'-O-methyladenosine-3'-phosphate
  modified_base 14: mod_base = OTHER; note = 2'-fluoroadenosine-3'-phosphate
  modified_base 15: mod_base = OTHER; note = 2'-O-methyluridine-3'-phosphate
  modified_base 16: mod_base = OTHER; note = 2'-fluorocytidine-3'-phosphate
  modified_base 17: mod_base = OTHER; note = 2'-O-methylcytidine-3'-phosphate
  modified_base 18: mod_base = OTHER; note = 2'-O-methylcytidine-3'-phosphate
  modified_base 19: mod_base = OTHER; note = 2'-O-methyluridine-3'-phosphate
  modified_base 20: mod_base = OTHER; note = 2'-O-methyluridine-3'-phosphate
  modified_base 21: mod_base = OTHER; note = 2'-O-methylcytidine-3'-phosphorothioate
  modified_base 22: mod_base = OTHER; note = 2'-O-methyladenosine-3'-phosphorothioate
  modified_base 23: mod_base = OTHER; note = 2'-O-methyluridine-3'-phosphate
tactaaagaataaatcccttcat

SEQ ID NO: 4129 - RNA, 23 nt, synthetic construct
  source 1..23: mol_type = other RNA
  modified_base 1: mod_base = OTHER; note = Vinyl-phosphonate 2'-O-methyluridine-3'-phosphorothioate
  modified_base 2: mod_base = OTHER; note = 2'-fluorouridine -3'-phosphorothioate
  modified_base 3: mod_base = OTHER; note = 2'-O-methyluridine-3'-phosphate
  modified_base 4: mod_base = OTHER; note = 2'-O-methyladenosine-3'-phosphate
  modified_base 5: mod_base = OTHER; note = 2'-O-methyladenosine-3'-phosphate
  modified_base 6: mod_base = OTHER; note = 2'-fluoroguanosine-3'-phosphate
  modified_base 7: mod_base = OTHER; note = 2'-O-methyladenosine-3'-phosphate
  modified_base 8: mod_base = OTHER; note = 2'-fluorouridine-3'-phosphate
  modified_base 9: mod_base = OTHER; note = 2'-fluorocytidine-3'-phosphate
  modified_base 10: mod_base = OTHER; note = 2'-O-methylcytidine-3'-phosphate
  modified_base 11: mod_base = OTHER; note = 2'-O-methylguanosine-3'-phosphate
  modified_base 12: mod_base = OTHER; note = 2'-O-methyluridine-3'-phosphate
  modified_base 13: mod_base = OTHER; note = 2'-O-methyladenosine-3'-phosphate
  modified_base 14: mod_base = OTHER; note = 2'-fluoroguanosine-3'-phosphate
  modified_base 15: mod_base = OTHER; note = 2'-O-methylcytidine-3'-phosphate
  modified_base 16: mod_base = OTHER; note = 2'-fluoroadenosine-3'-phosphate
  modified_base 17: mod_base = OTHER; note = 2'-O-methyladenosine-3'-phosphate
  modified_base 18: mod_base = OTHER; note = 2'-O-methylguanosine-3'-phosphate
  modified_base 19: mod_base = OTHER; note = 2'-O-methylguanosine-3'-phosphate
  modified_base 20: mod_base = OTHER; note = 2'-O-methyladenosine-3'-phosphate
  modified_base 21: mod_base = OTHER; note = 2'-O-methyluridine-3'-phosphorothioate
  modified_base 22: mod_base = OTHER; note = 2'-O-methyluridine-3'-phosphorothioate
  modified_base 23: mod_base = OTHER; note = 2'-O-methylguanosine-3'-phosphate
tttaagatccgtagcaaggattg

SEQ ID NO: 4130 - RNA, 23 nt, synthetic construct
  source 1..23: mol_type = other RNA
  modified_base 1: mod_base = OTHER; note = Vinyl-phosphonate 2'-O-methyluridine-3'-phosphorothioate
  modified_base 2: mod_base = OTHER; note = 2'-fluorouridine -3'-phosphorothioate
  modified_base 3: mod_base = OTHER; note = 2'-O-methyluridine-3'-phosphate
  modified_base 4: mod_base = OTHER; note = 2'-O-methyluridine-3'-phosphate
  modified_base 5: mod_base = OTHER; note = 2'-O-methylguanosine-3'-phosphate
  modified_base 6: mod_base = OTHER; note = 2'-fluorocytidine-3'-phosphate
  modified_base 7: mod_base = OTHER; note = 2'-O-methyluridine-3'-phosphate
  modified_base 8: mod_base = OTHER; note = 2'-fluorouridine-3'-phosphate
  modified_base 9: mod_base = OTHER; note = 2'-fluorocytidine-3'-phosphate
  modified_base 10: mod_base = OTHER; note = 2'-O-methylguanosine-3'-phosphate
  modified_base 11: mod_base = OTHER; note = 2'-O-methylguanosine-3'-phosphate
  modified_base 12: mod_base = OTHER; note = 2'-O-methylguanosine-3'-phosphate
  modified_base 13: mod_base = OTHER; note = 2'-O-methyladenosine-3'-phosphate
  modified_base 14: mod_base = OTHER; note = 2'-fluorouridine-3'-phosphate
  modified_base 15: mod_base = OTHER; note = 2'-O-methyladenosine-3'-phosphate
  modified_base 16: mod_base = OTHER; note = 2'-fluoroguanosine-3'-phosphate
  modified_base 17: mod_base = OTHER; note = 2'-O-methyluridine-3'-phosphate
  modified_base 18: mod_base = OTHER; note = 2'-O-methylcytidine-3'-phosphate
  modified_base 19: mod_base = OTHER; note = 2'-O-methyladenosine-3'-phosphate
  modified_base 20: mod_base = OTHER; note = 2'-O-methylguanosine-3'-phosphate
  modified_base 21: mod_base = OTHER; note = 2'-O-methyluridine-3'-phosphorothioate
  modified_base 22: mod_base = OTHER; note = 2'-O-methyladenosine-3'-phosphorothioate
  modified_base 23: mod_base = OTHER; note = 2'-O-methylguanosine-3'-phosphate
ttttgcttcgggatagtcagtag

SEQ ID NO: 4131 - RNA, 23 nt, synthetic construct
  source 1..23: mol_type = other RNA
  modified_base 1: mod_base = OTHER; note = Vinyl-phosphonate 2'-O-methyluridine-3'-phosphorothioate
  modified_base 2: mod_base = OTHER; note = 2'-fluoroguanosine-3'-phosphorothioate
  modified_base 3: mod_base = OTHER; note = 2'-O-methyladenosine-3'-phosphate
  modified_base 4: mod_base = OTHER; note = 2'-O-methyladenosine-3'-phosphate
  modified_base 5: mod_base = OTHER; note = 2'-O-methyladenosine-3'-phosphate
  modified_base 6: mod_base = OTHER; note = 2'-fluorouridine-3'-phosphate
  modified_base 7: mod_base = OTHER; note = 2'-O-methyladenosine-3'-phosphate
  modified_base 8: mod_base = OTHER; note = 2'-fluoroadenosine-3'-phosphate
  modified_base 9: mod_base = OTHER; note = 2'-fluorouridine-3'-phosphate
  modified_base 10: mod_base = OTHER; note = 2'-O-methyladenosine-3'-phosphate
  modified_base 11: mod_base = OTHER; note = 2'-O-methylguanosine-3'-phosphate
  modified_base 12: mod_base = OTHER; note = 2'-O-methylcytidine-3'-phosphate
  modified_base 13: mod_base = OTHER; note = 2'-O-methyladenosine-3'-phosphate
  modified_base 14: mod_base = OTHER; note = 2'-fluoroguanosine-3'-phosphate
  modified_base 15: mod_base = OTHER; note = 2'-O-methyladenosine-3'-phosphate
  modified_base 16: mod_base = OTHER; note = 2'-fluoroadenosine-3'-phosphate
  modified_base 17: mod_base = OTHER; note = 2'-O-methyladenosine-3'-phosphate
  modified_base 18: mod_base = OTHER; note = 2'-O-methyluridine-3'-phosphate
  modified_base 19: mod_base = OTHER; note = 2'-O-methyladenosine-3'-phosphate
  modified_base 20: mod_base = OTHER; note = 2'-O-methylcytidine-3'-phosphate
  modified_base 21: mod_base = OTHER; note = 2'-O-methyladenosine-3'-phosphorothioate
  modified_base 22: mod_base = OTHER; note = 2'-O-methylcytidine-3'-phosphorothioate
  modified_base 23: mod_base = OTHER; note = 2'-O-methyluridine-3'-phosphate
tgaaataatagcagaaatacact

SEQ ID NO: 4132 - RNA, 23 nt, synthetic construct
  source 1..23: mol_type = other RNA
  modified_base 1: mod_base = OTHER; note = Vinyl-phosphonate 2'-O-methyluridine-3'-phosphorothioate
  modified_base 2: mod_base = OTHER; note = 2'-fluorouridine -3'-phosphorothioate
  modified_base 3: mod_base = OTHER; note = 2'-O-methyluridine-3'-phosphate
  modified_base 4: mod_base = OTHER; note = 2'-O-methyladenosine-3'-phosphate
  modified_base 5: mod_base = OTHER; note = 2'-O-methylguanosine-3'-phosphate
  modified_base 6: mod_base = OTHER; note = 2'-fluoroguanosine-3'-phosphate
  modified_base 7: mod_base = OTHER; note = 2'-O-methylcytidine-3'-phosphate
  modified_base 8: mod_base = OTHER; note = 2'-fluorouridine-3'-phosphate
  modified_base 9: mod_base = OTHER; note = 2'-fluoroadenosine-3'-phosphate
  modified_base 10: mod_base = OTHER; note = 2'-O-methylguanosine-3'-phosphate
  modified_base 11: mod_base = OTHER; note = 2'-O-methyluridine-3'-phosphate
  modified_base 12: mod_base = OTHER; note = 2'-O-methyluridine-3'-phosphate
  modified_base 13: mod_base = OTHER; note = 2'-O-methyladenosine-3'-phosphate
  modified_base 14: mod_base = OTHER; note = 2'-fluorouridine-3'-phosphate
  modified_base 15: mod_base = OTHER; note = 2'-O-methyluridine-3'-phosphate
  modified_base 16: mod_base = OTHER; note = 2'-fluoroguanosine-3'-phosphate
  modified_base 17: mod_base = OTHER; note = 2'-O-methyluridine-3'-phosphate
  modified_base 18: mod_base = OTHER; note = 2'-O-methyluridine-3'-phosphate
  modified_base 19: mod_base = OTHER; note = 2'-O-methyladenosine-3'-phosphate
  modified_base 20: mod_base = OTHER; note = 2'-O-methylcytidine-3'-phosphate
  modified_base 21: mod_base = OTHER; note = 2'-O-methyladenosine-3'-phosphorothioate
  modified_base 22: mod_base = OTHER; note = 2'-O-methyluridine-3'-phosphorothioate
  modified_base 23: mod_base = OTHER; note = 2'-O-methyladenosine-3'-phosphate
tttaggctagttattgttacata

SEQ ID NO: 4133 - RNA, 23 nt, synthetic construct
  source 1..23: mol_type = other RNA
  modified_base 1: mod_base = OTHER; note = Vinyl-phosphonate 2'-O-methyluridine-3'-phosphorothioate
  modified_base 2: mod_base = OTHER; note = 2'-fluorouridine -3'-phosphorothioate
  modified_base 3: mod_base = OTHER; note = 2'-O-methylguanosine-3'-phosphate
  modified_base 4: mod_base = OTHER; note = 2'-O-methyladenosine-3'-phosphate
  modified_base 5: mod_base = OTHER; note = 2'-O-methylguanosine-3'-phosphate
  modified_base 6: mod_base = OTHER; note = 2'-fluorocytidine-3'-phosphate
  modified_base 7: mod_base = OTHER; note = 2'-O-methyluridine-3'-phosphate
  modified_base 8: mod_base = OTHER; note = 2'-fluoroadenosine-3'-phosphate
  modified_base 9: mod_base = OTHER; note = 2'-fluoroguanosine-3'-phosphate
  modified_base 10: mod_base = OTHER; note = 2'-O-methyladenosine-3'-phosphate
  modified_base 11: mod_base = OTHER; note = 2'-O-methylguanosine-3'-phosphate
  modified_base 12: mod_base = OTHER; note = 2'-O-methyluridine-3'-phosphate
  modified_base 13: mod_base = OTHER; note = 2'-O-methyladenosine-3'-phosphate
  modified_base 14: mod_base = OTHER; note = 2'-fluoroadenosine-3'-phosphate
  modified_base 15: mod_base = OTHER; note = 2'-O-methyladenosine-3'-phosphate
  modified_base 16: mod_base = OTHER; note = 2'-fluoroadenosine-3'-phosphate
  modified_base 17: mod_base = OTHER; note = 2'-O-methyladenosine-3'-phosphate
  modified_base 18: mod_base = OTHER; note = 2'-O-methylcytidine-3'-phosphate
  modified_base 19: mod_base = OTHER; note = 2'-O-methyladenosine-3'-phosphate
  modified_base 20: mod_base = OTHER; note = 2'-O-methyladenosine-3'-phosphate
  modified_base 21: mod_base = OTHER; note = 2'-O-methylcytidine-3'-phosphorothioate
  modified_base 22: mod_base = OTHER; note = 2'-O-methyladenosine-3'-phosphorothioate
  modified_base 23: mod_base = OTHER; note = 2'-O-methyladenosine-3'-phosphate
ttgagctagagtaaaaacaacaa

SEQ ID NO: 4134 - RNA, 23 nt, synthetic construct
  source 1..23: mol_type = other RNA
  modified_base 1: mod_base = OTHER; note = Vinyl-phosphonate 2'-O-methyluridine-3'-phosphorothioate
  modified_base 2: mod_base = OTHER; note = 2'-fluorouridine -3'-phosphorothioate
  modified_base 3: mod_base = OTHER; note = 2'-O-methylcytidine-3'-phosphate
  modified_base 4: mod_base = OTHER; note = 2'-O-methyladenosine-3'-phosphate
  modified_base 5: mod_base = OTHER; note = 2'-O-methyluridine-3'-phosphate
  modified_base 6: mod_base = OTHER; note = 2'-fluorouridine-3'-phosphate
  modified_base 7: mod_base = OTHER; note = 2'-O-methylguanosine-3'-phosphate
  modified_base 8: mod_base = OTHER; note = 2'-fluorouridine-3'-phosphate
  modified_base 9: mod_base = OTHER; note = 2'-fluoroadenosine-3'-phosphate
  modified_base 10: mod_base = OTHER; note = 2'-O-methyluridine-3'-phosphate
  modified_base 11: mod_base = OTHER; note = 2'-O-methyladenosine-3'-phosphate
  modified_base 12: mod_base = OTHER; note = 2'-O-methyladenosine-3'-phosphate
  modified_base 13: mod_base = OTHER; note = 2'-O-methyladenosine-3'-phosphate
  modified_base 14: mod_base = OTHER; note = 2'-fluoroadenosine-3'-phosphate
  modified_base 15: mod_base = OTHER; note = 2'-O-methylcytidine-3'-phosphate
  modified_base 16: mod_base = OTHER; note = 2'-fluorouridine-3'-phosphate
  modified_base 17: mod_base = OTHER; note = 2'-O-methylguanosine-3'-phosphate
  modified_base 18: mod_base = OTHER; note = 2'-O-methylcytidine-3'-phosphate
  modified_base 19: mod_base = OTHER; note = 2'-O-methylcytidine-3'-phosphate
  modified_base 20: mod_base = OTHER; note = 2'-O-methyluridine-3'-phosphate
  modified_base 21: mod_base = OTHER; note = 2'-O-methylguanosine-3'-phosphorothioate
  modified_base 22: mod_base = OTHER; note = 2'-O-methyladenosine-3'-phosphorothioate
  modified_base 23: mod_base = OTHER; note = 2'-O-methylguanosine-3'-phosphate
ttcattgtataaaactgcctgag

SEQ ID NO: 4135 - RNA, 23 nt, synthetic construct
  source 1..23: mol_type = other RNA
  modified_base 1: mod_base = OTHER; note = Vinyl-phosphonate 2'-O-methyluridine-3'-phosphorothioate
  modified_base 2: mod_base = OTHER; note = 2'-fluoroadenosine-3'-phosphorothioate
  modified_base 3: mod_base = OTHER; note = 2'-O-methyluridine-3'-phosphate
  modified_base 4: mod_base = OTHER; note = 2'-O-methyladenosine-3'-phosphate
  modified_base 5: mod_base = OTHER; note = 2'-O-methyladenosine-3'-phosphate
  modified_base 6: mod_base = OTHER; note = 2'-fluorocytidine-3'-phosphate
  modified_base 7: mod_base = OTHER; note = 2'-O-methylcytidine-3'-phosphate
  modified_base 8: mod_base = OTHER; note = 2'-fluorouridine-3'-phosphate
  modified_base 9: mod_base = OTHER; note = 2'-fluoroguanosine-3'-phosphate
  modified_base 10: mod_base = OTHER; note = 2'-O-methyladenosine-3'-phosphate
  modified_base 11: mod_base = OTHER; note = 2'-O-methylcytidine-3'-phosphate
  modified_base 12: mod_base = OTHER; note = 2'-O-methyluridine-3'-phosphate
  modified_base 13: mod_base = OTHER; note = 2'-O-methylguanosine-3'-phosphate
  modified_base 14: mod_base = OTHER; note = 2'-fluoroadenosine-3'-phosphate
  modified_base 15: mod_base = OTHER; note = 2'-O-methylguanosine-3'-phosphate
  modified_base 16: mod_base = OTHER; note = 2'-fluoroadenosine-3'-phosphate
  modified_base 17: mod_base = OTHER; note = 2'-O-methyladenosine-3'-phosphate
  modified_base 18: mod_base = OTHER; note = 2'-O-methyluridine-3'-phosphate
  modified_base 19: mod_base = OTHER; note = 2'-O-methylcytidine-3'-phosphate
  modified_base 20: mod_base = OTHER; note = 2'-O-methylcytidine-3'-phosphate
  modified_base 21: mod_base = OTHER; note = 2'-O-methyluridine-3'-phosphorothioate
  modified_base 22: mod_base = OTHER; note = 2'-O-methyluridine-3'-phosphorothioate
  modified_base 23: mod_base = OTHER; note = 2'-O-methylcytidine-3'-phosphate
tataacctgactgagaatccttc

SEQ ID NO: 4136 - RNA, 23 nt, synthetic construct
  source 1..23: mol_type = other RNA
  modified_base 1: mod_base = OTHER; note = Vinyl-phosphonate 2'-O-methyluridine-3'-phosphorothioate
  modified_base 2: mod_base = OTHER; note = 2'-fluoroadenosine-3'-phosphorothioate
  modified_base 3: mod_base = OTHER; note = 2'-O-methylcytidine-3'-phosphate
  modified_base 4: mod_base = OTHER; note = 2'-O-methyluridine-3'-phosphate
  modified_base 5: mod_base = OTHER; note = 2'-O-methyluridine-3'-phosphate
  modified_base 6: mod_base = OTHER; note = 2'-fluoroadenosine-3'-phosphate
  modified_base 7: mod_base = OTHER; note = 2'-O-methyladenosine-3'-phosphate
  modified_base 8: mod_base = OTHER; note = 2'-fluoroadenosine-3'-phosphate
  modified_base 9: mod_base = OTHER; note = 2'-fluorocytidine-3'-phosphate
  modified_base 10: mod_base = OTHER; note = 2'-O-methyladenosine-3'-phosphate
  modified_base 11: mod_base = OTHER; note = 2'-O-methyluridine-3'-phosphate
  modified_base 12: mod_base = OTHER; note = 2'-O-methylguanosine-3'-phosphate
  modified_base 13: mod_base = OTHER; note = 2'-O-methyladenosine-3'-phosphate
  modified_base 14: mod_base = OTHER; note = 2'-fluorouridine-3'-phosphate
  modified_base 15: mod_base = OTHER; note = 2'-O-methylguanosine-3'-phosphate
  modified_base 16: mod_base = OTHER; note = 2'-fluoroguanosine-3'-phosphate
  modified_base 17: mod_base = OTHER; note = 2'-O-methyladenosine-3'-phosphate
  modified_base 18: mod_base = OTHER; note = 2'-O-methyladenosine-3'-phosphate
  modified_base 19: mod_base = OTHER; note = 2'-O-methyladenosine-3'-phosphate
  modified_base 20: mod_base = OTHER; note = 2'-O-methyladenosine-3'-phosphate
  modified_base 21: mod_base = OTHER; note = 2'-O-methyluridine-3'-phosphorothioate
  modified_base 22: mod_base = OTHER; note = 2'-O-methylguanosine-3'-phosphorothioate
  modified_base 23: mod_base = OTHER; note = 2'-O-methyluridine-3'-phosphate
tacttaaacatgatggaaaatgt

SEQ ID NO: 4137 - RNA, 23 nt, synthetic construct
  source 1..23: mol_type = other RNA
  modified_base 1: mod_base = OTHER; note = Vinyl-phosphonate 2'-O-methyluridine-3'-phosphorothioate
  modified_base 2: mod_base = OTHER; note = 2'-fluorocytidine-3'-phosphorothioate
  modified_base 3: mod_base = OTHER; note = 2'-O-methyladenosine-3'-phosphate
  modified_base 4: mod_base = OTHER; note = 2'-O-methyladenosine-3'-phosphate
  modified_base 5: mod_base = OTHER; note = 2'-O-methyluridine-3'-phosphate
  modified_base 6: mod_base = OTHER; note = 2'-fluoroguanosine-3'-phosphate
  modified_base 7: mod_base = OTHER; note = 2'-O-methylguanosine-3'-phosphate
  modified_base 8: mod_base = OTHER; note = 2'-fluorouridine-3'-phosphate
  modified_base 9: mod_base = OTHER; note = 2'-fluoroadenosine-3'-phosphate
  modified_base 10: mod_base = OTHER; note = 2'-O-methyladenosine-3'-phosphate
  modified_base 11: mod_base = OTHER; note = 2'-O-methylcytidine-3'-phosphate
  modified_base 12: mod_base = OTHER; note = 2'-O-methyladenosine-3'-phosphate
  modified_base 13: mod_base = OTHER; note = 2'-O-methyladenosine-3'-phosphate
  modified_base 14: mod_base = OTHER; note = 2'-fluoroadenosine-3'-phosphate
  modified_base 15: mod_base = OTHER; note = 2'-O-methyladenosine-3'-phosphate
  modified_base 16: mod_base = OTHER; note = 2'-fluoroguanosine-3'-phosphate
  modified_base 17: mod_base = OTHER; note = 2'-O-methyluridine-3'-phosphate
  modified_base 18: mod_base = OTHER; note = 2'-O-methylguanosine-3'-phosphate
  modified_base 19: mod_base = OTHER; note = 2'-O-methylguanosine-3'-phosphate
  modified_base 20: mod_base = OTHER; note = 2'-O-methylcytidine-3'-phosphate
  modified_base 21: mod_base = OTHER; note = 2'-O-methyladenosine-3'-phosphorothioate
  modified_base 22: mod_base = OTHER; note = 2'-O-methylguanosine-3'-phosphorothioate
  modified_base 23: mod_base = OTHER; note = 2'-O-methylcytidine-3'-phosphate
tcaatggtaacaaaagtggcagc

SEQ ID NO: 4138 - RNA, 23 nt, synthetic construct
  source 1..23: mol_type = other RNA
  modified_base 1: mod_base = OTHER; note = Vinyl-phosphonate 2'-O-methyluridine-3'-phosphorothioate
  modified_base 2: mod_base = OTHER; note = 2'-fluoroadenosine-3'-phosphorothioate
  modified_base 3: mod_base = OTHER; note = 2'-O-methyluridine-3'-phosphate
  modified_base 4: mod_base = OTHER; note = 2'-O-methyladenosine-3'-phosphate
  modified_base 5: mod_base = OTHER; note = 2'-O-methyluridine-3'-phosphate
  modified_base 6: mod_base = OTHER; note = 2'-fluorocytidine-3'-phosphate
  modified_base 7: mod_base = OTHER; note = 2'-O-methylcytidine-3'-phosphate
  modified_base 8: mod_base = OTHER; note = 2'-fluoroadenosine-3'-phosphate
  modified_base 9: mod_base = OTHER; note = 2'-fluorocytidine-3'-phosphate
  modified_base 10: mod_base = OTHER; note = 2'-O-methyladenosine-3'-phosphate
  modified_base 11: mod_base = OTHER; note = 2'-O-methylcytidine-3'-phosphate
  modified_base 12: mod_base = OTHER; note = 2'-O-methyladenosine-3'-phosphate
  modified_base 13: mod_base = OTHER; note = 2'-O-methylcytidine-3'-phosphate
  modified_base 14: mod_base = OTHER; note = 2'-fluorouridine-3'-phosphate
  modified_base 15: mod_base = OTHER; note = 2'-O-methyladenosine-3'-phosphate
  modified_base 16: mod_base = OTHER; note = 2'-fluoroguanosine-3'-phosphate
  modified_base 17: mod_base = OTHER; note = 2'-O-methylcytidine-3'-phosphate
  modified_base 18: mod_base = OTHER; note = 2'-O-methyladenosine-3'-phosphate
  modified_base 19: mod_base = OTHER; note = 2'-O-methyladenosine-3'-phosphate
  modified_base 20: mod_base = OTHER; note = 2'-O-methylguanosine-3'-phosphate
  modified_base 21: mod_base = OTHER; note = 2'-O-methyluridine-3'-phosphorothioate
  modified_base 22: mod_base = OTHER; note = 2'-O-methyluridine-3'-phosphorothioate
  modified_base 23: mod_base = OTHER; note = 2'-O-methyluridine-3'-phosphate
tatatccacacactagcaagttt

SEQ ID NO: 4139 - RNA, 23 nt, synthetic construct
  source 1..23: mol_type = other RNA
  modified_base 1: mod_base = OTHER; note = Vinyl-phosphonate 2'-O-methyluridine-3'-phosphorothioate
  modified_base 2: mod_base = OTHER; note = 2'-fluoroguanosine-3'-phosphorothioate
  modified_base 3: mod_base = OTHER; note = 2'-O-methylcytidine-3'-phosphate
  modified_base 4: mod_base = OTHER; note = 2'-O-methyladenosine-3'-phosphate
  modified_base 5: mod_base = OTHER; note = 2'-O-methyladenosine-3'-phosphate
  modified_base 6: mod_base = OTHER; note = 2'-fluorouridine-3'-phosphate
  modified_base 7: mod_base = OTHER; note = 2'-O-methyluridine-3'-phosphate
  modified_base 8: mod_base = OTHER; note = 2'-fluorouridine-3'-phosphate
  modified_base 9: mod_base = OTHER; note = 2'-fluorocytidine-3'-phosphate
  modified_base 10: mod_base = OTHER; note = 2'-O-methyluridine-3'-phosphate
  modified_base 11: mod_base = OTHER; note = 2'-O-methylcytidine-3'-phosphate
  modified_base 12: mod_base = OTHER; note = 2'-O-methyladenosine-3'-phosphate
  modified_base 13: mod_base = OTHER; note = 2'-O-methyladenosine-3'-phosphate
  modified_base 14: mod_base = OTHER; note = 2'-fluoroguanosine-3'-phosphate
  modified_base 15: mod_base = OTHER; note = 2'-O-methyluridine-3'-phosphate
  modified_base 16: mod_base = OTHER; note = 2'-fluoroadenosine-3'-phosphate
  modified_base 17: mod_base = OTHER; note = 2'-O-methyladenosine-3'-phosphate
  modified_base 18: mod_base = OTHER; note = 2'-O-methylguanosine-3'-phosphate
  modified_base 19: mod_base = OTHER; note = 2'-O-methyladenosine-3'-phosphate
  modified_base 20: mod_base = OTHER; note = 2'-O-methyluridine-3'-phosphate
  modified_base 21: mod_base = OTHER; note = 2'-O-methyluridine-3'-phosphorothioate
  modified_base 22: mod_base = OTHER; note = 2'-O-methyluridine-3'-phosphorothioate
  modified_base 23: mod_base = OTHER; note = 2'-O-methylcytidine-3'-phosphate
tgcaatttctcaagtaagatttc

SEQ ID NO: 4140 - RNA, 23 nt, synthetic construct
  source 1..23: mol_type = other RNA
  modified_base 1: mod_base = OTHER; note = Vinyl-phosphonate 2'-O-methyluridine-3'-phosphorothioate
  modified_base 2: mod_base = OTHER; note = 2'-fluorouridine -3'-phosphorothioate
  modified_base 3: mod_base = OTHER; note = 2'-O-methylcytidine-3'-phosphate
  modified_base 4: mod_base = OTHER; note = 2'-O-methyladenosine-3'-phosphate
  modified_base 5: mod_base = OTHER; note = 2'-O-methyladenosine-3'-phosphate
  modified_base 6: mod_base = OTHER; note = 2'-fluoroadenosine-3'-phosphate
  modified_base 7: mod_base = OTHER; note = 2'-O-methyluridine-3'-phosphate
  modified_base 8: mod_base = OTHER; note = 2'-fluoroguanosine-3'-phosphate
  modified_base 9: mod_base = OTHER; note = 2'-fluorocytidine-3'-phosphate
  modified_base 10: mod_base = OTHER; note = 2'-O-methyladenosine-3'-phosphate
  modified_base 11: mod_base = OTHER; note = 2'-O-methyladenosine-3'-phosphate
  modified_base 12: mod_base = OTHER; note = 2'-O-methylguanosine-3'-phosphate
  modified_base 13: mod_base = OTHER; note = 2'-O-methyluridine-3'-phosphate
  modified_base 14: mod_base = OTHER; note = 2'-fluorocytidine-3'-phosphate
  modified_base 15: mod_base = OTHER; note = 2'-O-methyluridine-3'-phosphate
  modified_base 16: mod_base = OTHER; note = 2'-fluorocytidine-3'-phosphate
  modified_base 17: mod_base = OTHER; note = 2'-O-methylguanosine-3'-phosphate
  modified_base 18: mod_base = OTHER; note = 2'-O-methyladenosine-3'-phosphate
  modified_base 19: mod_base = OTHER; note = 2'-O-methyladenosine-3'-phosphate
  modified_base 20: mod_base = OTHER; note = 2'-O-methylcytidine-3'-phosphate
  modified_base 21: mod_base = OTHER; note = 2'-O-methyluridine-3'-phosphorothioate
  modified_base 22: mod_base = OTHER; note = 2'-O-methyluridine-3'-phosphorothioate
  modified_base 23: mod_base = OTHER; note = 2'-O-methyluridine-3'-phosphate
ttcaaatgcaagtctcgaacttt

SEQ ID NO: 4141 - RNA, 23 nt, synthetic construct
  source 1..23: mol_type = other RNA
  modified_base 1: mod_base = OTHER; note = Vinyl-phosphonate 2'-O-methyluridine-3'-phosphorothioate
  modified_base 2: mod_base = OTHER; note = 2'-fluoroadenosine-3'-phosphorothioate
  modified_base 3: mod_base = OTHER; note = 2'-O-methylguanosine-3'-phosphate
  modified_base 4: mod_base = OTHER; note = 2'-O-methyluridine-3'-phosphate
  modified_base 5: mod_base = OTHER; note = 2'-O-methyladenosine-3'-phosphate
  modified_base 6: mod_base = OTHER; note = 2'-fluorouridine-3'-phosphate
  modified_base 7: mod_base = OTHER; note = 2'-O-methylcytidine-3'-phosphate
  modified_base 8: mod_base = OTHER; note = 2'-fluoroadenosine-3'-phosphate
  modified_base 9: mod_base = OTHER; note = 2'-fluoroguanosine-3'-phosphate
  modified_base 10: mod_base = OTHER; note = 2'-O-methylguanosine-3'-phosphate
  modified_base 11: mod_base = OTHER; note = 2'-O-methyladenosine-3'-phosphate
  modified_base 12: mod_base = OTHER; note = 2'-O-methyladenosine-3'-phosphate
  modified_base 13: mod_base = OTHER; note = 2'-O-methyladenosine-3'-phosphate
  modified_base 14: mod_base = OTHER; note = 2'-fluorouridine-3'-phosphate
  modified_base 15: mod_base = OTHER; note = 2'-O-methyluridine-3'-phosphate
  modified_base 16: mod_base = OTHER; note = 2'-fluorocytidine-3'-phosphate
  modified_base 17: mod_base = OTHER; note = 2'-O-methyluridine-3'-phosphate
  modified_base 18: mod_base = OTHER; note = 2'-O-methyladenosine-3'-phosphate
  modified_base 19: mod_base = OTHER; note = 2'-O-methyluridine-3'-phosphate
  modified_base 20: mod_base = OTHER; note = 2'-O-methylguanosine-3'-phosphate
  modified_base 21: mod_base = OTHER; note = 2'-O-methylguanosine-3'-phosphorothioate
  modified_base 22: mod_base = OTHER; note = 2'-O-methylguanosine-3'-phosphorothioate
  modified_base 23: mod_base = OTHER; note = 2'-O-methyluridine-3'-phosphate
tagtatcaggaaattctatgggt

SEQ ID NO: 4142 - RNA, 23 nt, synthetic construct
  source 1..23: mol_type = other RNA
  modified_base 1: mod_base = OTHER; note = Vinyl-phosphonate 2'-O-methyluridine-3'-phosphorothioate
  modified_base 2: mod_base = OTHER; note = 2'-fluoroadenosine-3'-phosphorothioate
  modified_base 3: mod_base = OTHER; note = 2'-O-methyluridine-3'-phosphate
  modified_base 4: mod_base = OTHER; note = 2'-O-methyladenosine-3'-phosphate
  modified_base 5: mod_base = OTHER; note = 2'-O-methyluridine-3'-phosphate
  modified_base 6: mod_base = OTHER; note = 2'-fluorouridine-3'-phosphate
  modified_base 7: mod_base = OTHER; note = 2'-O-methylcytidine-3'-phosphate
  modified_base 8: mod_base = OTHER; note = 2'-fluorouridine-3'-phosphate
  modified_base 9: mod_base = OTHER; note = 2'-fluoroadenosine-3'-phosphate
  modified_base 10: mod_base = OTHER; note = 2'-O-methyladenosine-3'-phosphate
  modified_base 11: mod_base = OTHER; note = 2'-O-methyladenosine-3'-phosphate
  modified_base 12: mod_base = OTHER; note = 2'-O-methylguanosine-3'-phosphate
  modified_base 13: mod_base = OTHER; note = 2'-O-methylguanosine-3'-phosphate
  modified_base 14: mod_base = OTHER; note = 2'-fluoroadenosine-3'-phosphate
  modified_base 15: mod_base = OTHER; note = 2'-O-methyladenosine-3'-phosphate
  modified_base 16: mod_base = OTHER; note = 2'-fluorouridine-3'-phosphate
  modified_base 17: mod_base = OTHER; note = 2'-O-methyluridine-3'-phosphate
  modified_base 18: mod_base = OTHER; note = 2'-O-methyladenosine-3'-phosphate
  modified_base 19: mod_base = OTHER; note = 2'-O-methylcytidine-3'-phosphate
  modified_base 20: mod_base = OTHER; note = 2'-O-methylcytidine-3'-phosphate
  modified_base 21: mod_base = OTHER; note = 2'-O-methyluridine-3'-phosphorothioate
  modified_base 22: mod_base = OTHER; note = 2'-O-methyluridine-3'-phosphorothioate
  modified_base 23: mod_base = OTHER; note = 2'-O-methylguanosine-3'-phosphate
tatattctaaaggaattaccttg

SEQ ID NO: 4143 - RNA, 23 nt, synthetic construct
  source 1..23: mol_type = other RNA
  modified_base 1: mod_base = OTHER; note = Vinyl-phosphonate 2'-O-methyluridine-3'-phosphorothioate
  modified_base 2: mod_base = OTHER; note = 2'-fluorouridine -3'-phosphorothioate
  modified_base 3: mod_base = OTHER; note = 2'-O-methylcytidine-3'-phosphate
  modified_base 4: mod_base = OTHER; note = 2'-O-methyluridine-3'-phosphate
  modified_base 5: mod_base = OTHER; note = 2'-O-methyluridine-3'-phosphate
  modified_base 6: mod_base = OTHER; note = 2'-fluoroguanosine-3'-phosphate
  modified_base 7: mod_base = OTHER; note = 2'-O-methyluridine-3'-phosphate
  modified_base 8: mod_base = OTHER; note = 2'-fluorouridine-3'-phosphate
  modified_base 9: mod_base = OTHER; note = 2'-fluoroguanosine-3'-phosphate
  modified_base 10: mod_base = OTHER; note = 2'-O-methyladenosine-3'-phosphate
  modified_base 11: mod_base = OTHER; note = 2'-O-methylguanosine-3'-phosphate
  modified_base 12: mod_base = OTHER; note = 2'-O-methyluridine-3'-phosphate
  modified_base 13: mod_base = OTHER; note = 2'-O-methyluridine-3'-phosphate
  modified_base 14: mod_base = OTHER; note = 2'-fluorouridine-3'-phosphate
  modified_base 15: mod_base = OTHER; note = 2'-O-methylcytidine-3'-phosphate
  modified_base 16: mod_base = OTHER; note = 2'-fluorocytidine-3'-phosphate
  modified_base 17: mod_base = OTHER; note = 2'-O-methyladenosine-3'-phosphate
  modified_base 18: mod_base = OTHER; note = 2'-O-methyluridine-3'-phosphate
  modified_base 19: mod_base = OTHER; note = 2'-O-methyladenosine-3'-phosphate
  modified_base 20: mod_base = OTHER; note = 2'-O-methyladenosine-3'-phosphate
  modified_base 21: mod_base = OTHER; note = 2'-O-methylguanosine-3'-phosphorothioate
  modified_base 22: mod_base = OTHER; note = 2'-O-methyluridine-3'-phosphorothioate
  modified_base 23: mod_base = OTHER; note = 2'-O-methyluridine-3'-phosphate
ttcttgttgagtttccataagtt

SEQ ID NO: 4144 - RNA, 23 nt, synthetic construct
  source 1..23: mol_type = other RNA
  modified_base 1: mod_base = OTHER; note = Vinyl-phosphonate 2'-O-methyluridine-3'-phosphorothioate
  modified_base 2: mod_base = OTHER; note = 2'-fluorocytidine-3'-phosphorothioate
  modified_base 3: mod_base = OTHER; note = 2'-O-methylguanosine-3'-phosphate
  modified_base 4: mod_base = OTHER; note = 2'-O-methyluridine-3'-phosphate
  modified_base 5: mod_base = OTHER; note = 2'-O-methyladenosine-3'-phosphate
  modified_base 6: mod_base = OTHER; note = 2'-fluoroadenosine-3'-phosphate
  modified_base 7: mod_base = OTHER; note = 2'-O-methyluridine-3'-phosphate
  modified_base 8: mod_base = OTHER; note = 2'-fluorouridine-3'-phosphate
  modified_base 9: mod_base = OTHER; note = 2'-fluorouridine-3'-phosphate
  modified_base 10: mod_base = OTHER; note = 2'-O-methyladenosine-3'-phosphate
  modified_base 11: mod_base = OTHER; note = 2'-O-methyladenosine-3'-phosphate
  modified_base 12: mod_base = OTHER; note = 2'-O-methyladenosine-3'-phosphate
  modified_base 13: mod_base = OTHER; note = 2'-O-methyladenosine-3'-phosphate
  modified_base 14: mod_base = OTHER; note = 2'-fluorouridine-3'-phosphate
  modified_base 15: mod_base = OTHER; note = 2'-O-methylguanosine-3'-phosphate
  modified_base 16: mod_base = OTHER; note = 2'-fluorocytidine-3'-phosphate
  modified_base 17: mod_base = OTHER; note = 2'-O-methyluridine-3'-phosphate
  modified_base 18: mod_base = OTHER; note = 2'-O-methylguanosine-3'-phosphate
  modified_base 19: mod_base = OTHER; note = 2'-O-methylcytidine-3'-phosphate
  modified_base 20: mod_base = OTHER; note = 2'-O-methyluridine-3'-phosphate
  modified_base 21: mod_base = OTHER; note = 2'-O-methyluridine-3'-phosphorothioate
  modified_base 22: mod_base = OTHER; note = 2'-O-methyluridine-3'-phosphorothioate
  modified_base 23: mod_base = OTHER; note = 2'-O-methyluridine-3'-phosphate
tcgtaatttaaaatgctgctttt

SEQ ID NO: 4145 - RNA, 23 nt, synthetic construct
  source 1..23: mol_type = other RNA
  modified_base 1: mod_base = OTHER; note = Vinyl-phosphonate 2'-O-methyluridine-3'-phosphorothioate
  modified_base 2: mod_base = OTHER; note = 2'-fluoroguanosine-3'-phosphorothioate
  modified_base 3: mod_base = OTHER; note = 2'-O-methyladenosine-3'-phosphate
  modified_base 4: mod_base = OTHER; note = 2'-O-methyladenosine-3'-phosphate
  modified_base 5: mod_base = OTHER; note = 2'-O-methyluridine-3'-phosphate
  modified_base 6: mod_base = OTHER; note = 2'-fluoroguanosine-3'-phosphate
  modified_base 7: mod_base = OTHER; note = 2'-O-methylguanosine-3'-phosphate
  modified_base 8: mod_base = OTHER; note = 2'-fluorouridine-3'-phosphate
  modified_base 9: mod_base = OTHER; note = 2'-fluorocytidine-3'-phosphate
  modified_base 10: mod_base = OTHER; note = 2'-O-methyladenosine-3'-phosphate
  modified_base 11: mod_base = OTHER; note = 2'-O-methylguanosine-3'-phosphate
  modified_base 12: mod_base = OTHER; note = 2'-O-methyluridine-3'-phosphate
  modified_base 13: mod_base = OTHER; note = 2'-O-methyluridine-3'-phosphate
  modified_base 14: mod_base = OTHER; note = 2'-fluoroguanosine-3'-phosphate
  modified_base 15: mod_base = OTHER; note = 2'-O-methyladenosine-3'-phosphate
  modified_base 16: mod_base = OTHER; note = 2'-fluoroguanosine-3'-phosphate
  modified_base 17: mod_base = OTHER; note = 2'-O-methyladenosine-3'-phosphate
  modified_base 18: mod_base = OTHER; note = 2'-O-methylguanosine-3'-phosphate
  modified_base 19: mod_base = OTHER; note = 2'-O-methyluridine-3'-phosphate
  modified_base 20: mod_base = OTHER; note = 2'-O-methylcytidine-3'-phosphate
  modified_base 21: mod_base = OTHER; note = 2'-O-methyladenosine-3'-phosphorothioate
  modified_base 22: mod_base = OTHER; note = 2'-O-methylguanosine-3'-phosphorothioate
  modified_base 23: mod_base = OTHER; note = 2'-O-methylcytidine-3'-phosphate
tgaatggtcagttgagagtcagc

SEQ ID NO: 4146 - RNA, 23 nt, synthetic construct
  source 1..23: mol_type = other RNA
  modified_base 1: mod_base = OTHER; note = Vinyl-phosphonate 2'-O-methyluridine-3'-phosphorothioate
  modified_base 2: mod_base = OTHER; note = 2'-fluoroadenosine-3'-phosphorothioate
  modified_base 3: mod_base = OTHER; note = 2'-O-methylguanosine-3'-phosphate
  modified_base 4: mod_base = OTHER; note = 2'-O-methyluridine-3'-phosphate
  modified_base 5: mod_base = OTHER; note = 2'-O-methylcytidine-3'-phosphate
  modified_base 6: mod_base = OTHER; note = 2'-fluorocytidine-3'-phosphate
  modified_base 7: mod_base = OTHER; note = 2'-O-methyluridine-3'-phosphate
  modified_base 8: mod_base = OTHER; note = 2'-fluorouridine-3'-phosphate
  modified_base 9: mod_base = OTHER; note = 2'-fluorocytidine-3'-phosphate
  modified_base 10: mod_base = OTHER; note = 2'-O-methyladenosine-3'-phosphate
  modified_base 11: mod_base = OTHER; note = 2'-O-methyluridine-3'-phosphate
  modified_base 12: mod_base = OTHER; note = 2'-O-methylguanosine-3'-phosphate
  modified_base 13: mod_base = OTHER; note = 2'-O-methylguanosine-3'-phosphate
  modified_base 14: mod_base = OTHER; note = 2'-fluoroadenosine-3'-phosphate
  modified_base 15: mod_base = OTHER; note = 2'-O-methyluridine-3'-phosphate
  modified_base 16: mod_base = OTHER; note = 2'-fluoroadenosine-3'-phosphate
  modified_base 17: mod_base = OTHER; note = 2'-O-methyladenosine-3'-phosphate
  modified_base 18: mod_base = OTHER; note = 2'-O-methyladenosine-3'-phosphate
  modified_base 19: mod_base = OTHER; note = 2'-O-methylcytidine-3'-phosphate
  modified_base 20: mod_base = OTHER; note = 2'-O-methylcytidine-3'-phosphate
  modified_base 21: mod_base = OTHER; note = 2'-O-methyluridine-3'-phosphorothioate
  modified_base 22: mod_base = OTHER; note = 2'-O-methyladenosine-3'-phosphorothioate
  modified_base 23: mod_base = OTHER; note = 2'-O-methylguanosine-3'-phosphate
tagtccttcatggataaacctag

SEQ ID NO: 4147 - RNA, 23 nt, synthetic construct
  source 1..23: mol_type = other RNA
  modified_base 1: mod_base = OTHER; note = Vinyl-phosphonate 2'-O-methyluridine-3'-phosphorothioate
  modified_base 2: mod_base = OTHER; note = 2'-fluorouridine -3'-phosphorothioate
  modified_base 3: mod_base = OTHER; note = 2'-O-methylguanosine-3'-phosphate
  modified_base 4: mod_base = OTHER; note = 2'-O-methyladenosine-3'-phosphate
  modified_base 5: mod_base = OTHER; note = 2'-O-methyladenosine-3'-phosphate
  modified_base 6: mod_base = OTHER; note = 2'-fluoroadenosine-3'-phosphate
  modified_base 7: mod_base = OTHER; note = 2'-O-methyluridine-3'-phosphate
  modified_base 8: mod_base = OTHER; note = 2'-fluoroguanosine-3'-phosphate
  modified_base 9: mod_base = OTHER; note = 2'-fluorocytidine-3'-phosphate
  modified_base 10: mod_base = OTHER; note = 2'-O-methylcytidine-3'-phosphate
  modified_base 11: mod_base = OTHER; note = 2'-O-methyladenosine-3'-phosphate
  modified_base 12: mod_base = OTHER; note = 2'-O-methyladenosine-3'-phosphate
  modified_base 13: mod_base = OTHER; note = 2'-O-methyladenosine-3'-phosphate
  modified_base 14: mod_base = OTHER; note = 2'-fluorouridine-3'-phosphate
  modified_base 15: mod_base = OTHER; note = 2'-O-methyluridine-3'-phosphate
  modified_base 16: mod_base = OTHER; note = 2'-fluorocytidine-3'-phosphate
  modified_base 17: mod_base = OTHER; note = 2'-O-methyluridine-3'-phosphate
  modified_base 18: mod_base = OTHER; note = 2'-O-methyluridine-3'-phosphate
  modified_base 19: mod_base = OTHER; note = 2'-O-methylguanosine-3'-phosphate
  modified_base 20: mod_base = OTHER; note = 2'-O-methylguanosine-3'-phosphate
  modified_base 21: mod_base = OTHER; note = 2'-O-methyluridine-3'-phosphorothioate
  modified_base 22: mod_base = OTHER; note = 2'-O-methylguanosine-3'-phosphorothioate
  modified_base 23: mod_base = OTHER; note = 2'-O-methyladenosine-3'-phosphate
ttgaaatgccaaattcttggtga

SEQ ID NO: 4148 - RNA, 23 nt, synthetic construct
  source 1..23: mol_type = other RNA
  modified_base 1: mod_base = OTHER; note = Vinyl-phosphonate 2'-O-methyluridine-3'-phosphorothioate
  modified_base 2: mod_base = OTHER; note = 2'-fluorouridine -3'-phosphorothioate
  modified_base 3: mod_base = OTHER; note = 2'-O-methyladenosine-3'-phosphate
  modified_base 4: mod_base = OTHER; note = 2'-O-methyladenosine-3'-phosphate
  modified_base 5: mod_base = OTHER; note = 2'-O-methylguanosine-3'-phosphate
  modified_base 6: mod_base = OTHER; note = 2'-fluorocytidine-3'-phosphate
  modified_base 7: mod_base = OTHER; note = 2'-O-methylcytidine-3'-phosphate
  modified_base 8: mod_base = OTHER; note = 2'-fluoroadenosine-3'-phosphate
  modified_base 9: mod_base = OTHER; note = 2'-fluoroadenosine-3'-phosphate
  modified_base 10: mod_base = OTHER; note = 2'-O-methyladenosine-3'-phosphate
  modified_base 11: mod_base = OTHER; note = 2'-O-methyluridine-3'-phosphate
  modified_base 12: mod_base = OTHER; note = 2'-O-methyladenosine-3'-phosphate
  modified_base 13: mod_base = OTHER; note = 2'-O-methyluridine-3'-phosphate
  modified_base 14: mod_base = OTHER; note = 2'-fluorouridine-3'-phosphate
  modified_base 15: mod_base = OTHER; note = 2'-O-methylcytidine-3'-phosphate
  modified_base 16: mod_base = OTHER; note = 2'-fluorouridine-3'-phosphate
  modified_base 17: mod_base = OTHER; note = 2'-O-methyladenosine-3'-phosphate
  modified_base 18: mod_base = OTHER; note = 2'-O-methylguanosine-3'-phosphate
  modified_base 19: mod_base = OTHER; note = 2'-O-methyladenosine-3'-phosphate
  modified_base 20: mod_base = OTHER; note = 2'-O-methyluridine-3'-phosphate
  modified_base 21: mod_base = OTHER; note = 2'-O-methyladenosine-3'-phosphorothioate
  modified_base 22: mod_base = OTHER; note = 2'-O-methyladenosine-3'-phosphorothioate
  modified_base 23: mod_base = OTHER; note = 2'-O-methylguanosine-3'-phosphate
ttaagccaaatattctagataag

SEQ ID NO: 4149 - RNA, 23 nt, synthetic construct
  source 1..23: mol_type = other RNA
  modified_base 1: mod_base = OTHER; note = Vinyl-phosphonate 2'-O-methyluridine-3'-phosphorothioate
  modified_base 2: mod_base = OTHER; note = 2'-fluorouridine -3'-phosphorothioate
  modified_base 3: mod_base = OTHER; note = 2'-O-methyluridine-3'-phosphate
  modified_base 4: mod_base = OTHER; note = 2'-O-methylguanosine-3'-phosphate
  modified_base 5: mod_base = OTHER; note = 2'-O-methyluridine-3'-phosphate
  modified_base 6: mod_base = OTHER; note = 2'-fluoroadenosine-3'-phosphate
  modified_base 7: mod_base = OTHER; note = 2'-O-methyluridine-3'-phosphate
  modified_base 8: mod_base = OTHER; note = 2'-fluoroguanosine-3'-phosphate
  modified_base 9: mod_base = OTHER; note = 2'-fluorouridine-3'-phosphate
  modified_base 10: mod_base = OTHER; note = 2'-O-methyladenosine-3'-phosphate
  modified_base 11: mod_base = OTHER; note = 2'-O-methyluridine-3'-phosphate
  modified_base 12: mod_base = OTHER; note = 2'-O-methyluridine-3'-phosphate
  modified_base 13: mod_base = OTHER; note = 2'-O-methylcytidine-3'-phosphate
  modified_base 14: mod_base = OTHER; note = 2'-fluorouridine-3'-phosphate
  modified_base 15: mod_base = OTHER; note = 2'-O-methylguanosine-3'-phosphate
  modified_base 16: mod_base = OTHER; note = 2'-fluorocytidine-3'-phosphate
  modified_base 17: mod_base = OTHER; note = 2'-O-methyladenosine-3'-phosphate
  modified_base 18: mod_base = OTHER; note = 2'-O-methylguanosine-3'-phosphate
  modified_base 19: mod_base = OTHER; note = 2'-O-methylguanosine-3'-phosphate
  modified_base 20: mod_base = OTHER; note = 2'-O-methyladenosine-3'-phosphate
  modified_base 21: mod_base = OTHER; note = 2'-O-methylguanosine-3'-phosphorothioate
  modified_base 22: mod_base = OTHER; note = 2'-O-methyladenosine-3'-phosphorothioate
  modified_base 23: mod_base = OTHER; note = 2'-O-methylguanosine-3'-phosphate
tttgtatgtattctgcaggagag

SEQ ID NO: 4150 - RNA, 23 nt, synthetic construct
  source 1..23: mol_type = other RNA
  modified_base 1: mod_base = OTHER; note = Vinyl-phosphonate 2'-O-methyluridine-3'-phosphorothioate
  modified_base 2: mod_base = OTHER; note = 2'-fluoroadenosine-3'-phosphorothioate
  modified_base 3: mod_base = OTHER; note = 2'-O-methyladenosine-3'-phosphate
  modified_base 4: mod_base = OTHER; note = 2'-O-methyladenosine-3'-phosphate
  modified_base 5: mod_base = OTHER; note = 2'-O-methyluridine-3'-phosphate
  modified_base 6: mod_base = OTHER; note = 2'-fluorocytidine-3'-phosphate
  modified_base 7: mod_base = OTHER; note = 2'-O-methylcytidine-3'-phosphate
  modified_base 8: mod_base = OTHER; note = 2'-fluoroadenosine-3'-phosphate
  modified_base 9: mod_base = OTHER; note = 2'-fluoroguanosine-3'-phosphate
  modified_base 10: mod_base = OTHER; note = 2'-O-methylguanosine-3'-phosphate
  modified_base 11: mod_base = OTHER; note = 2'-O-methyladenosine-3'-phosphate
  modified_base 12: mod_base = OTHER; note = 2'-O-methyladenosine-3'-phosphate
  modified_base 13: mod_base = OTHER; note = 2'-O-methyladenosine-3'-phosphate
  modified_base 14: mod_base = OTHER; note = 2'-fluorouridine-3'-phosphate
  modified_base 15: mod_base = OTHER; note = 2'-O-methylguanosine-3'-phosphate
  modified_base 16: mod_base = OTHER; note = 2'-fluoroguanosine-3'-phosphate
  modified_base 17: mod_base = OTHER; note = 2'-O-methyluridine-3'-phosphate
  modified_base 18: mod_base = OTHER; note = 2'-O-methylguanosine-3'-phosphate
  modified_base 19: mod_base = OTHER; note = 2'-O-methyluridine-3'-phosphate
  modified_base 20: mod_base = OTHER; note = 2'-O-methylguanosine-3'-phosphate
  modified_base 21: mod_base = OTHER; note = 2'-O-methyladenosine-3'-phosphorothioate
  modified_base 22: mod_base = OTHER; note = 2'-O-methylguanosine-3'-phosphorothioate
  modified_base 23: mod_base = OTHER; note = 2'-O-methyladenosine-3'-phosphate
taaatccaggaaatggtgtgaga

SEQ ID NO: 4151 - RNA, 23 nt, synthetic construct
  source 1..23: mol_type = other RNA
  modified_base 1: mod_base = OTHER; note = Vinyl-phosphonate 2'-O-methyluridine-3'-phosphorothioate
  modified_base 2: mod_base = OTHER; note = 2'-fluoroadenosine-3'-phosphorothioate
  modified_base 3: mod_base = OTHER; note = 2'-O-methyladenosine-3'-phosphate
  modified_base 4: mod_base = OTHER; note = 2'-O-methyladenosine-3'-phosphate
  modified_base 5: mod_base = OTHER; note = 2'-O-methylguanosine-3'-phosphate
  modified_base 6: mod_base = OTHER; note = 2'-fluorocytidine-3'-phosphate
  modified_base 7: mod_base = OTHER; note = 2'-O-methylguanosine-3'-phosphate
  modified_base 8: mod_base = OTHER; note = 2'-fluorocytidine-3'-phosphate
  modified_base 9: mod_base = OTHER; note = 2'-fluorouridine-3'-phosphate
  modified_base 10: mod_base = OTHER; note = 2'-O-methyluridine-3'-phosphate
  modified_base 11: mod_base = OTHER; note = 2'-O-methylguanosine-3'-phosphate
  modified_base 12: mod_base = OTHER; note = 2'-O-methyladenosine-3'-phosphate
  modified_base 13: mod_base = OTHER; note = 2'-O-methyladenosine-3'-phosphate
  modified_base 14: mod_base = OTHER; note = 2'-fluorouridine-3'-phosphate
  modified_base 15: mod_base = OTHER; note = 2'-O-methyluridine-3'-phosphate
  modified_base 16: mod_base = OTHER; note = 2'-fluorocytidine-3'-phosphate
  modified_base 17: mod_base = OTHER; note = 2'-O-methylcytidine-3'-phosphate
  modified_base 18: mod_base = OTHER; note = 2'-O-methyladenosine-3'-phosphate
  modified_base 19: mod_base = OTHER; note = 2'-O-methylcytidine-3'-phosphate
  modified_base 20: mod_base = OTHER; note = 2'-O-methyladenosine-3'-phosphate
  modified_base 21: mod_base = OTHER; note = 2'-O-methyluridine-3'-phosphorothioate
  modified_base 22: mod_base = OTHER; note = 2'-O-methylguanosine-3'-phosphorothioate
  modified_base 23: mod_base = OTHER; note = 2'-O-methyladenosine-3'-phosphate
taaagcgcttgaattccacatga

SEQ ID NO: 4152 - RNA, 23 nt, synthetic construct
  source 1..23: mol_type = other RNA
  modified_base 1: mod_base = OTHER; note = Vinyl-phosphonate 2'-O-methyluridine-3'-phosphorothioate
  modified_base 2: mod_base = OTHER; note = 2'-fluorocytidine-3'-phosphorothioate
  modified_base 3: mod_base = OTHER; note = 2'-O-methyladenosine-3'-phosphate
  modified_base 4: mod_base = OTHER; note = 2'-O-methyluridine-3'-phosphate
  modified_base 5: mod_base = OTHER; note = 2'-O-methyladenosine-3'-phosphate
  modified_base 6: mod_base = OTHER; note = 2'-fluoroguanosine-3'-phosphate
  modified_base 7: mod_base = OTHER; note = 2'-O-methyluridine-3'-phosphate
  modified_base 8: mod_base = OTHER; note = 2'-fluoroadenosine-3'-phosphate
  modified_base 9: mod_base = OTHER; note = 2'-fluoroguanosine-3'-phosphate
  modified_base 10: mod_base = OTHER; note = 2'-O-methyladenosine-3'-phosphate
  modified_base 11: mod_base = OTHER; note = 2'-O-methyluridine-3'-phosphate
  modified_base 12: mod_base = OTHER; note = 2'-O-methyladenosine-3'-phosphate
  modified_base 13: mod_base = OTHER; note = 2'-O-methyladenosine-3'-phosphate
  modified_base 14: mod_base = OTHER; note = 2'-fluorouridine-3'-phosphate
  modified_base 15: mod_base = OTHER; note = 2'-O-methyladenosine-3'-phosphate
  modified_base 16: mod_base = OTHER; note = 2'-fluorocytidine-3'-phosphate
  modified_base 17: mod_base = OTHER; note = 2'-O-methyladenosine-3'-phosphate
  modified_base 18: mod_base = OTHER; note = 2'-O-methylcytidine-3'-phosphate
  modified_base 19: mod_base = OTHER; note = 2'-O-methyladenosine-3'-phosphate
  modified_base 20: mod_base = OTHER; note = 2'-O-methyladenosine-3'-phosphate
  modified_base 21: mod_base = OTHER; note = 2'-O-methyluridine-3'-phosphorothioate
  modified_base 22: mod_base = OTHER; note = 2'-O-methyladenosine-3'-phosphorothioate
  modified_base 23: mod_base = OTHER; note = 2'-O-methylguanosine-3'-phosphate
tcatagtagataatacacaatag

SEQ ID NO: 4153 - RNA, 23 nt, synthetic construct
  source 1..23: mol_type = other RNA
  modified_base 1: mod_base = OTHER; note = Vinyl-phosphonate 2'-O-methyluridine-3'-phosphorothioate
  modified_base 2: mod_base = OTHER; note = 2'-fluoroadenosine-3'-phosphorothioate
  modified_base 3: mod_base = OTHER; note = 2'-O-methyluridine-3'-phosphate
  modified_base 4: mod_base = OTHER; note = 2'-O-methylcytidine-3'-phosphate
  modified_base 5: mod_base = OTHER; note = 2'-O-methyladenosine-3'-phosphate
  modified_base 6: mod_base = OTHER; note = 2'-fluorouridine-3'-phosphate
  modified_base 7: mod_base = OTHER; note = 2'-O-methyluridine-3'-phosphate
  modified_base 8: mod_base = OTHER; note = 2'-fluorouridine-3'-phosphate
  modified_base 9: mod_base = OTHER; note = 2'-fluorouridine-3'-phosphate
  modified_base 10: mod_base = OTHER; note = 2'-O-methylcytidine-3'-phosphate
  modified_base 11: mod_base = OTHER; note = 2'-O-methyladenosine-3'-phosphate
  modified_base 12: mod_base = OTHER; note = 2'-O-methyluridine-3'-phosphate
  modified_base 13: mod_base = OTHER; note = 2'-O-methyluridine-3'-phosphate
  modified_base 14: mod_base = OTHER; note = 2'-fluoroadenosine-3'-phosphate
  modified_base 15: mod_base = OTHER; note = 2'-O-methylcytidine-3'-phosphate
  modified_base 16: mod_base = OTHER; note = 2'-fluorouridine-3'-phosphate
  modified_base 17: mod_base = OTHER; note = 2'-O-methylcytidine-3'-phosphate
  modified_base 18: mod_base = OTHER; note = 2'-O-methylcytidine-3'-phosphate
  modified_base 19: mod_base = OTHER; note = 2'-O-methyladenosine-3'-phosphate
  modified_base 20: mod_base = OTHER; note = 2'-O-methyluridine-3'-phosphate
  modified_base 21: mod_base = OTHER; note = 2'-O-methyluridine-3'-phosphorothioate
  modified_base 22: mod_base = OTHER; note = 2'-O-methylcytidine-3'-phosphorothioate
  modified_base 23: mod_base = OTHER; note = 2'-O-methyluridine-3'-phosphate
tatcattttcattactccattct

SEQ ID NO: 4154 - RNA, 23 nt, synthetic construct
  source 1..23: mol_type = other RNA
  modified_base 1: mod_base = OTHER; note = Vinyl-phosphonate 2'-O-methyluridine-3'-phosphorothioate
  modified_base 2: mod_base = OTHER; note = 2'-fluoroadenosine-3'-phosphorothioate
  modified_base 3: mod_base = OTHER; note = 2'-O-methyladenosine-3'-phosphate
  modified_base 4: mod_base = OTHER; note = 2'-O-methyluridine-3'-phosphate
  modified_base 5: mod_base = OTHER; note = 2'-O-methyladenosine-3'-phosphate
  modified_base 6: mod_base = OTHER; note = 2'-fluorouridine-3'-phosphate
  modified_base 7: mod_base = OTHER; note = 2'-O-methyluridine-3'-phosphate
  modified_base 8: mod_base = OTHER; note = 2'-fluorouridine-3'-phosphate
  modified_base 9: mod_base = OTHER; note = 2'-fluorocytidine-3'-phosphate
  modified_base 10: mod_base = OTHER; note = 2'-O-methylcytidine-3'-phosphate
  modified_base 11: mod_base = OTHER; note = 2'-O-methyladenosine-3'-phosphate
  modified_base 12: mod_base = OTHER; note = 2'-O-methyladenosine-3'-phosphate
  modified_base 13: mod_base = OTHER; note = 2'-O-methyluridine-3'-phosphate
  modified_base 14: mod_base = OTHER; note = 2'-fluoroadenosine-3'-phosphate
  modified_base 15: mod_base = OTHER; note = 2'-O-methyladenosine-3'-phosphate
  modified_base 16: mod_base = OTHER; note = 2'-fluoroadenosine-3'-phosphate
  modified_base 17: mod_base = OTHER; note = 2'-O-methylcytidine-3'-phosphate
  modified_base 18: mod_base = OTHER; note = 2'-O-methylcytidine-3'-phosphate
  modified_base 19: mod_base = OTHER; note = 2'-O-methyladenosine-3'-phosphate
  modified_base 20: mod_base = OTHER; note = 2'-O-methylguanosine-3'-phosphate
  modified_base 21: mod_base = OTHER; note = 2'-O-methyluridine-3'-phosphorothioate
  modified_base 22: mod_base = OTHER; note = 2'-O-methylguanosine-3'-phosphorothioate
  modified_base 23: mod_base = OTHER; note = 2'-O-methyluridine-3'-phosphate
taatatttccaataaaccagtgt

SEQ ID NO: 4155 - RNA, 23 nt, synthetic construct
  source 1..23: mol_type = other RNA
  modified_base 1: mod_base = OTHER; note = Vinyl-phosphonate 2'-O-methyluridine-3'-phosphorothioate
  modified_base 2: mod_base = OTHER; note = 2'-fluoroadenosine-3'-phosphorothioate
  modified_base 3: mod_base = OTHER; note = 2'-O-methylcytidine-3'-phosphate
  modified_base 4: mod_base = OTHER; note = 2'-O-methyluridine-3'-phosphate
  modified_base 5: mod_base = OTHER; note = 2'-O-methyluridine-3'-phosphate
  modified_base 6: mod_base = OTHER; note = 2'-fluorouridine-3'-phosphate
  modified_base 7: mod_base = OTHER; note = 2'-O-methyladenosine-3'-phosphate
  modified_base 8: mod_base = OTHER; note = 2'-fluorouridine-3'-phosphate
  modified_base 9: mod_base = OTHER; note = 2'-fluoroadenosine-3'-phosphate
  modified_base 10: mod_base = OTHER; note = 2'-O-methylcytidine-3'-phosphate
  modified_base 11: mod_base = OTHER; note = 2'-O-methyladenosine-3'-phosphate
  modified_base 12: mod_base = OTHER; note = 2'-O-methylcytidine-3'-phosphate
  modified_base 13: mod_base = OTHER; note = 2'-O-methyladenosine-3'-phosphate
  modified_base 14: mod_base = OTHER; note = 2'-fluorouridine-3'-phosphate
  modified_base 15: mod_base = OTHER; note = 2'-O-methyladenosine-3'-phosphate
  modified_base 16: mod_base = OTHER; note = 2'-fluorocytidine-3'-phosphate
  modified_base 17: mod_base = OTHER; note = 2'-O-methyladenosine-3'-phosphate
  modified_base 18: mod_base = OTHER; note = 2'-O-methylcytidine-3'-phosphate
  modified_base 19: mod_base = OTHER; note = 2'-O-methyluridine-3'-phosphate
  modified_base 20: mod_base = OTHER; note = 2'-O-methyluridine-3'-phosphate
  modified_base 21: mod_base = OTHER; note = 2'-O-methylguanosine-3'-phosphorothioate
  modified_base 22: mod_base = OTHER; note = 2'-O-methyluridine-3'-phosphorothioate
  modified_base 23: mod_base = OTHER; note = 2'-O-methyladenosine-3'-phosphate
tactttatacacatacacttgta

SEQ ID NO: 4156 - RNA, 23 nt, synthetic construct
  source 1..23: mol_type = other RNA
  modified_base 1: mod_base = OTHER; note = Vinyl-phosphonate 2'-O-methyluridine-3'-phosphorothioate
  modified_base 2: mod_base = OTHER; note = 2'-fluorouridine -3'-phosphorothioate
  modified_base 3: mod_base = OTHER; note = 2'-O-methylcytidine-3'-phosphate
  modified_base 4: mod_base = OTHER; note = 2'-O-methyluridine-3'-phosphate
  modified_base 5: mod_base = OTHER; note = 2'-O-methylcytidine-3'-phosphate
  modified_base 6: mod_base = OTHER; note = 2'-fluoroadenosine-3'-phosphate
  modified_base 7: mod_base = OTHER; note = 2'-O-methyladenosine-3'-phosphate
  modified_base 8: mod_base = OTHER; note = 2'-fluorouridine-3'-phosphate
  modified_base 9: mod_base = OTHER; note = 2'-fluoroadenosine-3'-phosphate
  modified_base 10: mod_base = OTHER; note = 2'-O-methyluridine-3'-phosphate
  modified_base 11: mod_base = OTHER; note = 2'-O-methylguanosine-3'-phosphate
  modified_base 12: mod_base = OTHER; note = 2'-O-methylcytidine-3'-phosphate
  modified_base 13: mod_base = OTHER; note = 2'-O-methyladenosine-3'-phosphate
  modified_base 14: mod_base = OTHER; note = 2'-fluorouridine-3'-phosphate
  modified_base 15: mod_base = OTHER; note = 2'-O-methylguanosine-3'-phosphate
  modified_base 16: mod_base = OTHER; note = 2'-fluorocytidine-3'-phosphate
  modified_base 17: mod_base = OTHER; note = 2'-O-methyluridine-3'-phosphate
  modified_base 18: mod_base = OTHER; note = 2'-O-methyluridine-3'-phosphate
  modified_base 19: mod_base = OTHER; note = 2'-O-methylguanosine-3'-phosphate
  modified_base 20: mod_base = OTHER; note = 2'-O-methyluridine-3'-phosphate
  modified_base 21: mod_base = OTHER; note = 2'-O-methyladenosine-3'-phosphorothioate
  modified_base 22: mod_base = OTHER; note = 2'-O-methylcytidine-3'-phosphorothioate
  modified_base 23: mod_base = OTHER; note = 2'-O-methyladenosine-3'-phosphate
ttctcaatatgcatgcttgtaca

SEQ ID NO: 4157 - RNA, 23 nt, synthetic construct
  source 1..23: mol_type = other RNA
  modified_base 1: mod_base = OTHER; note = Vinyl-phosphonate 2'-O-methyluridine-3'-phosphorothioate
  modified_base 2: mod_base = OTHER; note = 2'-fluorouridine -3'-phosphorothioate
  modified_base 3: mod_base = OTHER; note = 2'-O-methylcytidine-3'-phosphate
  modified_base 4: mod_base = OTHER; note = 2'-O-methyladenosine-3'-phosphate
  modified_base 5: mod_base = OTHER; note = 2'-O-methyladenosine-3'-phosphate
  modified_base 6: mod_base = OTHER; note = 2'-fluoroadenosine-3'-phosphate
  modified_base 7: mod_base = OTHER; note = 2'-O-methylguanosine-3'-phosphate
  modified_base 8: mod_base = OTHER; note = 2'-fluoroadenosine-3'-phosphate
  modified_base 9: mod_base = OTHER; note = 2'-fluorocytidine-3'-phosphate
  modified_base 10: mod_base = OTHER; note = 2'-O-methyladenosine-3'-phosphate
  modified_base 11: mod_base = OTHER; note = 2'-O-methyluridine-3'-phosphate
  modified_base 12: mod_base = OTHER; note = 2'-O-methyladenosine-3'-phosphate
  modified_base 13: mod_base = OTHER; note = 2'-O-methyladenosine-3'-phosphate
  modified_base 14: mod_base = OTHER; note = 2'-fluoroadenosine-3'-phosphate
  modified_base 15: mod_base = OTHER; note = 2'-O-methyladenosine-3'-phosphate
  modified_base 16: mod_base = OTHER; note = 2'-fluoroguanosine-3'-phosphate
  modified_base 17: mod_base = OTHER; note = 2'-O-methyladenosine-3'-phosphate
  modified_base 18: mod_base = OTHER; note = 2'-O-methylcytidine-3'-phosphate
  modified_base 19: mod_base = OTHER; note = 2'-O-methyladenosine-3'-phosphate
  modified_base 20: mod_base = OTHER; note = 2'-O-methylcytidine-3'-phosphate
  modified_base 21: mod_base = OTHER; note = 2'-O-methyladenosine-3'-phosphorothioate
  modified_base 22: mod_base = OTHER; note = 2'-O-methylcytidine-3'-phosphorothioate
  modified_base 23: mod_base = OTHER; note = 2'-O-methyluridine-3'-phosphate
ttcaaagacataaaagacacact

SEQ ID NO: 4158 - RNA, 23 nt, synthetic construct
  source 1..23: mol_type = other RNA
  modified_base 1: mod_base = OTHER; note = Vinyl-phosphonate 2'-O-methyluridine-3'-phosphorothioate
  modified_base 2: mod_base = OTHER; note = 2'-fluoroadenosine-3'-phosphorothioate
  modified_base 3: mod_base = OTHER; note = 2'-O-methyluridine-3'-phosphate
  modified_base 4: mod_base = OTHER; note = 2'-O-methyluridine-3'-phosphate
  modified_base 5: mod_base = OTHER; note = 2'-O-methylguanosine-3'-phosphate
  modified_base 6: mod_base = OTHER; note = 2'-fluoroadenosine-3'-phosphate
  modified_base 7: mod_base = OTHER; note = 2'-O-methyladenosine-3'-phosphate
  modified_base 8: mod_base = OTHER; note = 2'-fluorouridine-3'-phosphate
  modified_base 9: mod_base = OTHER; note = 2'-fluorouridine-3'-phosphate
  modified_base 10: mod_base = OTHER; note = 2'-O-methylcytidine-3'-phosphate
  modified_base 11: mod_base = OTHER; note = 2'-O-methyluridine-3'-phosphate
  modified_base 12: mod_base = OTHER; note = 2'-O-methylguanosine-3'-phosphate
  modified_base 13: mod_base = OTHER; note = 2'-O-methylcytidine-3'-phosphate
  modified_base 14: mod_base = OTHER; note = 2'-fluoroguanosine-3'-phosphate
  modified_base 15: mod_base = OTHER; note = 2'-O-methyladenosine-3'-phosphate
  modified_base 16: mod_base = OTHER; note = 2'-fluoroguanosine-3'-phosphate
  modified_base 17: mod_base = OTHER; note = 2'-O-methyladenosine-3'-phosphate
  modified_base 18: mod_base = OTHER; note = 2'-O-methyladenosine-3'-phosphate
  modified_base 19: mod_base = OTHER; note = 2'-O-methyladenosine-3'-phosphate
  modified_base 20: mod_base = OTHER; note = 2'-O-methyladenosine-3'-phosphate
  modified_base 21: mod_base = OTHER; note = 2'-O-methyluridine-3'-phosphorothioate
  modified_base 22: mod_base = OTHER; note = 2'-O-methylcytidine-3'-phosphorothioate
  modified_base 23: mod_base = OTHER; note = 2'-O-methyladenosine-3'-phosphate
tattgaattctgcgagaaaatca

SEQ ID NO: 4159 - RNA, 23 nt, synthetic construct
  source 1..23: mol_type = other RNA
  modified_base 1: mod_base = OTHER; note = Vinyl-phosphonate 2'-O-methyluridine-3'-phosphorothioate
  modified_base 2: mod_base = OTHER; note = 2'-fluorouridine -3'-phosphorothioate
  modified_base 3: mod_base = OTHER; note = 2'-O-methyluridine-3'-phosphate
  modified_base 4: mod_base = OTHER; note = 2'-O-methyluridine-3'-phosphate
  modified_base 5: mod_base = OTHER; note = 2'-O-methyluridine-3'-phosphate
  modified_base 6: mod_base = OTHER; note = 2'-fluoroadenosine-3'-phosphate
  modified_base 7: mod_base = OTHER; note = 2'-O-methylcytidine-3'-phosphate
  modified_base 8: mod_base = OTHER; note = 2'-fluorouridine-3'-phosphate
  modified_base 9: mod_base = OTHER; note = 2'-fluorocytidine-3'-phosphate
  modified_base 10: mod_base = OTHER; note = 2'-O-methyladenosine-3'-phosphate
  modified_base 11: mod_base = OTHER; note = 2'-O-methyladenosine-3'-phosphate
  modified_base 12: mod_base = OTHER; note = 2'-O-methyladenosine-3'-phosphate
  modified_base 13: mod_base = OTHER; note = 2'-O-methylcytidine-3'-phosphate
  modified_base 14: mod_base = OTHER; note = 2'-fluorouridine-3'-phosphate
  modified_base 15: mod_base = OTHER; note = 2'-O-methylguanosine-3'-phosphate
  modified_base 16: mod_base = OTHER; note = 2'-fluorouridine-3'-phosphate
  modified_base 17: mod_base = OTHER; note = 2'-O-methylcytidine-3'-phosphate
  modified_base 18: mod_base = OTHER; note = 2'-O-methylguanosine-3'-phosphate
  modified_base 19: mod_base = OTHER; note = 2'-O-methylcytidine-3'-phosphate
  modified_base 20: mod_base = OTHER; note = 2'-O-methyluridine-3'-phosphate
  modified_base 21: mod_base = OTHER; note = 2'-O-methyladenosine-3'-phosphorothioate
  modified_base 22: mod_base = OTHER; note = 2'-O-methyluridine-3'-phosphorothioate
  modified_base 23: mod_base = OTHER; note = 2'-O-methyluridine-3'-phosphate
tttttactcaaactgtcgctatt

SEQ ID NO: 4160 - RNA, 23 nt, synthetic construct
  source 1..23: mol_type = other RNA
  modified_base 1: mod_base = OTHER; note = Vinyl-phosphonate 2'-O-methyluridine-3'-phosphorothioate
  modified_base 2: mod_base = OTHER; note = 2'-fluoroadenosine-3'-phosphorothioate
  modified_base 3: mod_base = OTHER; note = 2'-O-methylcytidine-3'-phosphate
  modified_base 4: mod_base = OTHER; note = 2'-O-methyladenosine-3'-phosphate
  modified_base 5: mod_base = OTHER; note = 2'-O-methyladenosine-3'-phosphate
  modified_base 6: mod_base = OTHER; note = 2'-fluoroadenosine-3'-phosphate
  modified_base 7: mod_base = OTHER; note = 2'-O-methylguanosine-3'-phosphate
  modified_base 8: mod_base = OTHER; note = 2'-fluorouridine-3'-phosphate
  modified_base 9: mod_base = OTHER; note = 2'-fluoroadenosine-3'-phosphate
  modified_base 10: mod_base = OTHER; note = 2'-O-methyluridine-3'-phosphate
  modified_base 11: mod_base = OTHER; note = 2'-O-methyluridine-3'-phosphate
  modified_base 12: mod_base = OTHER; note = 2'-O-methylcytidine-3'-phosphate
  modified_base 13: mod_base = OTHER; note = 2'-O-methyladenosine-3'-phosphate
  modified_base 14: mod_base = OTHER; note = 2'-fluorouridine-3'-phosphate
  modified_base 15: mod_base = OTHER; note = 2'-O-methyladenosine-3'-phosphate
  modified_base 16: mod_base = OTHER; note = 2'-fluorocytidine-3'-phosphate
  modified_base 17: mod_base = OTHER; note = 2'-O-methyladenosine-3'-phosphate
  modified_base 18: mod_base = OTHER; note = 2'-O-methylcytidine-3'-phosphate
  modified_base 19: mod_base = OTHER; note = 2'-O-methylcytidine-3'-phosphate
  modified_base 20: mod_base = OTHER; note = 2'-O-methyladenosine-3'-phosphate
  modified_base 21: mod_base = OTHER; note = 2'-O-methylguanosine-3'-phosphorothioate
  modified_base 22: mod_base = OTHER; note = 2'-O-methyluridine-3'-phosphorothioate
  modified_base 23: mod_base = OTHER; note = 2'-O-methylguanosine-3'-phosphate
tacaaagtattcatacaccagtg

SEQ ID NO: 4161 - RNA, 23 nt, synthetic construct
  source 1..23: mol_type = other RNA
  modified_base 1: mod_base = OTHER; note = Vinyl-phosphonate 2'-O-methyluridine-3'-phosphorothioate
  modified_base 2: mod_base = OTHER; note = 2'-fluorouridine -3'-phosphorothioate
  modified_base 3: mod_base = OTHER; note = 2'-O-methyluridine-3'-phosphate
  modified_base 4: mod_base = OTHER; note = 2'-O-methylcytidine-3'-phosphate
  modified_base 5: mod_base = OTHER; note = 2'-O-methyluridine-3'-phosphate
  modified_base 6: mod_base = OTHER; note = 2'-fluoroguanosine-3'-phosphate
  modified_base 7: mod_base = OTHER; note = 2'-O-methyluridine-3'-phosphate
  modified_base 8: mod_base = OTHER; note = 2'-fluorouridine-3'-phosphate
  modified_base 9: mod_base = OTHER; note = 2'-fluoroadenosine-3'-phosphate
  modified_base 10: mod_base = OTHER; note = 2'-O-methylguanosine-3'-phosphate
  modified_base 11: mod_base = OTHER; note = 2'-O-methylcytidine-3'-phosphate
  modified_base 12: mod_base = OTHER; note = 2'-O-methylcytidine-3'-phosphate
  modified_base 13: mod_base = OTHER; note = 2'-O-methyladenosine-3'-phosphate
  modified_base 14: mod_base = OTHER; note = 2'-fluorocytidine-3'-phosphate
  modified_base 15: mod_base = OTHER; note = 2'-O-methyluridine-3'-phosphate
  modified_base 16: mod_base = OTHER; note = 2'-fluorouridine-3'-phosphate
  modified_base 17: mod_base = OTHER; note = 2'-O-methyladenosine-3'-phosphate
  modified_base 18: mod_base = OTHER; note = 2'-O-methyluridine-3'-phosphate
  modified_base 19: mod_base = OTHER; note = 2'-O-methylcytidine-3'-phosphate
  modified_base 20: mod_base = OTHER; note = 2'-O-methyladenosine-3'-phosphate
  modified_base 21: mod_base = OTHER; note = 2'-O-methylcytidine-3'-phosphorothioate
  modified_base 22: mod_base = OTHER; note = 2'-O-methylcytidine-3'-phosphorothioate
  modified_base 23: mod_base = OTHER; note = 2'-O-methyluridine-3'-phosphate
tttctgttagccacttatcacct

SEQ ID NO: 4162 - RNA, 23 nt, synthetic construct
  source 1..23: mol_type = other RNA
  modified_base 1: mod_base = OTHER; note = Vinyl-phosphonate 2'-O-methyluridine-3'-phosphorothioate
  modified_base 2: mod_base = OTHER; note = 2'-fluoroadenosine-3'-phosphorothioate
  modified_base 3: mod_base = OTHER; note = 2'-O-methyladenosine-3'-phosphate
  modified_base 4: mod_base = OTHER; note = 2'-O-methyluridine-3'-phosphate
  modified_base 5: mod_base = OTHER; note = 2'-O-methyladenosine-3'-phosphate
  modified_base 6: mod_base = OTHER; note = 2'-fluoroguanosine-3'-phosphate
  modified_base 7: mod_base = OTHER; note = 2'-O-methyladenosine-3'-phosphate
  modified_base 8: mod_base = OTHER; note = 2'-fluoroadenosine-3'-phosphate
  modified_base 9: mod_base = OTHER; note = 2'-fluoroadenosine-3'-phosphate
  modified_base 10: mod_base = OTHER; note = 2'-O-methyladenosine-3'-phosphate
  modified_base 11: mod_base = OTHER; note = 2'-O-methyluridine-3'-phosphate
  modified_base 12: mod_base = OTHER; note = 2'-O-methyladenosine-3'-phosphate
  modified_base 13: mod_base = OTHER; note = 2'-O-methyluridine-3'-phosphate
  modified_base 14: mod_base = OTHER; note = 2'-fluorouridine-3'-phosphate
  modified_base 15: mod_base = OTHER; note = 2'-O-methyladenosine-3'-phosphate
  modified_base 16: mod_base = OTHER; note = 2'-fluoroguanosine-3'-phosphate
  modified_base 17: mod_base = OTHER; note = 2'-O-methylcytidine-3'-phosphate
  modified_base 18: mod_base = OTHER; note = 2'-O-methylcytidine-3'-phosphate
  modified_base 19: mod_base = OTHER; note = 2'-O-methyluridine-3'-phosphate
  modified_base 20: mod_base = OTHER; note = 2'-O-methyladenosine-3'-phosphate
  modified_base 21: mod_base = OTHER; note = 2'-O-methylcytidine-3'-phosphorothioate
  modified_base 22: mod_base = OTHER; note = 2'-O-methylcytidine-3'-phosphorothioate
  modified_base 23: mod_base = OTHER; note = 2'-O-methyladenosine-3'-phosphate
taatagaaaatattagcctacca

SEQ ID NO: 4163 - RNA, 23 nt, synthetic construct
  source 1..23: mol_type = other RNA
  modified_base 1: mod_base = OTHER; note = Vinyl-phosphonate 2'-O-methyluridine-3'-phosphorothioate
  modified_base 2: mod_base = OTHER; note = 2'-fluoroguanosine-3'-phosphorothioate
  modified_base 3: mod_base = OTHER; note = 2'-O-methyladenosine-3'-phosphate
  modified_base 4: mod_base = OTHER; note = 2'-O-methylcytidine-3'-phosphate
  modified_base 5: mod_base = OTHER; note = 2'-O-methyladenosine-3'-phosphate
  modified_base 6: mod_base = OTHER; note = 2'-fluoroguanosine-3'-phosphate
  modified_base 7: mod_base = OTHER; note = 2'-O-methyluridine-3'-phosphate
  modified_base 8: mod_base = OTHER; note = 2'-fluorocytidine-3'-phosphate
  modified_base 9: mod_base = OTHER; note = 2'-fluoroguanosine-3'-phosphate
  modified_base 10: mod_base = OTHER; note = 2'-O-methyladenosine-3'-phosphate
  modified_base 11: mod_base = OTHER; note = 2'-O-methylguanosine-3'-phosphate
  modified_base 12: mod_base = OTHER; note = 2'-O-methylguanosine-3'-phosphate
  modified_base 13: mod_base = OTHER; note = 2'-O-methyladenosine-3'-phosphate
  modified_base 14: mod_base = OTHER; note = 2'-fluorouridine-3'-phosphate
  modified_base 15: mod_base = OTHER; note = 2'-O-methylguanosine-3'-phosphate
  modified_base 16: mod_base = OTHER; note = 2'-fluoroadenosine-3'-phosphate
  modified_base 17: mod_base = OTHER; note = 2'-O-methyladenosine-3'-phosphate
  modified_base 18: mod_base = OTHER; note = 2'-O-methylguanosine-3'-phosphate
  modified_base 19: mod_base = OTHER; note = 2'-O-methyladenosine-3'-phosphate
  modified_base 20: mod_base = OTHER; note = 2'-O-methylguanosine-3'-phosphate
  modified_base 21: mod_base = OTHER; note = 2'-O-methylguanosine-3'-phosphorothioate
  modified_base 22: mod_base = OTHER; note = 2'-O-methylcytidine-3'-phosphorothioate
  modified_base 23: mod_base = OTHER; note = 2'-O-methylguanosine-3'-phosphate
tgacagtcgaggatgaagaggcg

SEQ ID NO: 4164 - RNA, 23 nt, synthetic construct
  source 1..23: mol_type = other RNA
  modified_base 1: mod_base = OTHER; note = Vinyl-phosphonate 2'-O-methyluridine-3'-phosphorothioate
  modified_base 2: mod_base = OTHER; note = 2'-fluorouridine -3'-phosphorothioate
  modified_base 3: mod_base = OTHER; note = 2'-O-methyladenosine-3'-phosphate
  modified_base 4: mod_base = OTHER; note = 2'-O-methyladenosine-3'-phosphate
  modified_base 5: mod_base = OTHER; note = 2'-O-methyluridine-3'-phosphate
  modified_base 6: mod_base = OTHER; note = 2'-fluoroadenosine-3'-phosphate
  modified_base 7: mod_base = OTHER; note = 2'-O-methyluridine-3'-phosphate
  modified_base 8: mod_base = OTHER; note = 2'-fluoroguanosine-3'-phosphate
  modified_base 9: mod_base = OTHER; note = 2'-fluoroguanosine-3'-phosphate
  modified_base 10: mod_base = OTHER; note = 2'-O-methylcytidine-3'-phosphate
  modified_base 11: mod_base = OTHER; note = 2'-O-methyluridine-3'-phosphate
  modified_base 12: mod_base = OTHER; note = 2'-O-methyluridine-3'-phosphate
  modified_base 13: mod_base = OTHER; note = 2'-O-methyladenosine-3'-phosphate
  modified_base 14: mod_base = OTHER; note = 2'-fluorouridine-3'-phosphate
  modified_base 15: mod_base = OTHER; note = 2'-O-methylguanosine-3'-phosphate
  modified_base 16: mod_base = OTHER; note = 2'-fluoroguanosine-3'-phosphate
  modified_base 17: mod_base = OTHER; note = 2'-O-methylcytidine-3'-phosphate
  modified_base 18: mod_base = OTHER; note = 2'-O-methyladenosine-3'-phosphate
  modified_base 19: mod_base = OTHER; note = 2'-O-methyladenosine-3'-phosphate
  modified_base 20: mod_base = OTHER; note = 2'-O-methyluridine-3'-phosphate
  modified_base 21: mod_base = OTHER; note = 2'-O-methyluridine-3'-phosphorothioate
  modified_base 22: mod_base = OTHER; note = 2'-O-methyluridine-3'-phosphorothioate
  modified_base 23: mod_base = OTHER; note = 2'-O-methylcytidine-3'-phosphate
ttaatatggcttatggcaatttc

SEQ ID NO: 4165 - RNA, 23 nt, synthetic construct
  source 1..23: mol_type = other RNA
  modified_base 1: mod_base = OTHER; note = Vinyl-phosphonate 2'-O-methyluridine-3'-phosphorothioate
  modified_base 2: mod_base = OTHER; note = 2'-fluorouridine -3'-phosphorothioate
  modified_base 3: mod_base = OTHER; note = 2'-O-methyluridine-3'-phosphate
  modified_base 4: mod_base = OTHER; note = 2'-O-methyladenosine-3'-phosphate
  modified_base 5: mod_base = OTHER; note = 2'-O-methylguanosine-3'-phosphate
  modified_base 6: mod_base = OTHER; note = 2'-fluorocytidine-3'-phosphate
  modified_base 7: mod_base = OTHER; note = 2'-O-methyluridine-3'-phosphate
  modified_base 8: mod_base = OTHER; note = 2'-fluoroguanosine-3'-phosphate
  modified_base 9: mod_base = OTHER; note = 2'-fluoroadenosine-3'-phosphate
  modified_base 10: mod_base = OTHER; note = 2'-O-methylcytidine-3'-phosphate
  modified_base 11: mod_base = OTHER; note = 2'-O-methyladenosine-3'-phosphate
  modified_base 12: mod_base = OTHER; note = 2'-O-methyladenosine-3'-phosphate
  modified_base 13: mod_base = OTHER; note = 2'-O-methyladenosine-3'-phosphate
  modified_base 14: mod_base = OTHER; note = 2'-fluoroadenosine-3'-phosphate
  modified_base 15: mod_base = OTHER; note = 2'-O-methyluridine-3'-phosphate
  modified_base 16: mod_base = OTHER; note = 2'-fluoroadenosine-3'-phosphate
  modified_base 17: mod_base = OTHER; note = 2'-O-methyluridine-3'-phosphate
  modified_base 18: mod_base = OTHER; note = 2'-O-methyluridine-3'-phosphate
  modified_base 19: mod_base = OTHER; note = 2'-O-methylcytidine-3'-phosphate
  modified_base 20: mod_base = OTHER; note = 2'-O-methylguanosine-3'-phosphate
  modified_base 21: mod_base = OTHER; note = 2'-O-methylcytidine-3'-phosphorothioate
  modified_base 22: mod_base = OTHER; note = 2'-O-methylcytidine-3'-phosphorothioate
  modified_base 23: mod_base = OTHER; note = 2'-O-methylguanosine-3'-phosphate
tttagctgacaaaatattcgccg

SEQ ID NO: 4166 - RNA, 23 nt, synthetic construct
  source 1..23: mol_type = other RNA
  modified_base 1: mod_base = OTHER; note = Vinyl-phosphonate 2'-O-methyluridine-3'-phosphorothioate
  modified_base 2: mod_base = OTHER; note = 2'-fluorouridine -3'-phosphorothioate
  modified_base 3: mod_base = OTHER; note = 2'-O-methylcytidine-3'-phosphate
  modified_base 4: mod_base = OTHER; note = 2'-O-methyladenosine-3'-phosphate
  modified_base 5: mod_base = OTHER; note = 2'-O-methylguanosine-3'-phosphate
  modified_base 6: mod_base = OTHER; note = 2'-fluoroadenosine-3'-phosphate
  modified_base 7: mod_base = OTHER; note = 2'-O-methyladenosine-3'-phosphate
  modified_base 8: mod_base = OTHER; note = 2'-fluoroadenosine-3'-phosphate
  modified_base 9: mod_base = OTHER; note = 2'-fluoroguanosine-3'-phosphate
  modified_base 10: mod_base = OTHER; note = 2'-O-methylguanosine-3'-phosphate
  modified_base 11: mod_base = OTHER; note = 2'-O-methylcytidine-3'-phosphate
  modified_base 12: mod_base = OTHER; note = 2'-O-methyladenosine-3'-phosphate
  modified_base 13: mod_base = OTHER; note = 2'-O-methyladenosine-3'-phosphate
  modified_base 14: mod_base = OTHER; note = 2'-fluorocytidine-3'-phosphate
  modified_base 15: mod_base = OTHER; note = 2'-O-methyladenosine-3'-phosphate
  modified_base 16: mod_base = OTHER; note = 2'-fluorocytidine-3'-phosphate
  modified_base 17: mod_base = OTHER; note = 2'-O-methyluridine-3'-phosphate
  modified_base 18: mod_base = OTHER; note = 2'-O-methylguanosine-3'-phosphate
  modified_base 19: mod_base = OTHER; note = 2'-O-methylguanosine-3'-phosphate
  modified_base 20: mod_base = OTHER; note = 2'-O-methyladenosine-3'-phosphate
  modified_base 21: mod_base = OTHER; note = 2'-O-methyluridine-3'-phosphorothioate
  modified_base 22: mod_base = OTHER; note = 2'-O-methyluridine-3'-phosphorothioate
  modified_base 23: mod_base = OTHER; note = 2'-O-methylcytidine-3'-phosphate
ttcagaaaggcaacactggattc

SEQ ID NO: 4167 - RNA, 23 nt, synthetic construct
  source 1..23: mol_type = other RNA
  modified_base 1: mod_base = OTHER; note = Vinyl-phosphonate 2'-O-methyluridine-3'-phosphorothioate
  modified_base 2: mod_base = OTHER; note = 2'-fluorouridine -3'-phosphorothioate
  modified_base 3: mod_base = OTHER; note = 2'-O-methyluridine-3'-phosphate
  modified_base 4: mod_base = OTHER; note = 2'-O-methyluridine-3'-phosphate
  modified_base 5: mod_base = OTHER; note = 2'-O-methyladenosine-3'-phosphate
  modified_base 6: mod_base = OTHER; note = 2'-fluoroguanosine-3'-phosphate
  modified_base 7: mod_base = OTHER; note = 2'-O-methyladenosine-3'-phosphate
  modified_base 8: mod_base = OTHER; note = 2'-fluorocytidine-3'-phosphate
  modified_base 9: mod_base = OTHER; note = 2'-fluoroadenosine-3'-phosphate
  modified_base 10: mod_base = OTHER; note = 2'-O-methylguanosine-3'-phosphate
  modified_base 11: mod_base = OTHER; note = 2'-O-methylguanosine-3'-phosphate
  modified_base 12: mod_base = OTHER; note = 2'-O-methylcytidine-3'-phosphate
  modified_base 13: mod_base = OTHER; note = 2'-O-methyladenosine-3'-phosphate
  modified_base 14: mod_base = OTHER; note = 2'-fluorouridine-3'-phosphate
  modified_base 15: mod_base = OTHER; note = 2'-O-methyladenosine-3'-phosphate
  modified_base 16: mod_base = OTHER; note = 2'-fluoroguanosine-3'-phosphate
  modified_base 17: mod_base = OTHER; note = 2'-O-methyladenosine-3'-phosphate
  modified_base 18: mod_base = OTHER; note = 2'-O-methylcytidine-3'-phosphate
  modified_base 19: mod_base = OTHER; note = 2'-O-methyluridine-3'-phosphate
  modified_base 20: mod_base = OTHER; note = 2'-O-methyluridine-3'-phosphate
  modified_base 21: mod_base = OTHER; note = 2'-O-methyluridine-3'-phosphorothioate
  modified_base 22: mod_base = OTHER; note = 2'-O-methyluridine-3'-phosphorothioate
  modified_base 23: mod_base = OTHER; note = 2'-O-methylcytidine-3'-phosphate
ttttagacaggcatagacttttc

SEQ ID NO: 4168 - RNA, 23 nt, synthetic construct
  source 1..23: mol_type = other RNA
  modified_base 1: mod_base = OTHER; note = Vinyl-phosphonate 2'-O-methyluridine-3'-phosphorothioate
  modified_base 2: mod_base = OTHER; note = 2'-fluoroadenosine-3'-phosphorothioate
  modified_base 3: mod_base = OTHER; note = 2'-O-methyladenosine-3'-phosphate
  modified_base 4: mod_base = OTHER; note = 2'-O-methyluridine-3'-phosphate
  modified_base 5: mod_base = OTHER; note = 2'-O-methyluridine-3'-phosphate
  modified_base 6: mod_base = OTHER; note = 2'-fluorocytidine-3'-phosphate
  modified_base 7: mod_base = OTHER; note = 2'-O-methyladenosine-3'-phosphate
  modified_base 8: mod_base = OTHER; note = 2'-fluoroadenosine-3'-phosphate
  modified_base 9: mod_base = OTHER; note = 2'-fluoroadenosine-3'-phosphate
  modified_base 10: mod_base = OTHER; note = 2'-O-methylcytidine-3'-phosphate
  modified_base 11: mod_base = OTHER; note = 2'-O-methyluridine-3'-phosphate
  modified_base 12: mod_base = OTHER; note = 2'-O-methyluridine-3'-phosphate
  modified_base 13: mod_base = OTHER; note = 2'-O-methylcytidine-3'-phosphate
  modified_base 14: mod_base = OTHER; note = 2'-fluorouridine-3'-phosphate
  modified_base 15: mod_base = OTHER; note = 2'-O-methylguanosine-3'-phosphate
  modified_base 16: mod_base = OTHER; note = 2'-fluoroadenosine-3'-phosphate
  modified_base 17: mod_base = OTHER; note = 2'-O-methyluridine-3'-phosphate
  modified_base 18: mod_base = OTHER; note = 2'-O-methylguanosine-3'-phosphate
  modified_base 19: mod_base = OTHER; note = 2'-O-methyluridine-3'-phosphate
  modified_base 20: mod_base = OTHER; note = 2'-O-methylcytidine-3'-phosphate
  modified_base 21: mod_base = OTHER; note = 2'-O-methylcytidine-3'-phosphorothioate
  modified_base 22: mod_base = OTHER; note = 2'-O-methyladenosine-3'-phosphorothioate
  modified_base 23: mod_base = OTHER; note = 2'-O-methyluridine-3'-phosphate
taattcaaacttctgatgtccat

SEQ ID NO: 4169 - RNA, 23 nt, synthetic construct
  source 1..23: mol_type = other RNA
  modified_base 1: mod_base = OTHER; note = Vinyl-phosphonate 2'-O-methyluridine-3'-phosphorothioate
  modified_base 2: mod_base = OTHER; note = 2'-fluoroadenosine-3'-phosphorothioate
  modified_base 3: mod_base = OTHER; note = 2'-O-methylguanosine-3'-phosphate
  modified_base 4: mod_base = OTHER; note = 2'-O-methyladenosine-3'-phosphate
  modified_base 5: mod_base = OTHER; note = 2'-O-methyladenosine-3'-phosphate
  modified_base 6: mod_base = OTHER; note = 2'-fluoroadenosine-3'-phosphate
  modified_base 7: mod_base = OTHER; note = 2'-O-methyluridine-3'-phosphate
  modified_base 8: mod_base = OTHER; note = 2'-fluoroadenosine-3'-phosphate
  modified_base 9: mod_base = OTHER; note = 2'-fluorouridine-3'-phosphate
  modified_base 10: mod_base = OTHER; note = 2'-O-methyladenosine-3'-phosphate
  modified_base 11: mod_base = OTHER; note = 2'-O-methyladenosine-3'-phosphate
  modified_base 12: mod_base = OTHER; note = 2'-O-methylguanosine-3'-phosphate
  modified_base 13: mod_base = OTHER; note = 2'-O-methylcytidine-3'-phosphate
  modified_base 14: mod_base = OTHER; note = 2'-fluoroadenosine-3'-phosphate
  modified_base 15: mod_base = OTHER; note = 2'-O-methyladenosine-3'-phosphate
  modified_base 16: mod_base = OTHER; note = 2'-fluorouridine-3'-phosphate
  modified_base 17: mod_base = OTHER; note = 2'-O-methyluridine-3'-phosphate
  modified_base 18: mod_base = OTHER; note = 2'-O-methylcytidine-3'-phosphate
  modified_base 19: mod_base = OTHER; note = 2'-O-methylguanosine-3'-phosphate
  modified_base 20: mod_base = OTHER; note = 2'-O-methylcytidine-3'-phosphate
  modified_base 21: mod_base = OTHER; note = 2'-O-methylcytidine-3'-phosphorothioate
  modified_base 22: mod_base = OTHER; note = 2'-O-methylcytidine-3'-phosphorothioate
  modified_base 23: mod_base = OTHER; note = 2'-O-methyladenosine-3'-phosphate
tagaaatataagcaattcgccca

SEQ ID NO: 4170 - RNA, 23 nt, synthetic construct
  source 1..23: mol_type = other RNA
  modified_base 1: mod_base = OTHER; note = Vinyl-phosphonate 2'-O-methyluridine-3'-phosphorothioate
  modified_base 2: mod_base = OTHER; note = 2'-fluoroadenosine-3'-phosphorothioate
  modified_base 3: mod_base = OTHER; note = 2'-O-methylcytidine-3'-phosphate
  modified_base 4: mod_base = OTHER; note = 2'-O-methyluridine-3'-phosphate
  modified_base 5: mod_base = OTHER; note = 2'-O-methylguanosine-3'-phosphate
  modified_base 6: mod_base = OTHER; note = 2'-fluoroguanosine-3'-phosphate
  modified_base 7: mod_base = OTHER; note = 2'-O-methyluridine-3'-phosphate
  modified_base 8: mod_base = OTHER; note = 2'-fluorouridine-3'-phosphate
  modified_base 9: mod_base = OTHER; note = 2'-fluorouridine-3'-phosphate
  modified_base 10: mod_base = OTHER; note = 2'-O-methyladenosine-3'-phosphate
  modified_base 11: mod_base = OTHER; note = 2'-O-methylcytidine-3'-phosphate
  modified_base 12: mod_base = OTHER; note = 2'-O-methyladenosine-3'-phosphate
  modified_base 13: mod_base = OTHER; note = 2'-O-methylcytidine-3'-phosphate
  modified_base 14: mod_base = OTHER; note = 2'-fluoroadenosine-3'-phosphate
  modified_base 15: mod_base = OTHER; note = 2'-O-methyluridine-3'-phosphate
  modified_base 16: mod_base = OTHER; note = 2'-fluoroadenosine-3'-phosphate
  modified_base 17: mod_base = OTHER; note = 2'-O-methylguanosine-3'-phosphate
  modified_base 18: mod_base = OTHER; note = 2'-O-methyluridine-3'-phosphate
  modified_base 19: mod_base = OTHER; note = 2'-O-methylguanosine-3'-phosphate
  modified_base 20: mod_base = OTHER; note = 2'-O-methyluridine-3'-phosphate
  modified_base 21: mod_base = OTHER; note = 2'-O-methylguanosine-3'-phosphorothioate
  modified_base 22: mod_base = OTHER; note = 2'-O-methyluridine-3'-phosphorothioate
  modified_base 23: mod_base = OTHER; note = 2'-O-methylguanosine-3'-phosphate
tactggtttacacatagtgtgtg

SEQ ID NO: 4171 - RNA, 23 nt, synthetic construct
  source 1..23: mol_type = other RNA
  modified_base 1: mod_base = OTHER; note = Vinyl-phosphonate 2'-O-methyluridine-3'-phosphorothioate
  modified_base 2: mod_base = OTHER; note = 2'-fluoroadenosine-3'-phosphorothioate
  modified_base 3: mod_base = OTHER; note = 2'-O-methyladenosine-3'-phosphate
  modified_base 4: mod_base = OTHER; note = 2'-O-methyluridine-3'-phosphate
  modified_base 5: mod_base = OTHER; note = 2'-O-methylguanosine-3'-phosphate
  modified_base 6: mod_base = OTHER; note = 2'-fluorouridine-3'-phosphate
  modified_base 7: mod_base = OTHER; note = 2'-O-methyluridine-3'-phosphate
  modified_base 8: mod_base = OTHER; note = 2'-fluorouridine-3'-phosphate
  modified_base 9: mod_base = OTHER; note = 2'-fluorouridine-3'-phosphate
  modified_base 10: mod_base = OTHER; note = 2'-O-methylcytidine-3'-phosphate
  modified_base 11: mod_base = OTHER; note = 2'-O-methyluridine-3'-phosphate
  modified_base 12: mod_base = OTHER; note = 2'-O-methyluridine-3'-phosphate
  modified_base 13: mod_base = OTHER; note = 2'-O-methylcytidine-3'-phosphate
  modified_base 14: mod_base = OTHER; note = 2'-fluorouridine-3'-phosphate
  modified_base 15: mod_base = OTHER; note = 2'-O-methyluridine-3'-phosphate
  modified_base 16: mod_base = OTHER; note = 2'-fluorocytidine-3'-phosphate
  modified_base 17: mod_base = OTHER; note = 2'-O-methyladenosine-3'-phosphate
  modified_base 18: mod_base = OTHER; note = 2'-O-methylcytidine-3'-phosphate
  modified_base 19: mod_base = OTHER; note = 2'-O-methylcytidine-3'-phosphate
  modified_base 20: mod_base = OTHER; note = 2'-O-methyluridine-3'-phosphate
  modified_base 21: mod_base = OTHER; note = 2'-O-methylguanosine-3'-phosphorothioate
  modified_base 22: mod_base = OTHER; note = 2'-O-methyladenosine-3'-phosphorothioate
  modified_base 23: mod_base = OTHER; note = 2'-O-methyluridine-3'-phosphate
taatgttttcttcttcacctgat

SEQ ID NO: 4172 - RNA, 23 nt, synthetic construct
  source 1..23: mol_type = other RNA
  modified_base 1: mod_base = OTHER; note = Vinyl-phosphonate 2'-O-methyluridine-3'-phosphorothioate
  modified_base 2: mod_base = OTHER; note = 2'-fluoroadenosine-3'-phosphorothioate
  modified_base 3: mod_base = OTHER; note = 2'-O-methylguanosine-3'-phosphate
  modified_base 4: mod_base = OTHER; note = 2'-O-methyluridine-3'-phosphate
  modified_base 5: mod_base = OTHER; note = 2'-O-methylguanosine-3'-phosphate
  modified_base 6: mod_base = OTHER; note = 2'-fluoroadenosine-3'-phosphate
  modified_base 7: mod_base = OTHER; note = 2'-O-methyladenosine-3'-phosphate
  modified_base 8: mod_base = OTHER; note = 2'-fluoroadenosine-3'-phosphate
  modified_base 9: mod_base = OTHER; note = 2'-fluoroadenosine-3'-phosphate
  modified_base 10: mod_base = OTHER; note = 2'-O-methyladenosine-3'-phosphate
  modified_base 11: mod_base = OTHER; note = 2'-O-methyluridine-3'-phosphate
  modified_base 12: mod_base = OTHER; note = 2'-O-methyladenosine-3'-phosphate
  modified_base 13: mod_base = OTHER; note = 2'-O-methyladenosine-3'-phosphate
  modified_base 14: mod_base = OTHER; note = 2'-fluoroguanosine-3'-phosphate
  modified_base 15: mod_base = OTHER; note = 2'-O-methyladenosine-3'-phosphate
  modified_base 16: mod_base = OTHER; note = 2'-fluoroguanosine-3'-phosphate
  modified_base 17: mod_base = OTHER; note = 2'-O-methylcytidine-3'-phosphate
  modified_base 18: mod_base = OTHER; note = 2'-O-methyluridine-3'-phosphate
  modified_base 19: mod_base = OTHER; note = 2'-O-methylcytidine-3'-phosphate
  modified_base 20: mod_base = OTHER; note = 2'-O-methyladenosine-3'-phosphate
  modified_base 21: mod_base = OTHER; note = 2'-O-methylcytidine-3'-phosphorothioate
  modified_base 22: mod_base = OTHER; note = 2'-O-methyluridine-3'-phosphorothioate
  modified_base 23: mod_base = OTHER; note = 2'-O-methyladenosine-3'-phosphate
tagtgaaaaataagagctcacta

SEQ ID NO: 4173 - RNA, 23 nt, synthetic construct
  source 1..23: mol_type = other RNA
  modified_base 1: mod_base = OTHER; note = Vinyl-phosphonate 2'-O-methyluridine-3'-phosphorothioate
  modified_base 2: mod_base = OTHER; note = 2'-fluoroadenosine-3'-phosphorothioate
  modified_base 3: mod_base = OTHER; note = 2'-O-methylguanosine-3'-phosphate
  modified_base 4: mod_base = OTHER; note = 2'-O-methyluridine-3'-phosphate
  modified_base 5: mod_base = OTHER; note = 2'-O-methyluridine-3'-phosphate
  modified_base 6: mod_base = OTHER; note = 2'-fluorouridine-3'-phosphate
  modified_base 7: mod_base = OTHER; note = 2'-O-methyladenosine-3'-phosphate
  modified_base 8: mod_base = OTHER; note = 2'-fluorouridine-3'-phosphate
  modified_base 9: mod_base = OTHER; note = 2'-fluorouridine-3'-phosphate
  modified_base 10: mod_base = OTHER; note = 2'-O-methylcytidine-3'-phosphate
  modified_base 11: mod_base = OTHER; note = 2'-O-methylcytidine-3'-phosphate
  modified_base 12: mod_base = OTHER; note = 2'-O-methylcytidine-3'-phosphate
  modified_base 13: mod_base = OTHER; note = 2'-O-methyladenosine-3'-phosphate
  modified_base 14: mod_base = OTHER; note = 2'-fluorouridine-3'-phosphate
  modified_base 15: mod_base = OTHER; note = 2'-O-methylcytidine-3'-phosphate
  modified_base 16: mod_base = OTHER; note = 2'-fluoroadenosine-3'-phosphate
  modified_base 17: mod_base = OTHER; note = 2'-O-methylguanosine-3'-phosphate
  modified_base 18: mod_base = OTHER; note = 2'-O-methylcytidine-3'-phosphate
  modified_base 19: mod_base = OTHER; note = 2'-O-methyluridine-3'-phosphate
  modified_base 20: mod_base = OTHER; note = 2'-O-methyluridine-3'-phosphate
  modified_base 21: mod_base = OTHER; note = 2'-O-methyluridine-3'-phosphorothioate
  modified_base 22: mod_base = OTHER; note = 2'-O-methyladenosine-3'-phosphorothioate
  modified_base 23: mod_base = OTHER; note = 2'-O-methylcytidine-3'-phosphate
tagtttattcccatcagctttac

SEQ ID NO: 4174 - RNA, 23 nt, synthetic construct
  source 1..23: mol_type = other RNA
  modified_base 1: mod_base = OTHER; note = Vinyl-phosphonate 2'-O-methyluridine-3'-phosphorothioate
  modified_base 2: mod_base = OTHER; note = 2'-fluoroguanosine-3'-phosphorothioate
  modified_base 3: mod_base = OTHER; note = 2'-O-methylcytidine-3'-phosphate
  modified_base 4: mod_base = OTHER; note = 2'-O-methyladenosine-3'-phosphate
  modified_base 5: mod_base = OTHER; note = 2'-O-methylguanosine-3'-phosphate
  modified_base 6: mod_base = OTHER; note = 2'-fluorouridine-3'-phosphate
  modified_base 7: mod_base = OTHER; note = 2'-O-methyluridine-3'-phosphate
  modified_base 8: mod_base = OTHER; note = 2'-fluorouridine-3'-phosphate
  modified_base 9: mod_base = OTHER; note = 2'-fluorocytidine-3'-phosphate
  modified_base 10: mod_base = OTHER; note = 2'-O-methyluridine-3'-phosphate
  modified_base 11: mod_base = OTHER; note = 2'-O-methylcytidine-3'-phosphate
  modified_base 12: mod_base = OTHER; note = 2'-O-methylcytidine-3'-phosphate
  modified_base 13: mod_base = OTHER; note = 2'-O-methyluridine-3'-phosphate
  modified_base 14: mod_base = OTHER; note = 2'-fluoroadenosine-3'-phosphate
  modified_base 15: mod_base = OTHER; note = 2'-O-methyladenosine-3'-phosphate
  modified_base 16: mod_base = OTHER; note = 2'-fluorocytidine-3'-phosphate
  modified_base 17: mod_base = OTHER; note = 2'-O-methylguanosine-3'-phosphate
  modified_base 18: mod_base = OTHER; note = 2'-O-methyladenosine-3'-phosphate
  modified_base 19: mod_base = OTHER; note = 2'-O-methylcytidine-3'-phosphate
  modified_base 20: mod_base = OTHER; note = 2'-O-methyladenosine-3'-phosphate
  modified_base 21: mod_base = OTHER; note = 2'-O-methylcytidine-3'-phosphorothioate
  modified_base 22: mod_base = OTHER; note = 2'-O-methylguanosine-3'-phosphorothioate
  modified_base 23: mod_base = OTHER; note = 2'-O-methylcytidine-3'-phosphate
tgcagtttctcctaacgacacgc

SEQ ID NO: 4175 - RNA, 23 nt, synthetic construct
  source 1..23: mol_type = other RNA
  modified_base 1: mod_base = OTHER; note = Vinyl-phosphonate 2'-O-methyluridine-3'-phosphorothioate
  modified_base 2: mod_base = OTHER; note = 2'-fluoroadenosine-3'-phosphorothioate
  modified_base 3: mod_base = OTHER; note = 2'-O-methyluridine-3'-phosphate
  modified_base 4: mod_base = OTHER; note = 2'-O-methyladenosine-3'-phosphate
  modified_base 5: mod_base = OTHER; note = 2'-O-methylcytidine-3'-phosphate
  modified_base 6: mod_base = OTHER; note = 2'-fluorocytidine-3'-phosphate
  modified_base 7: mod_base = OTHER; note = 2'-O-methyladenosine-3'-phosphate
  modified_base 8: mod_base = OTHER; note = 2'-fluorouridine-3'-phosphate
  modified_base 9: mod_base = OTHER; note = 2'-fluorouridine-3'-phosphate
  modified_base 10: mod_base = OTHER; note = 2'-O-methylguanosine-3'-phosphate
  modified_base 11: mod_base = OTHER; note = 2'-O-methyluridine-3'-phosphate
  modified_base 12: mod_base = OTHER; note = 2'-O-methyluridine-3'-phosphate
  modified_base 13: mod_base = OTHER; note = 2'-O-methyluridine-3'-phosphate
  modified_base 14: mod_base = OTHER; note = 2'-fluorouridine-3'-phosphate
  modified_base 15: mod_base = OTHER; note = 2'-O-methyladenosine-3'-phosphate
  modified_base 16: mod_base = OTHER; note = 2'-fluoroadenosine-3'-phosphate
  modified_base 17: mod_base = OTHER; note = 2'-O-methylguanosine-3'-phosphate
  modified_base 18: mod_base = OTHER; note = 2'-O-methyluridine-3'-phosphate
  modified_base 19: mod_base = OTHER; note = 2'-O-methylcytidine-3'-phosphate
  modified_base 20: mod_base = OTHER; note = 2'-O-methylcytidine-3'-phosphate
  modified_base 21: mod_base = OTHER; note = 2'-O-methylcytidine-3'-phosphorothioate
  modified_base 22: mod_base = OTHER; note = 2'-O-methyladenosine-3'-phosphorothioate
  modified_base 23: mod_base = OTHER; note = 2'-O-methyladenosine-3'-phosphate
tataccattgttttaagtcccaa

SEQ ID NO: 4176 - RNA, 23 nt, synthetic construct
  source 1..23: mol_type = other RNA
  modified_base 1: mod_base = OTHER; note = Vinyl-phosphonate 2'-O-methyluridine-3'-phosphorothioate
  modified_base 2: mod_base = OTHER; note = 2'-fluoroadenosine-3'-phosphorothioate
  modified_base 3: mod_base = OTHER; note = 2'-O-methyluridine-3'-phosphate
  modified_base 4: mod_base = OTHER; note = 2'-O-methylguanosine-3'-phosphate
  modified_base 5: mod_base = OTHER; note = 2'-O-methylguanosine-3'-phosphate
  modified_base 6: mod_base = OTHER; note = 2'-fluorouridine-3'-phosphate
  modified_base 7: mod_base = OTHER; note = 2'-O-methyluridine-3'-phosphate
  modified_base 8: mod_base = OTHER; note = 2'-fluoroadenosine-3'-phosphate
  modified_base 9: mod_base = OTHER; note = 2'-fluoroadenosine-3'-phosphate
  modified_base 10: mod_base = OTHER; note = 2'-O-methyluridine-3'-phosphate
  modified_base 11: mod_base = OTHER; note = 2'-O-methyluridine-3'-phosphate
  modified_base 12: mod_base = OTHER; note = 2'-O-methylcytidine-3'-phosphate
  modified_base 13: mod_base = OTHER; note = 2'-O-methyluridine-3'-phosphate
  modified_base 14: mod_base = OTHER; note = 2'-fluoroadenosine-3'-phosphate
  modified_base 15: mod_base = OTHER; note = 2'-O-methylcytidine-3'-phosphate
  modified_base 16: mod_base = OTHER; note = 2'-fluorocytidine-3'-phosphate
  modified_base 17: mod_base = OTHER; note = 2'-O-methyladenosine-3'-phosphate
  modified_base 18: mod_base = OTHER; note = 2'-O-methyluridine-3'-phosphate
  modified_base 19: mod_base = OTHER; note = 2'-O-methylcytidine-3'-phosphate
  modified_base 20: mod_base = OTHER; note = 2'-O-methyladenosine-3'-phosphate
  modified_base 21: mod_base = OTHER; note = 2'-O-methylguanosine-3'-phosphorothioate
  modified_base 22: mod_base = OTHER; note = 2'-O-methyladenosine-3'-phosphorothioate
  modified_base 23: mod_base = OTHER; note = 2'-O-methyladenosine-3'-phosphate
tatggttaattctaccatcagaa

SEQ ID NO: 4177 - RNA, 23 nt, synthetic construct
  source 1..23: mol_type = other RNA
  modified_base 1: mod_base = OTHER; note = Vinyl-phosphonate 2'-O-methyluridine-3'-phosphorothioate
  modified_base 2: mod_base = OTHER; note = 2'-fluoroadenosine-3'-phosphorothioate
  modified_base 3: mod_base = OTHER; note = 2'-O-methylguanosine-3'-phosphate
  modified_base 4: mod_base = OTHER; note = 2'-O-methyladenosine-3'-phosphate
  modified_base 5: mod_base = OTHER; note = 2'-O-methyladenosine-3'-phosphate
  modified_base 6: mod_base = OTHER; note = 2'-fluoroadenosine-3'-phosphate
  modified_base 7: mod_base = OTHER; note = 2'-O-methyluridine-3'-phosphate
  modified_base 8: mod_base = OTHER; note = 2'-fluoroadenosine-3'-phosphate
  modified_base 9: mod_base = OTHER; note = 2'-fluoroadenosine-3'-phosphate
  modified_base 10: mod_base = OTHER; note = 2'-O-methyladenosine-3'-phosphate
  modified_base 11: mod_base = OTHER; note = 2'-O-methyladenosine-3'-phosphate
  modified_base 12: mod_base = OTHER; note = 2'-O-methylcytidine-3'-phosphate
  modified_base 13: mod_base = OTHER; note = 2'-O-methyladenosine-3'-phosphate
  modified_base 14: mod_base = OTHER; note = 2'-fluorocytidine-3'-phosphate
  modified_base 15: mod_base = OTHER; note = 2'-O-methyladenosine-3'-phosphate
  modified_base 16: mod_base = OTHER; note = 2'-fluorocytidine-3'-phosphate
  modified_base 17: mod_base = OTHER; note = 2'-O-methyladenosine-3'-phosphate
  modified_base 18: mod_base = OTHER; note = 2'-O-methyluridine-3'-phosphate
  modified_base 19: mod_base = OTHER; note = 2'-O-methyladenosine-3'-phosphate
  modified_base 20: mod_base = OTHER; note = 2'-O-methylguanosine-3'-phosphate
  modified_base 21: mod_base = OTHER; note = 2'-O-methyluridine-3'-phosphorothioate
  modified_base 22: mod_base = OTHER; note = 2'-O-methyladenosine-3'-phosphorothioate
  modified_base 23: mod_base = OTHER; note = 2'-O-methylguanosine-3'-phosphate
tagaaataaaacacacatagtag

SEQ ID NO: 4178 - RNA, 23 nt, synthetic construct
  source 1..23: mol_type = other RNA
  modified_base 1: mod_base = OTHER; note = Vinyl-phosphonate 2'-O-methyluridine-3'-phosphorothioate
  modified_base 2: mod_base = OTHER; note = 2'-fluoroguanosine-3'-phosphorothioate
  modified_base 3: mod_base = OTHER; note = 2'-O-methyluridine-3'-phosphate
  modified_base 4: mod_base = OTHER; note = 2'-O-methylguanosine-3'-phosphate
  modified_base 5: mod_base = OTHER; note = 2'-O-methylcytidine-3'-phosphate
  modified_base 6: mod_base = OTHER; note = 2'-fluoroadenosine-3'-phosphate
  modified_base 7: mod_base = OTHER; note = 2'-O-methyladenosine-3'-phosphate
  modified_base 8: mod_base = OTHER; note = 2'-fluoroadenosine-3'-phosphate
  modified_base 9: mod_base = OTHER; note = 2'-fluorouridine-3'-phosphate
  modified_base 10: mod_base = OTHER; note = 2'-O-methyladenosine-3'-phosphate
  modified_base 11: mod_base = OTHER; note = 2'-O-methyluridine-3'-phosphate
  modified_base 12: mod_base = OTHER; note = 2'-O-methyladenosine-3'-phosphate
  modified_base 13: mod_base = OTHER; note = 2'-O-methyladenosine-3'-phosphate
  modified_base 14: mod_base = OTHER; note = 2'-fluoroadenosine-3'-phosphate
  modified_base 15: mod_base = OTHER; note = 2'-O-methyluridine-3'-phosphate
  modified_base 16: mod_base = OTHER; note = 2'-fluorouridine-3'-phosphate
  modified_base 17: mod_base = OTHER; note = 2'-O-methyladenosine-3'-phosphate
  modified_base 18: mod_base = OTHER; note = 2'-O-methyluridine-3'-phosphate
  modified_base 19: mod_base = OTHER; note = 2'-O-methylcytidine-3'-phosphate
  modified_base 20: mod_base = OTHER; note = 2'-O-methyladenosine-3'-phosphate
  modified_base 21: mod_base = OTHER; note = 2'-O-methylguanosine-3'-phosphorothioate
  modified_base 22: mod_base = OTHER; note = 2'-O-methyluridine-3'-phosphorothioate
  modified_base 23: mod_base = OTHER; note = 2'-O-methylcytidine-3'-phosphate
tgtgcaaatataaattatcagtc

SEQ ID NO: 4179 - RNA, 23 nt, synthetic construct
  source 1..23: mol_type = other RNA
  modified_base 1: mod_base = OTHER; note = Vinyl-phosphonate 2'-O-methyluridine-3'-phosphorothioate
  modified_base 2: mod_base = OTHER; note = 2'-fluoroguanosine-3'-phosphorothioate
  modified_base 3: mod_base = OTHER; note = 2'-O-methylguanosine-3'-phosphate
  modified_base 4: mod_base = OTHER; note = 2'-O-methylguanosine-3'-phosphate
  modified_base 5: mod_base = OTHER; note = 2'-O-methyluridine-3'-phosphate
  modified_base 6: mod_base = OTHER; note = 2'-fluorouridine-3'-phosphate
  modified_base 7: mod_base = OTHER; note = 2'-O-methyladenosine-3'-phosphate
  modified_base 8: mod_base = OTHER; note = 2'-fluoroadenosine-3'-phosphate
  modified_base 9: mod_base = OTHER; note = 2'-fluoroadenosine-3'-phosphate
  modified_base 10: mod_base = OTHER; note = 2'-O-methyluridine-3'-phosphate
  modified_base 11: mod_base = OTHER; note = 2'-O-methyladenosine-3'-phosphate
  modified_base 12: mod_base = OTHER; note = 2'-O-methyladenosine-3'-phosphate
  modified_base 13: mod_base = OTHER; note = 2'-O-methyluridine-3'-phosphate
  modified_base 14: mod_base = OTHER; note = 2'-fluorouridine-3'-phosphate
  modified_base 15: mod_base = OTHER; note = 2'-O-methyluridine-3'-phosphate
  modified_base 16: mod_base = OTHER; note = 2'-fluoroadenosine-3'-phosphate
  modified_base 17: mod_base = OTHER; note = 2'-O-methyladenosine-3'-phosphate
  modified_base 18: mod_base = OTHER; note = 2'-O-methylguanosine-3'-phosphate
  modified_base 19: mod_base = OTHER; note = 2'-O-methylguanosine-3'-phosphate
  modified_base 20: mod_base = OTHER; note = 2'-O-methyladenosine-3'-phosphate
  modified_base 21: mod_base = OTHER; note = 2'-O-methylcytidine-3'-phosphorothioate
  modified_base 22: mod_base = OTHER; note = 2'-O-methyluridine-3'-phosphorothioate
  modified_base 23: mod_base = OTHER; note = 2'-O-methyladenosine-3'-phosphate
tgggttaaataatttaaggacta

SEQ ID NO: 4180 - RNA, 23 nt, synthetic construct
  source 1..23: mol_type = other RNA
  modified_base 1: mod_base = OTHER; note = Vinyl-phosphonate 2'-O-methyluridine-3'-phosphorothioate
  modified_base 2: mod_base = OTHER; note = 2'-fluoroadenosine-3'-phosphorothioate
  modified_base 3: mod_base = OTHER; note = 2'-O-methylguanosine-3'-phosphate
  modified_base 4: mod_base = OTHER; note = 2'-O-methyladenosine-3'-phosphate
  modified_base 5: mod_base = OTHER; note = 2'-O-methyluridine-3'-phosphate
  modified_base 6: mod_base = OTHER; note = 2'-fluorocytidine-3'-phosphate
  modified_base 7: mod_base = OTHER; note = 2'-O-methyluridine-3'-phosphate
  modified_base 8: mod_base = OTHER; note = 2'-fluoroguanosine-3'-phosphate
  modified_base 9: mod_base = OTHER; note = 2'-fluoroadenosine-3'-phosphate
  modified_base 10: mod_base = OTHER; note = 2'-O-methylcytidine-3'-phosphate
  modified_base 11: mod_base = OTHER; note = 2'-O-methyladenosine-3'-phosphate
  modified_base 12: mod_base = OTHER; note = 2'-O-methylcytidine-3'-phosphate
  modified_base 13: mod_base = OTHER; note = 2'-O-methylcytidine-3'-phosphate
  modified_base 14: mod_base = OTHER; note = 2'-fluoroadenosine-3'-phosphate
  modified_base 15: mod_base = OTHER; note = 2'-O-methyluridine-3'-phosphate
  modified_base 16: mod_base = OTHER; note = 2'-fluoroadenosine-3'-phosphate
  modified_base 17: mod_base = OTHER; note = 2'-O-methyluridine-3'-phosphate
  modified_base 18: mod_base = OTHER; note = 2'-O-methyluridine-3'-phosphate
  modified_base 19: mod_base = OTHER; note = 2'-O-methylguanosine-3'-phosphate
  modified_base 20: mod_base = OTHER; note = 2'-O-methylcytidine-3'-phosphate
  modified_base 21: mod_base = OTHER; note = 2'-O-methylguanosine-3'-phosphorothioate
  modified_base 22: mod_base = OTHER; note = 2'-O-methyladenosine-3'-phosphorothioate
  modified_base 23: mod_base = OTHER; note = 2'-O-methylguanosine-3'-phosphate
tagatctgacaccatattgcgag

SEQ ID NO: 4181 - RNA, 23 nt, synthetic construct
  source 1..23: mol_type = other RNA
  modified_base 1: mod_base = OTHER; note = Vinyl-phosphonate 2'-O-methyluridine-3'-phosphorothioate
  modified_base 2: mod_base = OTHER; note = 2'-fluoroguanosine-3'-phosphorothioate
  modified_base 3: mod_base = OTHER; note = 2'-O-methyladenosine-3'-phosphate
  modified_base 4: mod_base = OTHER; note = 2'-O-methyluridine-3'-phosphate
  modified_base 5: mod_base = OTHER; note = 2'-O-methyluridine-3'-phosphate
  modified_base 6: mod_base = OTHER; note = 2'-fluoroadenosine-3'-phosphate
  modified_base 7: mod_base = OTHER; note = 2'-O-methylguanosine-3'-phosphate
  modified_base 8: mod_base = OTHER; note = 2'-fluoroadenosine-3'-phosphate
  modified_base 9: mod_base = OTHER; note = 2'-fluoroguanosine-3'-phosphate
  modified_base 10: mod_base = OTHER; note = 2'-O-methylcytidine-3'-phosphate
  modified_base 11: mod_base = OTHER; note = 2'-O-methyladenosine-3'-phosphate
  modified_base 12: mod_base = OTHER; note = 2'-O-methylguanosine-3'-phosphate
  modified_base 13: mod_base = OTHER; note = 2'-O-methylcytidine-3'-phosphate
  modified_base 14: mod_base = OTHER; note = 2'-fluorouridine-3'-phosphate
  modified_base 15: mod_base = OTHER; note = 2'-O-methylcytidine-3'-phosphate
  modified_base 16: mod_base = OTHER; note = 2'-fluorouridine-3'-phosphate
  modified_base 17: mod_base = OTHER; note = 2'-O-methyluridine-3'-phosphate
  modified_base 18: mod_base = OTHER; note = 2'-O-methylcytidine-3'-phosphate
  modified_base 19: mod_base = OTHER; note = 2'-O-methylguanosine-3'-phosphate
  modified_base 20: mod_base = OTHER; note = 2'-O-methyladenosine-3'-phosphate
  modified_base 21: mod_base = OTHER; note = 2'-O-methyladenosine-3'-phosphorothioate
  modified_base 22: mod_base = OTHER; note = 2'-O-methylguanosine-3'-phosphorothioate
  modified_base 23: mod_base = OTHER; note = 2'-O-methyladenosine-3'-phosphate
tgattagagcagctcttcgaaga

SEQ ID NO: 4182 - RNA, 23 nt, synthetic construct
  source 1..23: mol_type = other RNA
  modified_base 1: mod_base = OTHER; note = Vinyl-phosphonate 2'-O-methyluridine-3'-phosphorothioate
  modified_base 2: mod_base = OTHER; note = 2'-fluorocytidine-3'-phosphorothioate
  modified_base 3: mod_base = OTHER; note = 2'-O-methyluridine-3'-phosphate
  modified_base 4: mod_base = OTHER; note = 2'-O-methylguanosine-3'-phosphate
  modified_base 5: mod_base = OTHER; note = 2'-O-methyladenosine-3'-phosphate
  modified_base 6: mod_base = OTHER; note = 2'-fluoroadenosine-3'-phosphate
  modified_base 7: mod_base = OTHER; note = 2'-O-methyluridine-3'-phosphate
  modified_base 8: mod_base = OTHER; note = 2'-fluoroadenosine-3'-phosphate
  modified_base 9: mod_base = OTHER; note = 2'-fluorocytidine-3'-phosphate
  modified_base 10: mod_base = OTHER; note = 2'-O-methyluridine-3'-phosphate
  modified_base 11: mod_base = OTHER; note = 2'-O-methylcytidine-3'-phosphate
  modified_base 12: mod_base = OTHER; note = 2'-O-methyluridine-3'-phosphate
  modified_base 13: mod_base = OTHER; note = 2'-O-methylcytidine-3'-phosphate
  modified_base 14: mod_base = OTHER; note = 2'-fluoroadenosine-3'-phosphate
  modified_base 15: mod_base = OTHER; note = 2'-O-methylguanosine-3'-phosphate
  modified_base 16: mod_base = OTHER; note = 2'-fluorocytidine-3'-phosphate
  modified_base 17: mod_base = OTHER; note = 2'-O-methyladenosine-3'-phosphate
  modified_base 18: mod_base = OTHER; note = 2'-O-methylguanosine-3'-phosphate
  modified_base 19: mod_base = OTHER; note = 2'-O-methyladenosine-3'-phosphate
  modified_base 20: mod_base = OTHER; note = 2'-O-methyladenosine-3'-phosphate
  modified_base 21: mod_base = OTHER; note = 2'-O-methyladenosine-3'-phosphorothioate
  modified_base 22: mod_base = OTHER; note = 2'-O-methyluridine-3'-phosphorothioate
  modified_base 23: mod_base = OTHER; note = 2'-O-methyladenosine-3'-phosphate
tctgaatactctcagcagaaata

SEQ ID NO: 4183 - RNA, 23 nt, synthetic construct
  source 1..23: mol_type = other RNA
  modified_base 1: mod_base = OTHER; note = Vinyl-phosphonate 2'-O-methyluridine-3'-phosphorothioate
  modified_base 2: mod_base = OTHER; note = 2'-fluorocytidine-3'-phosphorothioate
  modified_base 3: mod_base = OTHER; note = 2'-O-methyladenosine-3'-phosphate
  modified_base 4: mod_base = OTHER; note = 2'-O-methylguanosine-3'-phosphate
  modified_base 5: mod_base = OTHER; note = 2'-O-methyluridine-3'-phosphate
  modified_base 6: mod_base = OTHER; note = 2'-fluoroguanosine-3'-phosphate
  modified_base 7: mod_base = OTHER; note = 2'-O-methyladenosine-3'-phosphate
  modified_base 8: mod_base = OTHER; note = 2'-fluorouridine-3'-phosphate
  modified_base 9: mod_base = OTHER; note = 2'-fluoroadenosine-3'-phosphate
  modified_base 10: mod_base = OTHER; note = 2'-O-methylcytidine-3'-phosphate
  modified_base 11: mod_base = OTHER; note = 2'-O-methyluridine-3'-phosphate
  modified_base 12: mod_base = OTHER; note = 2'-O-methyluridine-3'-phosphate
  modified_base 13: mod_base = OTHER; note = 2'-O-methylcytidine-3'-phosphate
  modified_base 14: mod_base = OTHER; note = 2'-fluorocytidine-3'-phosphate
  modified_base 15: mod_base = OTHER; note = 2'-O-methyluridine-3'-phosphate
  modified_base 16: mod_base = OTHER; note = 2'-fluoroguanosine-3'-phosphate
  modified_base 17: mod_base = OTHER; note = 2'-O-methyluridine-3'-phosphate
  modified_base 18: mod_base = OTHER; note = 2'-O-methyluridine-3'-phosphate
  modified_base 19: mod_base = OTHER; note = 2'-O-methylcytidine-3'-phosphate
  modified_base 20: mod_base = OTHER; note = 2'-O-methyladenosine-3'-phosphate
  modified_base 21: mod_base = OTHER; note = 2'-O-methyladenosine-3'-phosphorothioate
  modified_base 22: mod_base = OTHER; note = 2'-O-methyluridine-3'-phosphorothioate
  modified_base 23: mod_base = OTHER; note = 2'-O-methyladenosine-3'-phosphate
tcagtgatacttcctgttcaata

SEQ ID NO: 4184 - RNA, 23 nt, synthetic construct
  source 1..23: mol_type = other RNA
  modified_base 1: mod_base = OTHER; note = Vinyl-phosphonate 2'-O-methyluridine-3'-phosphorothioate
  modified_base 2: mod_base = OTHER; note = 2'-fluorouridine -3'-phosphorothioate
  modified_base 3: mod_base = OTHER; note = 2'-O-methyluridine-3'-phosphate
  modified_base 4: mod_base = OTHER; note = 2'-O-methylcytidine-3'-phosphate
  modified_base 5: mod_base = OTHER; note = 2'-O-methyluridine-3'-phosphate
  modified_base 6: mod_base = OTHER; note = 2'-fluorocytidine-3'-phosphate
  modified_base 7: mod_base = OTHER; note = 2'-O-methyluridine-3'-phosphate
  modified_base 8: mod_base = OTHER; note = 2'-fluoroguanosine-3'-phosphate
  modified_base 9: mod_base = OTHER; note = 2'-fluoroguanosine-3'-phosphate
  modified_base 10: mod_base = OTHER; note = 2'-O-methyladenosine-3'-phosphate
  modified_base 11: mod_base = OTHER; note = 2'-O-methyladenosine-3'-phosphate
  modified_base 12: mod_base = OTHER; note = 2'-O-methyladenosine-3'-phosphate
  modified_base 13: mod_base = OTHER; note = 2'-O-methyluridine-3'-phosphate
  modified_base 14: mod_base = OTHER; note = 2'-fluoroadenosine-3'-phosphate
  modified_base 15: mod_base = OTHER; note = 2'-O-methylcytidine-3'-phosphate
  modified_base 16: mod_base = OTHER; note = 2'-fluoroadenosine-3'-phosphate
  modified_base 17: mod_base = OTHER; note = 2'-O-methyladenosine-3'-phosphate
  modified_base 18: mod_base = OTHER; note = 2'-O-methylguanosine-3'-phosphate
  modified_base 19: mod_base = OTHER; note = 2'-O-methylguanosine-3'-phosphate
  modified_base 20: mod_base = OTHER; note = 2'-O-methylcytidine-3'-phosphate
  modified_base 21: mod_base = OTHER; note = 2'-O-methyladenosine-3'-phosphorothioate
  modified_base 22: mod_base = OTHER; note = 2'-O-methyladenosine-3'-phosphorothioate
  modified_base 23: mod_base = OTHER; note = 2'-O-methylcytidine-3'-phosphate
tttctctggaaatacaaggcaac

SEQ ID NO: 4185 - RNA, 23 nt, synthetic construct
  source 1..23: mol_type = other RNA
  modified_base 1: mod_base = OTHER; note = Vinyl-phosphonate 2'-O-methyluridine-3'-phosphorothioate
  modified_base 2: mod_base = OTHER; note = 2'-fluorouridine -3'-phosphorothioate
  modified_base 3: mod_base = OTHER; note = 2'-O-methyluridine-3'-phosphate
  modified_base 4: mod_base = OTHER; note = 2'-O-methyluridine-3'-phosphate
  modified_base 5: mod_base = OTHER; note = 2'-O-methylguanosine-3'-phosphate
  modified_base 6: mod_base = OTHER; note = 2'-fluorocytidine-3'-phosphate
  modified_base 7: mod_base = OTHER; note = 2'-O-methyladenosine-3'-phosphate
  modified_base 8: mod_base = OTHER; note = 2'-fluoroadenosine-3'-phosphate
  modified_base 9: mod_base = OTHER; note = 2'-fluorocytidine-3'-phosphate
  modified_base 10: mod_base = OTHER; note = 2'-O-methyluridine-3'-phosphate
  modified_base 11: mod_base = OTHER; note = 2'-O-methylguanosine-3'-phosphate
  modified_base 12: mod_base = OTHER; note = 2'-O-methylcytidine-3'-phosphate
  modified_base 13: mod_base = OTHER; note = 2'-O-methylcytidine-3'-phosphate
  modified_base 14: mod_base = OTHER; note = 2'-fluoroadenosine-3'-phosphate
  modified_base 15: mod_base = OTHER; note = 2'-O-methyluridine-3'-phosphate
  modified_base 16: mod_base = OTHER; note = 2'-fluoroadenosine-3'-phosphate
  modified_base 17: mod_base = OTHER; note = 2'-O-methylguanosine-3'-phosphate
  modified_base 18: mod_base = OTHER; note = 2'-O-methyluridine-3'-phosphate
  modified_base 19: mod_base = OTHER; note = 2'-O-methyladenosine-3'-phosphate
  modified_base 20: mod_base = OTHER; note = 2'-O-methyladenosine-3'-phosphate
  modified_base 21: mod_base = OTHER; note = 2'-O-methylcytidine-3'-phosphorothioate
  modified_base 22: mod_base = OTHER; note = 2'-O-methyluridine-3'-phosphorothioate
  modified_base 23: mod_base = OTHER; note = 2'-O-methylguanosine-3'-phosphate
ttttgcaactgccatagtaactg

SEQ ID NO: 4186 - RNA, 23 nt, synthetic construct
  source 1..23: mol_type = other RNA
  modified_base 1: mod_base = OTHER; note = Vinyl-phosphonate 2'-O-methyluridine-3'-phosphorothioate
  modified_base 2: mod_base = OTHER; note = 2'-fluorocytidine-3'-phosphorothioate
  modified_base 3: mod_base = OTHER; note = 2'-O-methyladenosine-3'-phosphate
  modified_base 4: mod_base = OTHER; note = 2'-O-methylguanosine-3'-phosphate
  modified_base 5: mod_base = OTHER; note = 2'-O-methylcytidine-3'-phosphate
  modified_base 6: mod_base = OTHER; note = 2'-fluorouridine-3'-phosphate
  modified_base 7: mod_base = OTHER; note = 2'-O-methyluridine-3'-phosphate
  modified_base 8: mod_base = OTHER; note = 2'-fluorouridine-3'-phosphate
  modified_base 9: mod_base = OTHER; note = 2'-fluoroadenosine-3'-phosphate
  modified_base 10: mod_base = OTHER; note = 2'-O-methyladenosine-3'-phosphate
  modified_base 11: mod_base = OTHER; note = 2'-O-methyladenosine-3'-phosphate
  modified_base 12: mod_base = OTHER; note = 2'-O-methyladenosine-3'-phosphate
  modified_base 13: mod_base = OTHER; note = 2'-O-methyluridine-3'-phosphate
  modified_base 14: mod_base = OTHER; note = 2'-fluorouridine-3'-phosphate
  modified_base 15: mod_base = OTHER; note = 2'-O-methylcytidine-3'-phosphate
  modified_base 16: mod_base = OTHER; note = 2'-fluoroadenosine-3'-phosphate
  modified_base 17: mod_base = OTHER; note = 2'-O-methylguanosine-3'-phosphate
  modified_base 18: mod_base = OTHER; note = 2'-O-methylcytidine-3'-phosphate
  modified_base 19: mod_base = OTHER; note = 2'-O-methylcytidine-3'-phosphate
  modified_base 20: mod_base = OTHER; note = 2'-O-methyladenosine-3'-phosphate
  modified_base 21: mod_base = OTHER; note = 2'-O-methyluridine-3'-phosphorothioate
  modified_base 22: mod_base = OTHER; note = 2'-O-methylguanosine-3'-phosphorothioate
  modified_base 23: mod_base = OTHER; note = 2'-O-methylguanosine-3'-phosphate
tcagctttaaaattcagccatgg

SEQ ID NO: 4187 - RNA, 23 nt, synthetic construct
  source 1..23: mol_type = other RNA
  modified_base 1: mod_base = OTHER; note = Vinyl-phosphonate 2'-O-methyluridine-3'-phosphorothioate
  modified_base 2: mod_base = OTHER; note = 2'-fluoroadenosine-3'-phosphorothioate
  modified_base 3: mod_base = OTHER; note = 2'-O-methylguanosine-3'-phosphate
  modified_base 4: mod_base = OTHER; note = 2'-O-methyladenosine-3'-phosphate
  modified_base 5: mod_base = OTHER; note = 2'-O-methyladenosine-3'-phosphate
  modified_base 6: mod_base = OTHER; note = 2'-fluorocytidine-3'-phosphate
  modified_base 7: mod_base = OTHER; note = 2'-O-methylguanosine-3'-phosphate
  modified_base 8: mod_base = OTHER; note = 2'-fluoroadenosine-3'-phosphate
  modified_base 9: mod_base = OTHER; note = 2'-fluorouridine-3'-phosphate
  modified_base 10: mod_base = OTHER; note = 2'-O-methylcytidine-3'-phosphate
  modified_base 11: mod_base = OTHER; note = 2'-O-methylcytidine-3'-phosphate
  modified_base 12: mod_base = OTHER; note = 2'-O-methyladenosine-3'-phosphate
  modified_base 13: mod_base = OTHER; note = 2'-O-methyluridine-3'-phosphate
  modified_base 14: mod_base = OTHER; note = 2'-fluoroguanosine-3'-phosphate
  modified_base 15: mod_base = OTHER; note = 2'-O-methyladenosine-3'-phosphate
  modified_base 16: mod_base = OTHER; note = 2'-fluoroadenosine-3'-phosphate
  modified_base 17: mod_base = OTHER; note = 2'-O-methyluridine-3'-phosphate
  modified_base 18: mod_base = OTHER; note = 2'-O-methylguanosine-3'-phosphate
  modified_base 19: mod_base = OTHER; note = 2'-O-methylguanosine-3'-phosphate
  modified_base 20: mod_base = OTHER; note = 2'-O-methyladenosine-3'-phosphate
  modified_base 21: mod_base = OTHER; note = 2'-O-methylcytidine-3'-phosphorothioate
  modified_base 22: mod_base = OTHER; note = 2'-O-methyluridine-3'-phosphorothioate
  modified_base 23: mod_base = OTHER; note = 2'-O-methylguanosine-3'-phosphate
tagaacgatccatgaatggactg

SEQ ID NO: 4188 - RNA, 23 nt, synthetic construct
  source 1..23: mol_type = other RNA
  modified_base 1: mod_base = OTHER; note = Vinyl-phosphonate 2'-O-methyluridine-3'-phosphorothioate
  modified_base 2: mod_base = OTHER; note = 2'-fluoroadenosine-3'-phosphorothioate
  modified_base 3: mod_base = OTHER; note = 2'-O-methylguanosine-3'-phosphate
  modified_base 4: mod_base = OTHER; note = 2'-O-methylcytidine-3'-phosphate
  modified_base 5: mod_base = OTHER; note = 2'-O-methyladenosine-3'-phosphate
  modified_base 6: mod_base = OTHER; note = 2'-fluorouridine-3'-phosphate
  modified_base 7: mod_base = OTHER; note = 2'-O-methylcytidine-3'-phosphate
  modified_base 8: mod_base = OTHER; note = 2'-fluoroadenosine-3'-phosphate
  modified_base 9: mod_base = OTHER; note = 2'-fluorouridine-3'-phosphate
  modified_base 10: mod_base = OTHER; note = 2'-O-methyladenosine-3'-phosphate
  modified_base 11: mod_base = OTHER; note = 2'-O-methylguanosine-3'-phosphate
  modified_base 12: mod_base = OTHER; note = 2'-O-methylguanosine-3'-phosphate
  modified_base 13: mod_base = OTHER; note = 2'-O-methyladenosine-3'-phosphate
  modified_base 14: mod_base = OTHER; note = 2'-fluoroguanosine-3'-phosphate
  modified_base 15: mod_base = OTHER; note = 2'-O-methyluridine-3'-phosphate
  modified_base 16: mod_base = OTHER; note = 2'-fluorouridine-3'-phosphate
  modified_base 17: mod_base = OTHER; note = 2'-O-methyladenosine-3'-phosphate
  modified_base 18: mod_base = OTHER; note = 2'-O-methylcytidine-3'-phosphate
  modified_base 19: mod_base = OTHER; note = 2'-O-methyladenosine-3'-phosphate
  modified_base 20: mod_base = OTHER; note = 2'-O-methylcytidine-3'-phosphate
  modified_base 21: mod_base = OTHER; note = 2'-O-methyladenosine-3'-phosphorothioate
  modified_base 22: mod_base = OTHER; note = 2'-O-methylguanosine-3'-phosphorothioate
  modified_base 23: mod_base = OTHER; note = 2'-O-methylguanosine-3'-phosphate
tagcatcataggagttacacagg

SEQ ID NO: 4189 - RNA, 23 nt, synthetic construct
  source 1..23: mol_type = other RNA
  modified_base 1: mod_base = OTHER; note = Vinyl-phosphonate 2'-O-methyluridine-3'-phosphorothioate
  modified_base 2: mod_base = OTHER; note = 2'-fluoroadenosine-3'-phosphorothioate
  modified_base 3: mod_base = OTHER; note = 2'-O-methyluridine-3'-phosphate
  modified_base 4: mod_base = OTHER; note = 2'-O-methyladenosine-3'-phosphate
  modified_base 5: mod_base = OTHER; note = 2'-O-methylguanosine-3'-phosphate
  modified_base 6: mod_base = OTHER; note = 2'-fluoroguanosine-3'-phosphate
  modified_base 7: mod_base = OTHER; note = 2'-O-methyladenosine-3'-phosphate
  modified_base 8: mod_base = OTHER; note = 2'-fluoroguanosine-3'-phosphate
  modified_base 9: mod_base = OTHER; note = 2'-fluorouridine-3'-phosphate
  modified_base 10: mod_base = OTHER; note = 2'-O-methylguanosine-3'-phosphate
  modified_base 11: mod_base = OTHER; note = 2'-O-methylguanosine-3'-phosphate
  modified_base 12: mod_base = OTHER; note = 2'-O-methylguanosine-3'-phosphate
  modified_base 13: mod_base = OTHER; note = 2'-O-methyladenosine-3'-phosphate
  modified_base 14: mod_base = OTHER; note = 2'-fluoroadenosine-3'-phosphate
  modified_base 15: mod_base = OTHER; note = 2'-O-methyladenosine-3'-phosphate
  modified_base 16: mod_base = OTHER; note = 2'-fluorocytidine-3'-phosphate
  modified_base 17: mod_base = OTHER; note = 2'-O-methyluridine-3'-phosphate
  modified_base 18: mod_base = OTHER; note = 2'-O-methylguanosine-3'-phosphate
  modified_base 19: mod_base = OTHER; note = 2'-O-methylcytidine-3'-phosphate
  modified_base 20: mod_base = OTHER; note = 2'-O-methylcytidine-3'-phosphate
  modified_base 21: mod_base = OTHER; note = 2'-O-methyladenosine-3'-phosphorothioate
  modified_base 22: mod_base = OTHER; note = 2'-O-methylguanosine-3'-phosphorothioate
  modified_base 23: mod_base = OTHER; note = 2'-O-methylcytidine-3'-phosphate
tataggagtgggaaactgccagc

SEQ ID NO: 4190 - RNA, 23 nt, synthetic construct
  source 1..23: mol_type = other RNA
  modified_base 1: mod_base = OTHER; note = Vinyl-phosphonate 2'-O-methyluridine-3'-phosphorothioate
  modified_base 2: mod_base = OTHER; note = 2'-fluorouridine -3'-phosphorothioate
  modified_base 3: mod_base = OTHER; note = 2'-O-methylguanosine-3'-phosphate
  modified_base 4: mod_base = OTHER; note = 2'-O-methyladenosine-3'-phosphate
  modified_base 5: mod_base = OTHER; note = 2'-O-methyladenosine-3'-phosphate
  modified_base 6: mod_base = OTHER; note = 2'-fluorouridine-3'-phosphate
  modified_base 7: mod_base = OTHER; note = 2'-O-methylcytidine-3'-phosphate
  modified_base 8: mod_base = OTHER; note = 2'-fluorouridine-3'-phosphate
  modified_base 9: mod_base = OTHER; note = 2'-fluorocytidine-3'-phosphate
  modified_base 10: mod_base = OTHER; note = 2'-O-methyladenosine-3'-phosphate
  modified_base 11: mod_base = OTHER; note = 2'-O-methyluridine-3'-phosphate
  modified_base 12: mod_base = OTHER; note = 2'-O-methylcytidine-3'-phosphate
  modified_base 13: mod_base = OTHER; note = 2'-O-methyluridine-3'-phosphate
  modified_base 14: mod_base = OTHER; note = 2'-fluoroguanosine-3'-phosphate
  modified_base 15: mod_base = OTHER; note = 2'-O-methylcytidine-3'-phosphate
  modified_base 16: mod_base = OTHER; note = 2'-fluorouridine-3'-phosphate
  modified_base 17: mod_base = OTHER; note = 2'-O-methyluridine-3'-phosphate
  modified_base 18: mod_base = OTHER; note = 2'-O-methylguanosine-3'-phosphate
  modified_base 19: mod_base = OTHER; note = 2'-O-methyladenosine-3'-phosphate
  modified_base 20: mod_base = OTHER; note = 2'-O-methylguanosine-3'-phosphate
  modified_base 21: mod_base = OTHER; note = 2'-O-methylguanosine-3'-phosphorothioate
  modified_base 22: mod_base = OTHER; note = 2'-O-methyluridine-3'-phosphorothioate
  modified_base 23: mod_base = OTHER; note = 2'-O-methyladenosine-3'-phosphate
ttgaatctcatctgcttgaggta

SEQ ID NO: 4191 - RNA, 23 nt, synthetic construct
  source 1..23: mol_type = other RNA
  modified_base 1: mod_base = OTHER; note = Vinyl-phosphonate 2'-O-methyluridine-3'-phosphorothioate
  modified_base 2: mod_base = OTHER; note = 2'-fluorouridine -3'-phosphorothioate
  modified_base 3: mod_base = OTHER; note = 2'-O-methylguanosine-3'-phosphate
  modified_base 4: mod_base = OTHER; note = 2'-O-methylcytidine-3'-phosphate
  modified_base 5: mod_base = OTHER; note = 2'-O-methyluridine-3'-phosphate
  modified_base 6: mod_base = OTHER; note = 2'-fluorouridine-3'-phosphate
  modified_base 7: mod_base = OTHER; note = 2'-O-methyluridine-3'-phosphate
  modified_base 8: mod_base = OTHER; note = 2'-fluorouridine-3'-phosphate
  modified_base 9: mod_base = OTHER; note = 2'-fluoroguanosine-3'-phosphate
  modified_base 10: mod_base = OTHER; note = 2'-O-methyladenosine-3'-phosphate
  modified_base 11: mod_base = OTHER; note = 2'-O-methylguanosine-3'-phosphate
  modified_base 12: mod_base = OTHER; note = 2'-O-methyladenosine-3'-phosphate
  modified_base 13: mod_base = OTHER; note = 2'-O-methyladenosine-3'-phosphate
  modified_base 14: mod_base = OTHER; note = 2'-fluoroadenosine-3'-phosphate
  modified_base 15: mod_base = OTHER; note = 2'-O-methyladenosine-3'-phosphate
  modified_base 16: mod_base = OTHER; note = 2'-fluorocytidine-3'-phosphate
  modified_base 17: mod_base = OTHER; note = 2'-O-methyladenosine-3'-phosphate
  modified_base 18: mod_base = OTHER; note = 2'-O-methyladenosine-3'-phosphate
  modified_base 19: mod_base = OTHER; note = 2'-O-methylcytidine-3'-phosphate
  modified_base 20: mod_base = OTHER; note = 2'-O-methyladenosine-3'-phosphate
  modified_base 21: mod_base = OTHER; note = 2'-O-methyluridine-3'-phosphorothioate
  modified_base 22: mod_base = OTHER; note = 2'-O-methyladenosine-3'-phosphorothioate
  modified_base 23: mod_base = OTHER; note = 2'-O-methyladenosine-3'-phosphate
ttgcttttgagaaaacaacataa

SEQ ID NO: 4192 - RNA, 23 nt, synthetic construct
  source 1..23: mol_type = other RNA
  modified_base 1: mod_base = OTHER; note = Vinyl-phosphonate 2'-O-methyluridine-3'-phosphorothioate
  modified_base 2: mod_base = OTHER; note = 2'-fluoroguanosine-3'-phosphorothioate
  modified_base 3: mod_base = OTHER; note = 2'-O-methylcytidine-3'-phosphate
  modified_base 4: mod_base = OTHER; note = 2'-O-methyladenosine-3'-phosphate
  modified_base 5: mod_base = OTHER; note = 2'-O-methyluridine-3'-phosphate
  modified_base 6: mod_base = OTHER; note = 2'-fluorouridine-3'-phosphate
  modified_base 7: mod_base = OTHER; note = 2'-O-methylguanosine-3'-phosphate
  modified_base 8: mod_base = OTHER; note = 2'-fluoroadenosine-3'-phosphate
  modified_base 9: mod_base = OTHER; note = 2'-fluoroguanosine-3'-phosphate
  modified_base 10: mod_base = OTHER; note = 2'-O-methylcytidine-3'-phosphate
  modified_base 11: mod_base = OTHER; note = 2'-O-methyladenosine-3'-phosphate
  modified_base 12: mod_base = OTHER; note = 2'-O-methylguanosine-3'-phosphate
  modified_base 13: mod_base = OTHER; note = 2'-O-methyladenosine-3'-phosphate
  modified_base 14: mod_base = OTHER; note = 2'-fluoroadenosine-3'-phosphate
  modified_base 15: mod_base = OTHER; note = 2'-O-methyladenosine-3'-phosphate
  modified_base 16: mod_base = OTHER; note = 2'-fluorouridine-3'-phosphate
  modified_base 17: mod_base = OTHER; note = 2'-O-methylcytidine-3'-phosphate
  modified_base 18: mod_base = OTHER; note = 2'-O-methylcytidine-3'-phosphate
  modified_base 19: mod_base = OTHER; note = 2'-O-methylcytidine-3'-phosphate
  modified_base 20: mod_base = OTHER; note = 2'-O-methyluridine-3'-phosphate
  modified_base 21: mod_base = OTHER; note = 2'-O-methylcytidine-3'-phosphorothioate
  modified_base 22: mod_base = OTHER; note = 2'-O-methyladenosine-3'-phosphorothioate
  modified_base 23: mod_base = OTHER; note = 2'-O-methylguanosine-3'-phosphate
tgcattgagcagaaatccctcag

SEQ ID NO: 4193 - RNA, 23 nt, synthetic construct
  source 1..23: mol_type = other RNA
  modified_base 1: mod_base = OTHER; note = Vinyl-phosphonate 2'-O-methyluridine-3'-phosphorothioate
  modified_base 2: mod_base = OTHER; note = 2'-fluorocytidine-3'-phosphorothioate
  modified_base 3: mod_base = OTHER; note = 2'-O-methyladenosine-3'-phosphate
  modified_base 4: mod_base = OTHER; note = 2'-O-methylguanosine-3'-phosphate
  modified_base 5: mod_base = OTHER; note = 2'-O-methylguanosine-3'-phosphate
  modified_base 6: mod_base = OTHER; note = 2'-fluorouridine-3'-phosphate
  modified_base 7: mod_base = OTHER; note = 2'-O-methylguanosine-3'-phosphate
  modified_base 8: mod_base = OTHER; note = 2'-fluoroadenosine-3'-phosphate
  modified_base 9: mod_base = OTHER; note = 2'-fluoroguanosine-3'-phosphate
  modified_base 10: mod_base = OTHER; note = 2'-O-methylguanosine-3'-phosphate
  modified_base 11: mod_base = OTHER; note = 2'-O-methyladenosine-3'-phosphate
  modified_base 12: mod_base = OTHER; note = 2'-O-methyladenosine-3'-phosphate
  modified_base 13: mod_base = OTHER; note = 2'-O-methylguanosine-3'-phosphate
  modified_base 14: mod_base = OTHER; note = 2'-fluoroadenosine-3'-phosphate
  modified_base 15: mod_base = OTHER; note = 2'-O-methyladenosine-3'-phosphate
  modified_base 16: mod_base = OTHER; note = 2'-fluoroguanosine-3'-phosphate
  modified_base 17: mod_base = OTHER; note = 2'-O-methyladenosine-3'-phosphate
  modified_base 18: mod_base = OTHER; note = 2'-O-methyladenosine-3'-phosphate
  modified_base 19: mod_base = OTHER; note = 2'-O-methylguanosine-3'-phosphate
  modified_base 20: mod_base = OTHER; note = 2'-O-methylguanosine-3'-phosphate
  modified_base 21: mod_base = OTHER; note = 2'-O-methylcytidine-3'-phosphorothioate
  modified_base 22: mod_base = OTHER; note = 2'-O-methyladenosine-3'-phosphorothioate
  modified_base 23: mod_base = OTHER; note = 2'-O-methylcytidine-3'-phosphate
tcaggtgaggaagaagaaggcac

SEQ ID NO: 4194 - RNA, 23 nt, synthetic construct
  source 1..23: mol_type = other RNA
  modified_base 1: mod_base = OTHER; note = Vinyl-phosphonate 2'-O-methyluridine-3'-phosphorothioate
  modified_base 2: mod_base = OTHER; note = 2'-fluoroguanosine-3'-phosphorothioate
  modified_base 3: mod_base = OTHER; note = 2'-O-methyladenosine-3'-phosphate
  modified_base 4: mod_base = OTHER; note = 2'-O-methyladenosine-3'-phosphate
  modified_base 5: mod_base = OTHER; note = 2'-O-methyladenosine-3'-phosphate
  modified_base 6: mod_base = OTHER; note = 2'-fluorouridine-3'-phosphate
  modified_base 7: mod_base = OTHER; note = 2'-O-methylguanosine-3'-phosphate
  modified_base 8: mod_base = OTHER; note = 2'-fluorouridine-3'-phosphate
  modified_base 9: mod_base = OTHER; note = 2'-fluoroguanosine-3'-phosphate
  modified_base 10: mod_base = OTHER; note = 2'-O-methyladenosine-3'-phosphate
  modified_base 11: mod_base = OTHER; note = 2'-O-methyluridine-3'-phosphate
  modified_base 12: mod_base = OTHER; note = 2'-O-methyluridine-3'-phosphate
  modified_base 13: mod_base = OTHER; note = 2'-O-methylcytidine-3'-phosphate
  modified_base 14: mod_base = OTHER; note = 2'-fluoroadenosine-3'-phosphate
  modified_base 15: mod_base = OTHER; note = 2'-O-methyladenosine-3'-phosphate
  modified_base 16: mod_base = OTHER; note = 2'-fluorouridine-3'-phosphate
  modified_base 17: mod_base = OTHER; note = 2'-O-methylcytidine-3'-phosphate
  modified_base 18: mod_base = OTHER; note = 2'-O-methyluridine-3'-phosphate
  modified_base 19: mod_base = OTHER; note = 2'-O-methylcytidine-3'-phosphate
  modified_base 20: mod_base = OTHER; note = 2'-O-methyladenosine-3'-phosphate
  modified_base 21: mod_base = OTHER; note = 2'-O-methyladenosine-3'-phosphorothioate
  modified_base 22: mod_base = OTHER; note = 2'-O-methyluridine-3'-phosphorothioate
  modified_base 23: mod_base = OTHER; note = 2'-O-methyladenosine-3'-phosphate
tgaaatgtgattcaatctcaata

SEQ ID NO: 4195 - RNA, 23 nt, synthetic construct
  source 1..23: mol_type = other RNA
  modified_base 1: mod_base = OTHER; note = Vinyl-phosphonate 2'-O-methyluridine-3'-phosphorothioate
  modified_base 2: mod_base = OTHER; note = 2'-fluoroguanosine-3'-phosphorothioate
  modified_base 3: mod_base = OTHER; note = 2'-O-methylguanosine-3'-phosphate
  modified_base 4: mod_base = OTHER; note = 2'-O-methylguanosine-3'-phosphate
  modified_base 5: mod_base = OTHER; note = 2'-O-methyladenosine-3'-phosphate
  modified_base 6: mod_base = OTHER; note = 2'-fluoroguanosine-3'-phosphate
  modified_base 7: mod_base = OTHER; note = 2'-O-methyladenosine-3'-phosphate
  modified_base 8: mod_base = OTHER; note = 2'-fluoroadenosine-3'-phosphate
  modified_base 9: mod_base = OTHER; note = 2'-fluorouridine-3'-phosphate
  modified_base 10: mod_base = OTHER; note = 2'-O-methyladenosine-3'-phosphate
  modified_base 11: mod_base = OTHER; note = 2'-O-methylguanosine-3'-phosphate
  modified_base 12: mod_base = OTHER; note = 2'-O-methylcytidine-3'-phosphate
  modified_base 13: mod_base = OTHER; note = 2'-O-methyladenosine-3'-phosphate
  modified_base 14: mod_base = OTHER; note = 2'-fluorocytidine-3'-phosphate
  modified_base 15: mod_base = OTHER; note = 2'-O-methyluridine-3'-phosphate
  modified_base 16: mod_base = OTHER; note = 2'-fluoroguanosine-3'-phosphate
  modified_base 17: mod_base = OTHER; note = 2'-O-methyladenosine-3'-phosphate
  modified_base 18: mod_base = OTHER; note = 2'-O-methyladenosine-3'-phosphate
  modified_base 19: mod_base = OTHER; note = 2'-O-methylcytidine-3'-phosphate
  modified_base 20: mod_base = OTHER; note = 2'-O-methyladenosine-3'-phosphate
  modified_base 21: mod_base = OTHER; note = 2'-O-methylguanosine-3'-phosphorothioate
  modified_base 22: mod_base = OTHER; note = 2'-O-methyluridine-3'-phosphorothioate
  modified_base 23: mod_base = OTHER; note = 2'-O-methylguanosine-3'-phosphate
tgggagaatagcactgaacagtg

SEQ ID NO: 4196 - RNA, 23 nt, synthetic construct
  source 1..23: mol_type = other RNA
  modified_base 1: mod_base = OTHER; note = Vinyl-phosphonate 2'-O-methyluridine-3'-phosphorothioate
  modified_base 2: mod_base = OTHER; note = 2'-fluorouridine -3'-phosphorothioate
  modified_base 3: mod_base = OTHER; note = 2'-O-methylguanosine-3'-phosphate
  modified_base 4: mod_base = OTHER; note = 2'-O-methylguanosine-3'-phosphate
  modified_base 5: mod_base = OTHER; note = 2'-O-methyladenosine-3'-phosphate
  modified_base 6: mod_base = OTHER; note = 2'-fluorouridine-3'-phosphate
  modified_base 7: mod_base = OTHER; note = 2'-O-methylcytidine-3'-phosphate
  modified_base 8: mod_base = OTHER; note = 2'-fluorouridine-3'-phosphate
  modified_base 9: mod_base = OTHER; note = 2'-fluoroguanosine-3'-phosphate
  modified_base 10: mod_base = OTHER; note = 2'-O-methylcytidine-3'-phosphate
  modified_base 11: mod_base = OTHER; note = 2'-O-methyluridine-3'-phosphate
  modified_base 12: mod_base = OTHER; note = 2'-O-methylguanosine-3'-phosphate
  modified_base 13: mod_base = OTHER; note = 2'-O-methyluridine-3'-phosphate
  modified_base 14: mod_base = OTHER; note = 2'-fluoroadenosine-3'-phosphate
  modified_base 15: mod_base = OTHER; note = 2'-O-methyladenosine-3'-phosphate
  modified_base 16: mod_base = OTHER; note = 2'-fluoroguanosine-3'-phosphate
  modified_base 17: mod_base = OTHER; note = 2'-O-methylcytidine-3'-phosphate
  modified_base 18: mod_base = OTHER; note = 2'-O-methylcytidine-3'-phosphate
  modified_base 19: mod_base = OTHER; note = 2'-O-methyladenosine-3'-phosphate
  modified_base 20: mod_base = OTHER; note = 2'-O-methylguanosine-3'-phosphate
  modified_base 21: mod_base = OTHER; note = 2'-O-methylguanosine-3'-phosphorothioate
  modified_base 22: mod_base = OTHER; note = 2'-O-methyladenosine-3'-phosphorothioate
  modified_base 23: mod_base = OTHER; note = 2'-O-methyladenosine-3'-phosphate
ttggatctgctgtaagccaggaa

SEQ ID NO: 4197 - RNA, 23 nt, synthetic construct
  source 1..23: mol_type = other RNA
  modified_base 1: mod_base = OTHER; note = Vinyl-phosphonate 2'-O-methyluridine-3'-phosphorothioate
  modified_base 2: mod_base = OTHER; note = 2'-fluorouridine -3'-phosphorothioate
  modified_base 3: mod_base = OTHER; note = 2'-O-methylguanosine-3'-phosphate
  modified_base 4: mod_base = OTHER; note = 2'-O-methyladenosine-3'-phosphate
  modified_base 5: mod_base = OTHER; note = 2'-O-methyladenosine-3'-phosphate
  modified_base 6: mod_base = OTHER; note = 2'-fluoroadenosine-3'-phosphate
  modified_base 7: mod_base = OTHER; note = 2'-O-methyluridine-3'-phosphate
  modified_base 8: mod_base = OTHER; note = 2'-fluoroadenosine-3'-phosphate
  modified_base 9: mod_base = OTHER; note = 2'-fluoroadenosine-3'-phosphate
  modified_base 10: mod_base = OTHER; note = 2'-O-methyluridine-3'-phosphate
  modified_base 11: mod_base = OTHER; note = 2'-O-methyluridine-3'-phosphate
  modified_base 12: mod_base = OTHER; note = 2'-O-methyluridine-3'-phosphate
  modified_base 13: mod_base = OTHER; note = 2'-O-methyluridine-3'-phosphate
  modified_base 14: mod_base = OTHER; note = 2'-fluorocytidine-3'-phosphate
  modified_base 15: mod_base = OTHER; note = 2'-O-methyluridine-3'-phosphate
  modified_base 16: mod_base = OTHER; note = 2'-fluoroguanosine-3'-phosphate
  modified_base 17: mod_base = OTHER; note = 2'-O-methylcytidine-3'-phosphate
  modified_base 18: mod_base = OTHER; note = 2'-O-methyluridine-3'-phosphate
  modified_base 19: mod_base = OTHER; note = 2'-O-methylguanosine-3'-phosphate
  modified_base 20: mod_base = OTHER; note = 2'-O-methyluridine-3'-phosphate
  modified_base 21: mod_base = OTHER; note = 2'-O-methylcytidine-3'-phosphorothioate
  modified_base 22: mod_base = OTHER; note = 2'-O-methyluridine-3'-phosphorothioate
  modified_base 23: mod_base = OTHER; note = 2'-O-methyluridine-3'-phosphate
ttgaaataattttctgctgtctt

SEQ ID NO: 4198 - RNA, 23 nt, synthetic construct
  source 1..23: mol_type = other RNA
  modified_base 1: mod_base = OTHER; note = Vinyl-phosphonate 2'-O-methyluridine-3'-phosphorothioate
  modified_base 2: mod_base = OTHER; note = 2'-fluorocytidine-3'-phosphorothioate
  modified_base 3: mod_base = OTHER; note = 2'-O-methyladenosine-3'-phosphate
  modified_base 4: mod_base = OTHER; note = 2'-O-methyluridine-3'-phosphate
  modified_base 5: mod_base = OTHER; note = 2'-O-methyladenosine-3'-phosphate
  modified_base 6: mod_base = OTHER; note = 2'-fluoroadenosine-3'-phosphate
  modified_base 7: mod_base = OTHER; note = 2'-O-methyladenosine-3'-phosphate
  modified_base 8: mod_base = OTHER; note = 2'-fluorocytidine-3'-phosphate
  modified_base 9: mod_base = OTHER; note = 2'-fluorouridine-3'-phosphate
  modified_base 10: mod_base = OTHER; note = 2'-O-methyladenosine-3'-phosphate
  modified_base 11: mod_base = OTHER; note = 2'-O-methyladenosine-3'-phosphate
  modified_base 12: mod_base = OTHER; note = 2'-O-methyladenosine-3'-phosphate
  modified_base 13: mod_base = OTHER; note = 2'-O-methylguanosine-3'-phosphate
  modified_base 14: mod_base = OTHER; note = 2'-fluoroadenosine-3'-phosphate
  modified_base 15: mod_base = OTHER; note = 2'-O-methyladenosine-3'-phosphate
  modified_base 16: mod_base = OTHER; note = 2'-fluoroadenosine-3'-phosphate
  modified_base 17: mod_base = OTHER; note = 2'-O-methylcytidine-3'-phosphate
  modified_base 18: mod_base = OTHER; note = 2'-O-methylcytidine-3'-phosphate
  modified_base 19: mod_base = OTHER; note = 2'-O-methylcytidine-3'-phosphate
  modified_base 20: mod_base = OTHER; note = 2'-O-methyladenosine-3'-phosphate
  modified_base 21: mod_base = OTHER; note = 2'-O-methyladenosine-3'-phosphorothioate
  modified_base 22: mod_base = OTHER; note = 2'-O-methyluridine-3'-phosphorothioate
  modified_base 23: mod_base = OTHER; note = 2'-O-methyladenosine-3'-phosphate
tcataaactaaagaaacccaata

SEQ ID NO: 4199 - RNA, 23 nt, synthetic construct
  source 1..23: mol_type = other RNA
  modified_base 1: mod_base = OTHER; note = Vinyl-phosphonate 2'-O-methyluridine-3'-phosphorothioate
  modified_base 2: mod_base = OTHER; note = 2'-fluorocytidine-3'-phosphorothioate
  modified_base 3: mod_base = OTHER; note = 2'-O-methyluridine-3'-phosphate
  modified_base 4: mod_base = OTHER; note = 2'-O-methyluridine-3'-phosphate
  modified_base 5: mod_base = OTHER; note = 2'-O-methylcytidine-3'-phosphate
  modified_base 6: mod_base = OTHER; note = 2'-fluorouridine-3'-phosphate
  modified_base 7: mod_base = OTHER; note = 2'-O-methylguanosine-3'-phosphate
  modified_base 8: mod_base = OTHER; note = 2'-fluoroadenosine-3'-phosphate
  modified_base 9: mod_base = OTHER; note = 2'-fluoroguanosine-3'-phosphate
  modified_base 10: mod_base = OTHER; note = 2'-O-methyladenosine-3'-phosphate
  modified_base 11: mod_base = OTHER; note = 2'-O-methylcytidine-3'-phosphate
  modified_base 12: mod_base = OTHER; note = 2'-O-methylcytidine-3'-phosphate
  modified_base 13: mod_base = OTHER; note = 2'-O-methyluridine-3'-phosphate
  modified_base 14: mod_base = OTHER; note = 2'-fluoroadenosine-3'-phosphate
  modified_base 15: mod_base = OTHER; note = 2'-O-methylcytidine-3'-phosphate
  modified_base 16: mod_base = OTHER; note = 2'-fluoroadenosine-3'-phosphate
  modified_base 17: mod_base = OTHER; note = 2'-O-methyluridine-3'-phosphate
  modified_base 18: mod_base = OTHER; note = 2'-O-methylguanosine-3'-phosphate
  modified_base 19: mod_base = OTHER; note = 2'-O-methylguanosine-3'-phosphate
  modified_base 20: mod_base = OTHER; note = 2'-O-methyluridine-3'-phosphate
  modified_base 21: mod_base = OTHER; note = 2'-O-methylguanosine-3'-phosphorothioate
  modified_base 22: mod_base = OTHER; note = 2'-O-methyladenosine-3'-phosphorothioate
  modified_base 23: mod_base = OTHER; note = 2'-O-methylguanosine-3'-phosphate
tcttctgagacctacatggtgag

SEQ ID NO: 4200 - RNA, 23 nt, synthetic construct
  source 1..23: mol_type = other RNA
  modified_base 1: mod_base = OTHER; note = Vinyl-phosphonate 2'-O-methyluridine-3'-phosphorothioate
  modified_base 2: mod_base = OTHER; note = 2'-fluorouridine -3'-phosphorothioate
  modified_base 3: mod_base = OTHER; note = 2'-O-methyluridine-3'-phosphate
  modified_base 4: mod_base = OTHER; note = 2'-O-methylcytidine-3'-phosphate
  modified_base 5: mod_base = OTHER; note = 2'-O-methyladenosine-3'-phosphate
  modified_base 6: mod_base = OTHER; note = 2'-fluorouridine-3'-phosphate
  modified_base 7: mod_base = OTHER; note = 2'-O-methyluridine-3'-phosphate
  modified_base 8: mod_base = OTHER; note = 2'-fluorouridine-3'-phosphate
  modified_base 9: mod_base = OTHER; note = 2'-fluorocytidine-3'-phosphate
  modified_base 10: mod_base = OTHER; note = 2'-O-methylcytidine-3'-phosphate
  modified_base 11: mod_base = OTHER; note = 2'-O-methyluridine-3'-phosphate
  modified_base 12: mod_base = OTHER; note = 2'-O-methylguanosine-3'-phosphate
  modified_base 13: mod_base = OTHER; note = 2'-O-methyluridine-3'-phosphate
  modified_base 14: mod_base = OTHER; note = 2'-fluorouridine-3'-phosphate
  modified_base 15: mod_base = OTHER; note = 2'-O-methylcytidine-3'-phosphate
  modified_base 16: mod_base = OTHER; note = 2'-fluorocytidine-3'-phosphate
  modified_base 17: mod_base = OTHER; note = 2'-O-methyladenosine-3'-phosphate
  modified_base 18: mod_base = OTHER; note = 2'-O-methylcytidine-3'-phosphate
  modified_base 19: mod_base = OTHER; note = 2'-O-methyladenosine-3'-phosphate
  modified_base 20: mod_base = OTHER; note = 2'-O-methyladenosine-3'-phosphate
  modified_base 21: mod_base = OTHER; note = 2'-O-methylcytidine-3'-phosphorothioate
  modified_base 22: mod_base = OTHER; note = 2'-O-methylcytidine-3'-phosphorothioate
  modified_base 23: mod_base = OTHER; note = 2'-O-methyladenosine-3'-phosphate
tttcatttcctgttccacaacca

SEQ ID NO: 4201 - RNA, 23 nt, synthetic construct
  source 1..23: mol_type = other RNA
  modified_base 1: mod_base = OTHER; note = Vinyl-phosphonate 2'-O-methyluridine-3'-phosphorothioate
  modified_base 2: mod_base = OTHER; note = 2'-fluorocytidine-3'-phosphorothioate
  modified_base 3: mod_base = OTHER; note = 2'-O-methyladenosine-3'-phosphate
  modified_base 4: mod_base = OTHER; note = 2'-O-methyladenosine-3'-phosphate
  modified_base 5: mod_base = OTHER; note = 2'-O-methyladenosine-3'-phosphate
  modified_base 6: mod_base = OTHER; note = 2'-fluoroadenosine-3'-phosphate
  modified_base 7: mod_base = OTHER; note = 2'-O-methyluridine-3'-phosphate
  modified_base 8: mod_base = OTHER; note = 2'-fluoroadenosine-3'-phosphate
  modified_base 9: mod_base = OTHER; note = 2'-fluorouridine-3'-phosphate
  modified_base 10: mod_base = OTHER; note = 2'-O-methylguanosine-3'-phosphate
  modified_base 11: mod_base = OTHER; note = 2'-O-methyladenosine-3'-phosphate
  modified_base 12: mod_base = OTHER; note = 2'-O-methyluridine-3'-phosphate
  modified_base 13: mod_base = OTHER; note = 2'-O-methyladenosine-3'-phosphate
  modified_base 14: mod_base = OTHER; note = 2'-fluorouridine-3'-phosphate
  modified_base 15: mod_base = OTHER; note = 2'-O-methylguanosine-3'-phosphate
  modified_base 16: mod_base = OTHER; note = 2'-fluorouridine-3'-phosphate
  modified_base 17: mod_base = OTHER; note = 2'-O-methyluridine-3'-phosphate
  modified_base 18: mod_base = OTHER; note = 2'-O-methylcytidine-3'-phosphate
  modified_base 19: mod_base = OTHER; note = 2'-O-methyluridine-3'-phosphate
  modified_base 20: mod_base = OTHER; note = 2'-O-methylcytidine-3'-phosphate
  modified_base 21: mod_base = OTHER; note = 2'-O-methylcytidine-3'-phosphorothioate
  modified_base 22: mod_base = OTHER; note = 2'-O-methyladenosine-3'-phosphorothioate
  modified_base 23: mod_base = OTHER; note = 2'-O-methyladenosine-3'-phosphate
tcaaaatatgatatgttctccaa

SEQ ID NO: 4202 - RNA, 23 nt, synthetic construct
  source 1..23: mol_type = other RNA
  modified_base 1: mod_base = OTHER; note = Vinyl-phosphonate 2'-O-methyluridine-3'-phosphorothioate
  modified_base 2: mod_base = OTHER; note = 2'-fluorouridine -3'-phosphorothioate
  modified_base 3: mod_base = OTHER; note = 2'-O-methyluridine-3'-phosphate
  modified_base 4: mod_base = OTHER; note = 2'-O-methyluridine-3'-phosphate
  modified_base 5: mod_base = OTHER; note = 2'-O-methyluridine-3'-phosphate
  modified_base 6: mod_base = OTHER; note = 2'-fluoroguanosine-3'-phosphate
  modified_base 7: mod_base = OTHER; note = 2'-O-methylcytidine-3'-phosphate
  modified_base 8: mod_base = OTHER; note = 2'-fluorocytidine-3'-phosphate
  modified_base 9: mod_base = OTHER; note = 2'-fluoroadenosine-3'-phosphate
  modified_base 10: mod_base = OTHER; note = 2'-O-methyluridine-3'-phosphate
  modified_base 11: mod_base = OTHER; note = 2'-O-methylcytidine-3'-phosphate
  modified_base 12: mod_base = OTHER; note = 2'-O-methyladenosine-3'-phosphate
  modified_base 13: mod_base = OTHER; note = 2'-O-methyluridine-3'-phosphate
  modified_base 14: mod_base = OTHER; note = 2'-fluorouridine-3'-phosphate
  modified_base 15: mod_base = OTHER; note = 2'-O-methyluridine-3'-phosphate
  modified_base 16: mod_base = OTHER; note = 2'-fluorouridine-3'-phosphate
  modified_base 17: mod_base = OTHER; note = 2'-O-methylguanosine-3'-phosphate
  modified_base 18: mod_base = OTHER; note = 2'-O-methylguanosine-3'-phosphate
  modified_base 19: mod_base = OTHER; note = 2'-O-methylcytidine-3'-phosphate
  modified_base 20: mod_base = OTHER; note = 2'-O-methyluridine-3'-phosphate
  modified_base 21: mod_base = OTHER; note = 2'-O-methylguanosine-3'-phosphorothioate
  modified_base 22: mod_base = OTHER; note = 2'-O-methylcytidine-3'-phosphorothioate
  modified_base 23: mod_base = OTHER; note = 2'-O-methyluridine-3'-phosphate
tttttgccatcattttggctgct

SEQ ID NO: 4203 - RNA, 23 nt, synthetic construct
  source 1..23: mol_type = other RNA
  modified_base 1: mod_base = OTHER; note = Vinyl-phosphonate 2'-O-methyluridine-3'-phosphorothioate
  modified_base 2: mod_base = OTHER; note = 2'-fluorouridine -3'-phosphorothioate
  modified_base 3: mod_base = OTHER; note = 2'-O-methylcytidine-3'-phosphate
  modified_base 4: mod_base = OTHER; note = 2'-O-methyluridine-3'-phosphate
  modified_base 5: mod_base = OTHER; note = 2'-O-methyladenosine-3'-phosphate
  modified_base 6: mod_base = OTHER; note = 2'-fluorocytidine-3'-phosphate
  modified_base 7: mod_base = OTHER; note = 2'-O-methyladenosine-3'-phosphate
  modified_base 8: mod_base = OTHER; note = 2'-fluoroadenosine-3'-phosphate
  modified_base 9: mod_base = OTHER; note = 2'-fluoroguanosine-3'-phosphate
  modified_base 10: mod_base = OTHER; note = 2'-O-methyluridine-3'-phosphate
  modified_base 11: mod_base = OTHER; note = 2'-O-methyluridine-3'-phosphate
  modified_base 12: mod_base = OTHER; note = 2'-O-methylcytidine-3'-phosphate
  modified_base 13: mod_base = OTHER; note = 2'-O-methyladenosine-3'-phosphate
  modified_base 14: mod_base = OTHER; note = 2'-fluoroadenosine-3'-phosphate
  modified_base 15: mod_base = OTHER; note = 2'-O-methyladenosine-3'-phosphate
  modified_base 16: mod_base = OTHER; note = 2'-fluoroadenosine-3'-phosphate
  modified_base 17: mod_base = OTHER; note = 2'-O-methyladenosine-3'-phosphate
  modified_base 18: mod_base = OTHER; note = 2'-O-methyluridine-3'-phosphate
  modified_base 19: mod_base = OTHER; note = 2'-O-methyluridine-3'-phosphate
  modified_base 20: mod_base = OTHER; note = 2'-O-methylguanosine-3'-phosphate
  modified_base 21: mod_base = OTHER; note = 2'-O-methylguanosine-3'-phosphorothioate
  modified_base 22: mod_base = OTHER; note = 2'-O-methyladenosine-3'-phosphorothioate
  modified_base 23: mod_base = OTHER; note = 2'-O-methyladenosine-3'-phosphate
ttctacaagttcaaaaattggaa

SEQ ID NO: 4204 - RNA, 23 nt, synthetic construct
  source 1..23: mol_type = other RNA
  modified_base 1: mod_base = OTHER; note = Vinyl-phosphonate 2'-O-methyluridine-3'-phosphorothioate
  modified_base 2: mod_base = OTHER; note = 2'-fluoroadenosine-3'-phosphorothioate
  modified_base 3: mod_base = OTHER; note = 2'-O-methylguanosine-3'-phosphate
  modified_base 4: mod_base = OTHER; note = 2'-O-methyluridine-3'-phosphate
  modified_base 5: mod_base = OTHER; note = 2'-O-methyluridine-3'-phosphate
  modified_base 6: mod_base = OTHER; note = 2'-fluoroguanosine-3'-phosphate
  modified_base 7: mod_base = OTHER; note = 2'-O-methylguanosine-3'-phosphate
  modified_base 8: mod_base = OTHER; note = 2'-fluorocytidine-3'-phosphate
  modified_base 9: mod_base = OTHER; note = 2'-fluoroadenosine-3'-phosphate
  modified_base 10: mod_base = OTHER; note = 2'-O-methyladenosine-3'-phosphate
  modified_base 11: mod_base = OTHER; note = 2'-O-methyladenosine-3'-phosphate
  modified_base 12: mod_base = OTHER; note = 2'-O-methylcytidine-3'-phosphate
  modified_base 13: mod_base = OTHER; note = 2'-O-methyluridine-3'-phosphate
  modified_base 14: mod_base = OTHER; note = 2'-fluoroadenosine-3'-phosphate
  modified_base 15: mod_base = OTHER; note = 2'-O-methyluridine-3'-phosphate
  modified_base 16: mod_base = OTHER; note = 2'-fluorouridine-3'-phosphate
  modified_base 17: mod_base = OTHER; note = 2'-O-methylcytidine-3'-phosphate
  modified_base 18: mod_base = OTHER; note = 2'-O-methylcytidine-3'-phosphate
  modified_base 19: mod_base = OTHER; note = 2'-O-methyluridine-3'-phosphate
  modified_base 20: mod_base = OTHER; note = 2'-O-methyladenosine-3'-phosphate
  modified_base 21: mod_base = OTHER; note = 2'-O-methyluridine-3'-phosphorothioate
  modified_base 22: mod_base = OTHER; note = 2'-O-methyluridine-3'-phosphorothioate
  modified_base 23: mod_base = OTHER; note = 2'-O-methyluridine-3'-phosphate
tagttggcaaactattcctattt

SEQ ID NO: 4205 - RNA, 23 nt, synthetic construct
  source 1..23: mol_type = other RNA
  modified_base 1: mod_base = OTHER; note = Vinyl-phosphonate 2'-O-methyluridine-3'-phosphorothioate
  modified_base 2: mod_base = OTHER; note = 2'-fluorouridine -3'-phosphorothioate
  modified_base 3: mod_base = OTHER; note = 2'-O-methyluridine-3'-phosphate
  modified_base 4: mod_base = OTHER; note = 2'-O-methyluridine-3'-phosphate
  modified_base 5: mod_base = OTHER; note = 2'-O-methyluridine-3'-phosphate
  modified_base 6: mod_base = OTHER; note = 2'-fluorocytidine-3'-phosphate
  modified_base 7: mod_base = OTHER; note = 2'-O-methyluridine-3'-phosphate
  modified_base 8: mod_base = OTHER; note = 2'-fluorocytidine-3'-phosphate
  modified_base 9: mod_base = OTHER; note = 2'-fluorocytidine-3'-phosphate
  modified_base 10: mod_base = OTHER; note = 2'-O-methyladenosine-3'-phosphate
  modified_base 11: mod_base = OTHER; note = 2'-O-methyladenosine-3'-phosphate
  modified_base 12: mod_base = OTHER; note = 2'-O-methyladenosine-3'-phosphate
  modified_base 13: mod_base = OTHER; note = 2'-O-methyladenosine-3'-phosphate
  modified_base 14: mod_base = OTHER; note = 2'-fluorocytidine-3'-phosphate
  modified_base 15: mod_base = OTHER; note = 2'-O-methyladenosine-3'-phosphate
  modified_base 16: mod_base = OTHER; note = 2'-fluorouridine-3'-phosphate
  modified_base 17: mod_base = OTHER; note = 2'-O-methyluridine-3'-phosphate
  modified_base 18: mod_base = OTHER; note = 2'-O-methylcytidine-3'-phosphate
  modified_base 19: mod_base = OTHER; note = 2'-O-methyladenosine-3'-phosphate
  modified_base 20: mod_base = OTHER; note = 2'-O-methyladenosine-3'-phosphate
  modified_base 21: mod_base = OTHER; note = 2'-O-methyladenosine-3'-phosphorothioate
  modified_base 22: mod_base = OTHER; note = 2'-O-methylguanosine-3'-phosphorothioate
  modified_base 23: mod_base = OTHER; note = 2'-O-methyladenosine-3'-phosphate
tttttctccaaaacattcaaaga

SEQ ID NO: 4206 - RNA, 23 nt, synthetic construct
  source 1..23: mol_type = other RNA
  modified_base 1: mod_base = OTHER; note = Vinyl-phosphonate 2'-O-methyluridine-3'-phosphorothioate
  modified_base 2: mod_base = OTHER; note = 2'-fluoroguanosine-3'-phosphorothioate
  modified_base 3: mod_base = OTHER; note = 2'-O-methyluridine-3'-phosphate
  modified_base 4: mod_base = OTHER; note = 2'-O-methylguanosine-3'-phosphate
  modified_base 5: mod_base = OTHER; note = 2'-O-methyladenosine-3'-phosphate
  modified_base 6: mod_base = OTHER; note = 2'-fluorouridine-3'-phosphate
  modified_base 7: mod_base = OTHER; note = 2'-O-methyluridine-3'-phosphate
  modified_base 8: mod_base = OTHER; note = 2'-fluorocytidine-3'-phosphate
  modified_base 9: mod_base = OTHER; note = 2'-fluoroadenosine-3'-phosphate
  modified_base 10: mod_base = OTHER; note = 2'-O-methyluridine-3'-phosphate
  modified_base 11: mod_base = OTHER; note = 2'-O-methyluridine-3'-phosphate
  modified_base 12: mod_base = OTHER; note = 2'-O-methyladenosine-3'-phosphate
  modified_base 13: mod_base = OTHER; note = 2'-O-methyladenosine-3'-phosphate
  modified_base 14: mod_base = OTHER; note = 2'-fluoroadenosine-3'-phosphate
  modified_base 15: mod_base = OTHER; note = 2'-O-methyluridine-3'-phosphate
  modified_base 16: mod_base = OTHER; note = 2'-fluoroadenosine-3'-phosphate
  modified_base 17: mod_base = OTHER; note = 2'-O-methyluridine-3'-phosphate
  modified_base 18: mod_base = OTHER; note = 2'-O-methyluridine-3'-phosphate
  modified_base 19: mod_base = OTHER; note = 2'-O-methylguanosine-3'-phosphate
  modified_base 20: mod_base = OTHER; note = 2'-O-methyladenosine-3'-phosphate
  modified_base 21: mod_base = OTHER; note = 2'-O-methylcytidine-3'-phosphorothioate
  modified_base 22: mod_base = OTHER; note = 2'-O-methyladenosine-3'-phosphorothioate
  modified_base 23: mod_base = OTHER; note = 2'-O-methylcytidine-3'-phosphate
tgtgattcattaaatattgacac

SEQ ID NO: 4207 - RNA, 23 nt, synthetic construct
  source 1..23: mol_type = other RNA
  modified_base 1: mod_base = OTHER; note = Vinyl-phosphonate 2'-O-methyluridine-3'-phosphorothioate
  modified_base 2: mod_base = OTHER; note = 2'-fluoroguanosine-3'-phosphorothioate
  modified_base 3: mod_base = OTHER; note = 2'-O-methyluridine-3'-phosphate
  modified_base 4: mod_base = OTHER; note = 2'-O-methylguanosine-3'-phosphate
  modified_base 5: mod_base = OTHER; note = 2'-O-methylcytidine-3'-phosphate
  modified_base 6: mod_base = OTHER; note = 2'-fluoroadenosine-3'-phosphate
  modified_base 7: mod_base = OTHER; note = 2'-O-methyluridine-3'-phosphate
  modified_base 8: mod_base = OTHER; note = 2'-fluorouridine-3'-phosphate
  modified_base 9: mod_base = OTHER; note = 2'-fluorouridine-3'-phosphate
  modified_base 10: mod_base = OTHER; note = 2'-O-methyladenosine-3'-phosphate
  modified_base 11: mod_base = OTHER; note = 2'-O-methyladenosine-3'-phosphate
  modified_base 12: mod_base = OTHER; note = 2'-O-methyluridine-3'-phosphate
  modified_base 13: mod_base = OTHER; note = 2'-O-methyladenosine-3'-phosphate
  modified_base 14: mod_base = OTHER; note = 2'-fluorouridine-3'-phosphate
  modified_base 15: mod_base = OTHER; note = 2'-O-methyladenosine-3'-phosphate
  modified_base 16: mod_base = OTHER; note = 2'-fluorouridine-3'-phosphate
  modified_base 17: mod_base = OTHER; note = 2'-O-methyluridine-3'-phosphate
  modified_base 18: mod_base = OTHER; note = 2'-O-methylcytidine-3'-phosphate
  modified_base 19: mod_base = OTHER; note = 2'-O-methyluridine-3'-phosphate
  modified_base 20: mod_base = OTHER; note = 2'-O-methylcytidine-3'-phosphate
  modified_base 21: mod_base = OTHER; note = 2'-O-methyladenosine-3'-phosphorothioate
  modified_base 22: mod_base = OTHER; note = 2'-O-methylcytidine-3'-phosphorothioate
  modified_base 23: mod_base = OTHER; note = 2'-O-methyladenosine-3'-phosphate
tgtgcatttaatatattctcaca

SEQ ID NO: 4208 - RNA, 23 nt, synthetic construct
  source 1..23: mol_type = other RNA
  modified_base 1: mod_base = OTHER; note = Vinyl-phosphonate 2'-O-methyluridine-3'-phosphorothioate
  modified_base 2: mod_base = OTHER; note = 2'-fluorouridine -3'-phosphorothioate
  modified_base 3: mod_base = OTHER; note = 2'-O-methylcytidine-3'-phosphate
  modified_base 4: mod_base = OTHER; note = 2'-O-methylcytidine-3'-phosphate
  modified_base 5: mod_base = OTHER; note = 2'-O-methyluridine-3'-phosphate
  modified_base 6: mod_base = OTHER; note = 2'-fluoroadenosine-3'-phosphate
  modified_base 7: mod_base = OTHER; note = 2'-O-methyluridine-3'-phosphate
  modified_base 8: mod_base = OTHER; note = 2'-fluorouridine-3'-phosphate
  modified_base 9: mod_base = OTHER; note = 2'-fluorouridine-3'-phosphate
  modified_base 10: mod_base = OTHER; note = 2'-O-methyladenosine-3'-phosphate
  modified_base 11: mod_base = OTHER; note = 2'-O-methylguanosine-3'-phosphate
  modified_base 12: mod_base = OTHER; note = 2'-O-methyluridine-3'-phosphate
  modified_base 13: mod_base = OTHER; note = 2'-O-methylcytidine-3'-phosphate
  modified_base 14: mod_base = OTHER; note = 2'-fluorocytidine-3'-phosphate
  modified_base 15: mod_base = OTHER; note = 2'-O-methylcytidine-3'-phosphate
  modified_base 16: mod_base = OTHER; note = 2'-fluorouridine-3'-phosphate
  modified_base 17: mod_base = OTHER; note = 2'-O-methyluridine-3'-phosphate
  modified_base 18: mod_base = OTHER; note = 2'-O-methylguanosine-3'-phosphate
  modified_base 19: mod_base = OTHER; note = 2'-O-methyluridine-3'-phosphate
  modified_base 20: mod_base = OTHER; note = 2'-O-methyluridine-3'-phosphate
  modified_base 21: mod_base = OTHER; note = 2'-O-methyladenosine-3'-phosphorothioate
  modified_base 22: mod_base = OTHER; note = 2'-O-methyladenosine-3'-phosphorothioate
  modified_base 23: mod_base = OTHER; note = 2'-O-methylguanosine-3'-phosphate
ttcctatttagtcccttgttaag

SEQ ID NO: 4209 - RNA, 23 nt, synthetic construct
  source 1..23: mol_type = other RNA
  modified_base 1: mod_base = OTHER; note = Vinyl-phosphonate 2'-O-methyluridine-3'-phosphorothioate
  modified_base 2: mod_base = OTHER; note = 2'-fluorocytidine-3'-phosphorothioate
  modified_base 3: mod_base = OTHER; note = 2'-O-methyladenosine-3'-phosphate
  modified_base 4: mod_base = OTHER; note = 2'-O-methylguanosine-3'-phosphate
  modified_base 5: mod_base = OTHER; note = 2'-O-methyladenosine-3'-phosphate
  modified_base 6: mod_base = OTHER; note = 2'-fluoroguanosine-3'-phosphate
  modified_base 7: mod_base = OTHER; note = 2'-O-methylguanosine-3'-phosphate
  modified_base 8: mod_base = OTHER; note = 2'-fluorouridine-3'-phosphate
  modified_base 9: mod_base = OTHER; note = 2'-fluoroguanosine-3'-phosphate
  modified_base 10: mod_base = OTHER; note = 2'-O-methylguanosine-3'-phosphate
  modified_base 11: mod_base = OTHER; note = 2'-O-methyladenosine-3'-phosphate
  modified_base 12: mod_base = OTHER; note = 2'-O-methyladenosine-3'-phosphate
  modified_base 13: mod_base = OTHER; note = 2'-O-methylguanosine-3'-phosphate
  modified_base 14: mod_base = OTHER; note = 2'-fluoroadenosine-3'-phosphate
  modified_base 15: mod_base = OTHER; note = 2'-O-methyladenosine-3'-phosphate
  modified_base 16: mod_base = OTHER; note = 2'-fluoroguanosine-3'-phosphate
  modified_base 17: mod_base = OTHER; note = 2'-O-methyladenosine-3'-phosphate
  modified_base 18: mod_base = OTHER; note = 2'-O-methyladenosine-3'-phosphate
  modified_base 19: mod_base = OTHER; note = 2'-O-methylguanosine-3'-phosphate
  modified_base 20: mod_base = OTHER; note = 2'-O-methylcytidine-3'-phosphate
  modified_base 21: mod_base = OTHER; note = 2'-O-methylcytidine-3'-phosphorothioate
  modified_base 22: mod_base = OTHER; note = 2'-O-methylguanosine-3'-phosphorothioate
  modified_base 23: mod_base = OTHER; note = 2'-O-methylcytidine-3'-phosphate
tcagaggtggaagaagaagccgc

SEQ ID NO: 4210 - RNA, 23 nt, synthetic construct
  source 1..23: mol_type = other RNA
  modified_base 1: mod_base = OTHER; note = Vinyl-phosphonate 2'-O-methyluridine-3'-phosphorothioate
  modified_base 2: mod_base = OTHER; note = 2'-fluoroadenosine-3'-phosphorothioate
  modified_base 3: mod_base = OTHER; note = 2'-O-methyladenosine-3'-phosphate
  modified_base 4: mod_base = OTHER; note = 2'-O-methylguanosine-3'-phosphate
  modified_base 5: mod_base = OTHER; note = 2'-O-methyladenosine-3'-phosphate
  modified_base 6: mod_base = OTHER; note = 2'-fluorouridine-3'-phosphate
  modified_base 7: mod_base = OTHER; note = 2'-O-methyladenosine-3'-phosphate
  modified_base 8: mod_base = OTHER; note = 2'-fluoroadenosine-3'-phosphate
  modified_base 9: mod_base = OTHER; note = 2'-fluorocytidine-3'-phosphate
  modified_base 10: mod_base = OTHER; note = 2'-O-methylcytidine-3'-phosphate
  modified_base 11: mod_base = OTHER; note = 2'-O-methyladenosine-3'-phosphate
  modified_base 12: mod_base = OTHER; note = 2'-O-methylcytidine-3'-phosphate
  modified_base 13: mod_base = OTHER; note = 2'-O-methyladenosine-3'-phosphate
  modified_base 14: mod_base = OTHER; note = 2'-fluorouridine-3'-phosphate
  modified_base 15: mod_base = OTHER; note = 2'-O-methylguanosine-3'-phosphate
  modified_base 16: mod_base = OTHER; note = 2'-fluorouridine-3'-phosphate
  modified_base 17: mod_base = OTHER; note = 2'-O-methyluridine-3'-phosphate
  modified_base 18: mod_base = OTHER; note = 2'-O-methylcytidine-3'-phosphate
  modified_base 19: mod_base = OTHER; note = 2'-O-methylcytidine-3'-phosphate
  modified_base 20: mod_base = OTHER; note = 2'-O-methyladenosine-3'-phosphate
  modified_base 21: mod_base = OTHER; note = 2'-O-methyladenosine-3'-phosphorothioate
  modified_base 22: mod_base = OTHER; note = 2'-O-methyluridine-3'-phosphorothioate
  modified_base 23: mod_base = OTHER; note = 2'-O-methyluridine-3'-phosphate
taagataaccacatgttccaatt

SEQ ID NO: 4211 - RNA, 23 nt, synthetic construct
  source 1..23: mol_type = other RNA
  modified_base 1: mod_base = OTHER; note = Vinyl-phosphonate 2'-O-methyluridine-3'-phosphorothioate
  modified_base 2: mod_base = OTHER; note = 2'-fluoroadenosine-3'-phosphorothioate
  modified_base 3: mod_base = OTHER; note = 2'-O-methyladenosine-3'-phosphate
  modified_base 4: mod_base = OTHER; note = 2'-O-methyladenosine-3'-phosphate
  modified_base 5: mod_base = OTHER; note = 2'-O-methylguanosine-3'-phosphate
  modified_base 6: mod_base = OTHER; note = 2'-fluoroadenosine-3'-phosphate
  modified_base 7: mod_base = OTHER; note = 2'-O-methyladenosine-3'-phosphate
  modified_base 8: mod_base = OTHER; note = 2'-fluorouridine-3'-phosphate
  modified_base 9: mod_base = OTHER; note = 2'-fluorocytidine-3'-phosphate
  modified_base 10: mod_base = OTHER; note = 2'-O-methyladenosine-3'-phosphate
  modified_base 11: mod_base = OTHER; note = 2'-O-methyluridine-3'-phosphate
  modified_base 12: mod_base = OTHER; note = 2'-O-methylcytidine-3'-phosphate
  modified_base 13: mod_base = OTHER; note = 2'-O-methyluridine-3'-phosphate
  modified_base 14: mod_base = OTHER; note = 2'-fluoroguanosine-3'-phosphate
  modified_base 15: mod_base = OTHER; note = 2'-O-methyluridine-3'-phosphate
  modified_base 16: mod_base = OTHER; note = 2'-fluorouridine-3'-phosphate
  modified_base 17: mod_base = OTHER; note = 2'-O-methylcytidine-3'-phosphate
  modified_base 18: mod_base = OTHER; note = 2'-O-methyluridine-3'-phosphate
  modified_base 19: mod_base = OTHER; note = 2'-O-methylcytidine-3'-phosphate
  modified_base 20: mod_base = OTHER; note = 2'-O-methyluridine-3'-phosphate
  modified_base 21: mod_base = OTHER; note = 2'-O-methylguanosine-3'-phosphorothioate
  modified_base 22: mod_base = OTHER; note = 2'-O-methylguanosine-3'-phosphorothioate
  modified_base 23: mod_base = OTHER; note = 2'-O-methyladenosine-3'-phosphate
taaagaatcatctgttctctgga

SEQ ID NO: 4212 - RNA, 23 nt, synthetic construct
  source 1..23: mol_type = other RNA
  modified_base 1: mod_base = OTHER; note = Vinyl-phosphonate 2'-O-methyluridine-3'-phosphorothioate
  modified_base 2: mod_base = OTHER; note = 2'-fluoroadenosine-3'-phosphorothioate
  modified_base 3: mod_base = OTHER; note = 2'-O-methyladenosine-3'-phosphate
  modified_base 4: mod_base = OTHER; note = 2'-O-methyladenosine-3'-phosphate
  modified_base 5: mod_base = OTHER; note = 2'-O-methyladenosine-3'-phosphate
  modified_base 6: mod_base = OTHER; note = 2'-fluorocytidine-3'-phosphate
  modified_base 7: mod_base = OTHER; note = 2'-O-methylcytidine-3'-phosphate
  modified_base 8: mod_base = OTHER; note = 2'-fluorocytidine-3'-phosphate
  modified_base 9: mod_base = OTHER; note = 2'-fluoroadenosine-3'-phosphate
  modified_base 10: mod_base = OTHER; note = 2'-O-methyladenosine-3'-phosphate
  modified_base 11: mod_base = OTHER; note = 2'-O-methyluridine-3'-phosphate
  modified_base 12: mod_base = OTHER; note = 2'-O-methyladenosine-3'-phosphate
  modified_base 13: mod_base = OTHER; note = 2'-O-methyladenosine-3'-phosphate
  modified_base 14: mod_base = OTHER; note = 2'-fluoroadenosine-3'-phosphate
  modified_base 15: mod_base = OTHER; note = 2'-O-methyladenosine-3'-phosphate
  modified_base 16: mod_base = OTHER; note = 2'-fluorouridine-3'-phosphate
  modified_base 17: mod_base = OTHER; note = 2'-O-methyladenosine-3'-phosphate
  modified_base 18: mod_base = OTHER; note = 2'-O-methyladenosine-3'-phosphate
  modified_base 19: mod_base = OTHER; note = 2'-O-methylcytidine-3'-phosphate
  modified_base 20: mod_base = OTHER; note = 2'-O-methyladenosine-3'-phosphate
  modified_base 21: mod_base = OTHER; note = 2'-O-methylguanosine-3'-phosphorothioate
  modified_base 22: mod_base = OTHER; note = 2'-O-methyladenosine-3'-phosphorothioate
  modified_base 23: mod_base = OTHER; note = 2'-O-methylcytidine-3'-phosphate
taaaacccaataaaataacagac

SEQ ID NO: 4213 - RNA, 23 nt, synthetic construct
  source 1..23: mol_type = other RNA
  modified_base 1: mod_base = OTHER; note = Vinyl-phosphonate 2'-O-methyluridine-3'-phosphorothioate
  modified_base 2: mod_base = OTHER; note = 2'-fluoroadenosine-3'-phosphorothioate
  modified_base 3: mod_base = OTHER; note = 2'-O-methylcytidine-3'-phosphate
  modified_base 4: mod_base = OTHER; note = 2'-O-methylcytidine-3'-phosphate
  modified_base 5: mod_base = OTHER; note = 2'-O-methyladenosine-3'-phosphate
  modified_base 6: mod_base = OTHER; note = 2'-fluoroadenosine-3'-phosphate
  modified_base 7: mod_base = OTHER; note = 2'-O-methylguanosine-3'-phosphate
  modified_base 8: mod_base = OTHER; note = 2'-fluoroadenosine-3'-phosphate
  modified_base 9: mod_base = OTHER; note = 2'-fluorouridine-3'-phosphate
  modified_base 10: mod_base = OTHER; note = 2'-O-methyluridine-3'-phosphate
  modified_base 11: mod_base = OTHER; note = 2'-O-methyluridine-3'-phosphate
  modified_base 12: mod_base = OTHER; note = 2'-O-methylguanosine-3'-phosphate
  modified_base 13: mod_base = OTHER; note = 2'-O-methylcytidine-3'-phosphate
  modified_base 14: mod_base = OTHER; note = 2'-fluorouridine-3'-phosphate
  modified_base 15: mod_base = OTHER; note = 2'-O-methyluridine-3'-phosphate
  modified_base 16: mod_base = OTHER; note = 2'-fluorocytidine-3'-phosphate
  modified_base 17: mod_base = OTHER; note = 2'-O-methyluridine-3'-phosphate
  modified_base 18: mod_base = OTHER; note = 2'-O-methyluridine-3'-phosphate
  modified_base 19: mod_base = OTHER; note = 2'-O-methylcytidine-3'-phosphate
  modified_base 20: mod_base = OTHER; note = 2'-O-methyladenosine-3'-phosphate
  modified_base 21: mod_base = OTHER; note = 2'-O-methyluridine-3'-phosphorothioate
  modified_base 22: mod_base = OTHER; note = 2'-O-methylcytidine-3'-phosphorothioate
  modified_base 23: mod_base = OTHER; note = 2'-O-methyluridine-3'-phosphate
taccaagatttgcttcttcatct

SEQ ID NO: 4214 - RNA, 23 nt, synthetic construct
  source 1..23: mol_type = other RNA
  modified_base 1: mod_base = OTHER; note = Vinyl-phosphonate 2'-O-methyluridine-3'-phosphorothioate
  modified_base 2: mod_base = OTHER; note = 2'-fluorocytidine-3'-phosphorothioate
  modified_base 3: mod_base = OTHER; note = 2'-O-methyladenosine-3'-phosphate
  modified_base 4: mod_base = OTHER; note = 2'-O-methyladenosine-3'-phosphate
  modified_base 5: mod_base = OTHER; note = 2'-O-methyladenosine-3'-phosphate
  modified_base 6: mod_base = OTHER; note = 2'-fluoroadenosine-3'-phosphate
  modified_base 7: mod_base = OTHER; note = 2'-O-methyluridine-3'-phosphate
  modified_base 8: mod_base = OTHER; note = 2'-fluorouridine-3'-phosphate
  modified_base 9: mod_base = OTHER; note = 2'-fluoroguanosine-3'-phosphate
  modified_base 10: mod_base = OTHER; note = 2'-O-methylcytidine-3'-phosphate
  modified_base 11: mod_base = OTHER; note = 2'-O-methyladenosine-3'-phosphate
  modified_base 12: mod_base = OTHER; note = 2'-O-methyluridine-3'-phosphate
  modified_base 13: mod_base = OTHER; note = 2'-O-methylguanosine-3'-phosphate
  modified_base 14: mod_base = OTHER; note = 2'-fluoroadenosine-3'-phosphate
  modified_base 15: mod_base = OTHER; note = 2'-O-methyluridine-3'-phosphate
  modified_base 16: mod_base = OTHER; note = 2'-fluorouridine-3'-phosphate
  modified_base 17: mod_base = OTHER; note = 2'-O-methylcytidine-3'-phosphate
  modified_base 18: mod_base = OTHER; note = 2'-O-methylcytidine-3'-phosphate
  modified_base 19: mod_base = OTHER; note = 2'-O-methyladenosine-3'-phosphate
  modified_base 20: mod_base = OTHER; note = 2'-O-methyladenosine-3'-phosphate
  modified_base 21: mod_base = OTHER; note = 2'-O-methyladenosine-3'-phosphorothioate
  modified_base 22: mod_base = OTHER; note = 2'-O-methyladenosine-3'-phosphorothioate
  modified_base 23: mod_base = OTHER; note = 2'-O-methyluridine-3'-phosphate
tcaaaattgcatgattccaaaat

SEQ ID NO: 4215 - RNA, 23 nt, synthetic construct
  source 1..23: mol_type = other RNA
  modified_base 1: mod_base = OTHER; note = Vinyl-phosphonate 2'-O-methyluridine-3'-phosphorothioate
  modified_base 2: mod_base = OTHER; note = 2'-fluoroadenosine-3'-phosphorothioate
  modified_base 3: mod_base = OTHER; note = 2'-O-methylguanosine-3'-phosphate
  modified_base 4: mod_base = OTHER; note = 2'-O-methylcytidine-3'-phosphate
  modified_base 5: mod_base = OTHER; note = 2'-O-methyladenosine-3'-phosphate
  modified_base 6: mod_base = OTHER; note = 2'-fluoroadenosine-3'-phosphate
  modified_base 7: mod_base = OTHER; note = 2'-O-methylguanosine-3'-phosphate
  modified_base 8: mod_base = OTHER; note = 2'-fluorouridine-3'-phosphate
  modified_base 9: mod_base = OTHER; note = 2'-fluorouridine-3'-phosphate
  modified_base 10: mod_base = OTHER; note = 2'-O-methyluridine-3'-phosphate
  modified_base 11: mod_base = OTHER; note = 2'-O-methyladenosine-3'-phosphate
  modified_base 12: mod_base = OTHER; note = 2'-O-methylcytidine-3'-phosphate
  modified_base 13: mod_base = OTHER; note = 2'-O-methyladenosine-3'-phosphate
  modified_base 14: mod_base = OTHER; note = 2'-fluoroadenosine-3'-phosphate
  modified_base 15: mod_base = OTHER; note = 2'-O-methyladenosine-3'-phosphate
  modified_base 16: mod_base = OTHER; note = 2'-fluoroadenosine-3'-phosphate
  modified_base 17: mod_base = OTHER; note = 2'-O-methylcytidine-3'-phosphate
  modified_base 18: mod_base = OTHER; note = 2'-O-methyladenosine-3'-phosphate
  modified_base 19: mod_base = OTHER; note = 2'-O-methyluridine-3'-phosphate
  modified_base 20: mod_base = OTHER; note = 2'-O-methyluridine-3'-phosphate
  modified_base 21: mod_base = OTHER; note = 2'-O-methylguanosine-3'-phosphorothioate
  modified_base 22: mod_base = OTHER; note = 2'-O-methyluridine-3'-phosphorothioate
  modified_base 23: mod_base = OTHER; note = 2'-O-methyladenosine-3'-phosphate
tagcaagtttacaaaacattgta

SEQ ID NO: 4216 - RNA, 23 nt, synthetic construct
  source 1..23: mol_type = other RNA
  modified_base 1: mod_base = OTHER; note = Vinyl-phosphonate 2'-O-methyluridine-3'-phosphorothioate
  modified_base 2: mod_base = OTHER; note = 2'-fluorouridine -3'-phosphorothioate
  modified_base 3: mod_base = OTHER; note = 2'-O-methyluridine-3'-phosphate
  modified_base 4: mod_base = OTHER; note = 2'-O-methyluridine-3'-phosphate
  modified_base 5: mod_base = OTHER; note = 2'-O-methyluridine-3'-phosphate
  modified_base 6: mod_base = OTHER; note = 2'-fluoroguanosine-3'-phosphate
  modified_base 7: mod_base = OTHER; note = 2'-O-methylcytidine-3'-phosphate
  modified_base 8: mod_base = OTHER; note = 2'-fluorocytidine-3'-phosphate
  modified_base 9: mod_base = OTHER; note = 2'-fluoroadenosine-3'-phosphate
  modified_base 10: mod_base = OTHER; note = 2'-O-methyluridine-3'-phosphate
  modified_base 11: mod_base = OTHER; note = 2'-O-methyluridine-3'-phosphate
  modified_base 12: mod_base = OTHER; note = 2'-O-methyladenosine-3'-phosphate
  modified_base 13: mod_base = OTHER; note = 2'-O-methyluridine-3'-phosphate
  modified_base 14: mod_base = OTHER; note = 2'-fluorouridine-3'-phosphate
  modified_base 15: mod_base = OTHER; note = 2'-O-methyladenosine-3'-phosphate
  modified_base 16: mod_base = OTHER; note = 2'-fluorocytidine-3'-phosphate
  modified_base 17: mod_base = OTHER; note = 2'-O-methylguanosine-3'-phosphate
  modified_base 18: mod_base = OTHER; note = 2'-O-methyladenosine-3'-phosphate
  modified_base 19: mod_base = OTHER; note = 2'-O-methyluridine-3'-phosphate
  modified_base 20: mod_base = OTHER; note = 2'-O-methylcytidine-3'-phosphate
  modified_base 21: mod_base = OTHER; note = 2'-O-methylcytidine-3'-phosphorothioate
  modified_base 22: mod_base = OTHER; note = 2'-O-methylcytidine-3'-phosphorothioate
  modified_base 23: mod_base = OTHER; note = 2'-O-methyladenosine-3'-phosphate
tttttgccattattacgatccca

SEQ ID NO: 4217 - RNA, 23 nt, synthetic construct
  source 1..23: mol_type = other RNA
  modified_base 1: mod_base = OTHER; note = Vinyl-phosphonate 2'-O-methyluridine-3'-phosphorothioate
  modified_base 2: mod_base = OTHER; note = 2'-fluoroadenosine-3'-phosphorothioate
  modified_base 3: mod_base = OTHER; note = 2'-O-methylcytidine-3'-phosphate
  modified_base 4: mod_base = OTHER; note = 2'-O-methyladenosine-3'-phosphate
  modified_base 5: mod_base = OTHER; note = 2'-O-methylguanosine-3'-phosphate
  modified_base 6: mod_base = OTHER; note = 2'-fluoroguanosine-3'-phosphate
  modified_base 7: mod_base = OTHER; note = 2'-O-methyladenosine-3'-phosphate
  modified_base 8: mod_base = OTHER; note = 2'-fluoroadenosine-3'-phosphate
  modified_base 9: mod_base = OTHER; note = 2'-fluorocytidine-3'-phosphate
  modified_base 10: mod_base = OTHER; note = 2'-O-methylcytidine-3'-phosphate
  modified_base 11: mod_base = OTHER; note = 2'-O-methyluridine-3'-phosphate
  modified_base 12: mod_base = OTHER; note = 2'-O-methylguanosine-3'-phosphate
  modified_base 13: mod_base = OTHER; note = 2'-O-methyladenosine-3'-phosphate
  modified_base 14: mod_base = OTHER; note = 2'-fluoroguanosine-3'-phosphate
  modified_base 15: mod_base = OTHER; note = 2'-O-methyladenosine-3'-phosphate
  modified_base 16: mod_base = OTHER; note = 2'-fluoroadenosine-3'-phosphate
  modified_base 17: mod_base = OTHER; note = 2'-O-methyladenosine-3'-phosphate
  modified_base 18: mod_base = OTHER; note = 2'-O-methylguanosine-3'-phosphate
  modified_base 19: mod_base = OTHER; note = 2'-O-methylcytidine-3'-phosphate
  modified_base 20: mod_base = OTHER; note = 2'-O-methyladenosine-3'-phosphate
  modified_base 21: mod_base = OTHER; note = 2'-O-methylcytidine-3'-phosphorothioate
  modified_base 22: mod_base = OTHER; note = 2'-O-methylcytidine-3'-phosphorothioate
  modified_base 23: mod_base = OTHER; note = 2'-O-methylcytidine-3'-phosphate
tacaggaacctgagaaagcaccc

SEQ ID NO: 4218 - RNA, 23 nt, synthetic construct
  source 1..23: mol_type = other RNA
  modified_base 1: mod_base = OTHER; note = Vinyl-phosphonate 2'-O-methyluridine-3'-phosphorothioate
  modified_base 2: mod_base = OTHER; note = 2'-fluoroadenosine-3'-phosphorothioate
  modified_base 3: mod_base = OTHER; note = 2'-O-methyluridine-3'-phosphate
  modified_base 4: mod_base = OTHER; note = 2'-O-methylcytidine-3'-phosphate
  modified_base 5: mod_base = OTHER; note = 2'-O-methyladenosine-3'-phosphate
  modified_base 6: mod_base = OTHER; note = 2'-fluorocytidine-3'-phosphate
  modified_base 7: mod_base = OTHER; note = 2'-O-methylcytidine-3'-phosphate
  modified_base 8: mod_base = OTHER; note = 2'-fluoroadenosine-3'-phosphate
  modified_base 9: mod_base = OTHER; note = 2'-fluorocytidine-3'-phosphate
  modified_base 10: mod_base = OTHER; note = 2'-O-methyluridine-3'-phosphate
  modified_base 11: mod_base = OTHER; note = 2'-O-methyluridine-3'-phosphate
  modified_base 12: mod_base = OTHER; note = 2'-O-methyluridine-3'-phosphate
  modified_base 13: mod_base = OTHER; note = 2'-O-methylcytidine-3'-phosphate
  modified_base 14: mod_base = OTHER; note = 2'-fluoroadenosine-3'-phosphate
  modified_base 15: mod_base = OTHER; note = 2'-O-methylguanosine-3'-phosphate
  modified_base 16: mod_base = OTHER; note = 2'-fluorouridine-3'-phosphate
  modified_base 17: mod_base = OTHER; note = 2'-O-methyladenosine-3'-phosphate
  modified_base 18: mod_base = OTHER; note = 2'-O-methyluridine-3'-phosphate
  modified_base 19: mod_base = OTHER; note = 2'-O-methylcytidine-3'-phosphate
  modified_base 20: mod_base = OTHER; note = 2'-O-methyladenosine-3'-phosphate
  modified_base 21: mod_base = OTHER; note = 2'-O-methyluridine-3'-phosphorothioate
  modified_base 22: mod_base = OTHER; note = 2'-O-methyluridine-3'-phosphorothioate
  modified_base 23: mod_base = OTHER; note = 2'-O-methyladenosine-3'-phosphate
tatcaccactttcagtatcatta

SEQ ID NO: 4219 - RNA, 23 nt, synthetic construct
  source 1..23: mol_type = other RNA
  modified_base 1: mod_base = OTHER; note = Vinyl-phosphonate 2'-O-methyluridine-3'-phosphorothioate
  modified_base 2: mod_base = OTHER; note = 2'-fluoroadenosine-3'-phosphorothioate
  modified_base 3: mod_base = OTHER; note = 2'-O-methylcytidine-3'-phosphate
  modified_base 4: mod_base = OTHER; note = 2'-O-methyluridine-3'-phosphate
  modified_base 5: mod_base = OTHER; note = 2'-O-methyladenosine-3'-phosphate
  modified_base 6: mod_base = OTHER; note = 2'-fluoroadenosine-3'-phosphate
  modified_base 7: mod_base = OTHER; note = 2'-O-methyladenosine-3'-phosphate
  modified_base 8: mod_base = OTHER; note = 2'-fluoroadenosine-3'-phosphate
  modified_base 9: mod_base = OTHER; note = 2'-fluorouridine-3'-phosphate
  modified_base 10: mod_base = OTHER; note = 2'-O-methylcytidine-3'-phosphate
  modified_base 11: mod_base = OTHER; note = 2'-O-methyladenosine-3'-phosphate
  modified_base 12: mod_base = OTHER; note = 2'-O-methylguanosine-3'-phosphate
  modified_base 13: mod_base = OTHER; note = 2'-O-methylguanosine-3'-phosphate
  modified_base 14: mod_base = OTHER; note = 2'-fluorouridine-3'-phosphate
  modified_base 15: mod_base = OTHER; note = 2'-O-methylcytidine-3'-phosphate
  modified_base 16: mod_base = OTHER; note = 2'-fluorocytidine-3'-phosphate
  modified_base 17: mod_base = OTHER; note = 2'-O-methyladenosine-3'-phosphate
  modified_base 18: mod_base = OTHER; note = 2'-O-methylguanosine-3'-phosphate
  modified_base 19: mod_base = OTHER; note = 2'-O-methyluridine-3'-phosphate
  modified_base 20: mod_base = OTHER; note = 2'-O-methylguanosine-3'-phosphate
  modified_base 21: mod_base = OTHER; note = 2'-O-methyladenosine-3'-phosphorothioate
  modified_base 22: mod_base = OTHER; note = 2'-O-methyluridine-3'-phosphorothioate
  modified_base 23: mod_base = OTHER; note = 2'-O-methyladenosine-3'-phosphate
tactaaaatcaggtccagtgata

SEQ ID NO: 4220 - RNA, 23 nt, synthetic construct
  source 1..23: mol_type = other RNA
  modified_base 1: mod_base = OTHER; note = Vinyl-phosphonate 2'-O-methyluridine-3'-phosphorothioate
  modified_base 2: mod_base = OTHER; note = 2'-fluorouridine -3'-phosphorothioate
  modified_base 3: mod_base = OTHER; note = 2'-O-methyluridine-3'-phosphate
  modified_base 4: mod_base = OTHER; note = 2'-O-methylcytidine-3'-phosphate
  modified_base 5: mod_base = OTHER; note = 2'-O-methyladenosine-3'-phosphate
  modified_base 6: mod_base = OTHER; note = 2'-fluorouridine-3'-phosphate
  modified_base 7: mod_base = OTHER; note = 2'-O-methyladenosine-3'-phosphate
  modified_base 8: mod_base = OTHER; note = 2'-fluoroadenosine-3'-phosphate
  modified_base 9: mod_base = OTHER; note = 2'-fluoroadenosine-3'-phosphate
  modified_base 10: mod_base = OTHER; note = 2'-O-methyladenosine-3'-phosphate
  modified_base 11: mod_base = OTHER; note = 2'-O-methylguanosine-3'-phosphate
  modified_base 12: mod_base = OTHER; note = 2'-O-methylcytidine-3'-phosphate
  modified_base 13: mod_base = OTHER; note = 2'-O-methyladenosine-3'-phosphate
  modified_base 14: mod_base = OTHER; note = 2'-fluoroadenosine-3'-phosphate
  modified_base 15: mod_base = OTHER; note = 2'-O-methyladenosine-3'-phosphate
  modified_base 16: mod_base = OTHER; note = 2'-fluoroadenosine-3'-phosphate
  modified_base 17: mod_base = OTHER; note = 2'-O-methyladenosine-3'-phosphate
  modified_base 18: mod_base = OTHER; note = 2'-O-methylguanosine-3'-phosphate
  modified_base 19: mod_base = OTHER; note = 2'-O-methyluridine-3'-phosphate
  modified_base 20: mod_base = OTHER; note = 2'-O-methyluridine-3'-phosphate
  modified_base 21: mod_base = OTHER; note = 2'-O-methylcytidine-3'-phosphorothioate
  modified_base 22: mod_base = OTHER; note = 2'-O-methylcytidine-3'-phosphorothioate
  modified_base 23: mod_base = OTHER; note = 2'-O-methyluridine-3'-phosphate
tttcataaaagcaaaaagttcct

SEQ ID NO: 4221 - RNA, 23 nt, synthetic construct
  source 1..23: mol_type = other RNA
  modified_base 1: mod_base = OTHER; note = Vinyl-phosphonate 2'-O-methyluridine-3'-phosphorothioate
  modified_base 2: mod_base = OTHER; note = 2'-fluoroadenosine-3'-phosphorothioate
  modified_base 3: mod_base = OTHER; note = 2'-O-methyladenosine-3'-phosphate
  modified_base 4: mod_base = OTHER; note = 2'-O-methylcytidine-3'-phosphate
  modified_base 5: mod_base = OTHER; note = 2'-O-methyladenosine-3'-phosphate
  modified_base 6: mod_base = OTHER; note = 2'-fluoroadenosine-3'-phosphate
  modified_base 7: mod_base = OTHER; note = 2'-O-methyladenosine-3'-phosphate
  modified_base 8: mod_base = OTHER; note = 2'-fluorouridine-3'-phosphate
  modified_base 9: mod_base = OTHER; note = 2'-fluorocytidine-3'-phosphate
  modified_base 10: mod_base = OTHER; note = 2'-O-methyluridine-3'-phosphate
  modified_base 11: mod_base = OTHER; note = 2'-O-methylguanosine-3'-phosphate
  modified_base 12: mod_base = OTHER; note = 2'-O-methyluridine-3'-phosphate
  modified_base 13: mod_base = OTHER; note = 2'-O-methylguanosine-3'-phosphate
  modified_base 14: mod_base = OTHER; note = 2'-fluorocytidine-3'-phosphate
  modified_base 15: mod_base = OTHER; note = 2'-O-methyluridine-3'-phosphate
  modified_base 16: mod_base = OTHER; note = 2'-fluoroguanosine-3'-phosphate
  modified_base 17: mod_base = OTHER; note = 2'-O-methyluridine-3'-phosphate
  modified_base 18: mod_base = OTHER; note = 2'-O-methylguanosine-3'-phosphate
  modified_base 19: mod_base = OTHER; note = 2'-O-methyluridine-3'-phosphate
  modified_base 20: mod_base = OTHER; note = 2'-O-methyluridine-3'-phosphate
  modified_base 21: mod_base = OTHER; note = 2'-O-methylcytidine-3'-phosphorothioate
  modified_base 22: mod_base = OTHER; note = 2'-O-methyladenosine-3'-phosphorothioate
  modified_base 23: mod_base = OTHER; note = 2'-O-methyluridine-3'-phosphate
taacaaatctgtgctgtgttcat

SEQ ID NO: 4222 - RNA, 23 nt, synthetic construct
  source 1..23: mol_type = other RNA
  modified_base 1: mod_base = OTHER; note = Vinyl-phosphonate 2'-O-methyluridine-3'-phosphorothioate
  modified_base 2: mod_base = OTHER; note = 2'-fluorouridine -3'-phosphorothioate
  modified_base 3: mod_base = OTHER; note = 2'-O-methylcytidine-3'-phosphate
  modified_base 4: mod_base = OTHER; note = 2'-O-methyluridine-3'-phosphate
  modified_base 5: mod_base = OTHER; note = 2'-O-methyladenosine-3'-phosphate
  modified_base 6: mod_base = OTHER; note = 2'-fluorocytidine-3'-phosphate
  modified_base 7: mod_base = OTHER; note = 2'-O-methylguanosine-3'-phosphate
  modified_base 8: mod_base = OTHER; note = 2'-fluoroadenosine-3'-phosphate
  modified_base 9: mod_base = OTHER; note = 2'-fluorouridine-3'-phosphate
  modified_base 10: mod_base = OTHER; note = 2'-O-methyluridine-3'-phosphate
  modified_base 11: mod_base = OTHER; note = 2'-O-methyluridine-3'-phosphate
  modified_base 12: mod_base = OTHER; note = 2'-O-methylcytidine-3'-phosphate
  modified_base 13: mod_base = OTHER; note = 2'-O-methylcytidine-3'-phosphate
  modified_base 14: mod_base = OTHER; note = 2'-fluorouridine-3'-phosphate
  modified_base 15: mod_base = OTHER; note = 2'-O-methyluridine-3'-phosphate
  modified_base 16: mod_base = OTHER; note = 2'-fluorocytidine-3'-phosphate
  modified_base 17: mod_base = OTHER; note = 2'-O-methylcytidine-3'-phosphate
  modified_base 18: mod_base = OTHER; note = 2'-O-methyladenosine-3'-phosphate
  modified_base 19: mod_base = OTHER; note = 2'-O-methyluridine-3'-phosphate
  modified_base 20: mod_base = OTHER; note = 2'-O-methyladenosine-3'-phosphate
  modified_base 21: mod_base = OTHER; note = 2'-O-methyluridine-3'-phosphorothioate
  modified_base 22: mod_base = OTHER; note = 2'-O-methylcytidine-3'-phosphorothioate
  modified_base 23: mod_base = OTHER; note = 2'-O-methyluridine-3'-phosphate
ttctacgatttccttccatatct

SEQ ID NO: 4223 - RNA, 23 nt, synthetic construct
  source 1..23: mol_type = other RNA
  modified_base 1: mod_base = OTHER; note = Vinyl-phosphonate 2'-O-methyluridine-3'-phosphorothioate
  modified_base 2: mod_base = OTHER; note = 2'-fluoroadenosine-3'-phosphorothioate
  modified_base 3: mod_base = OTHER; note = 2'-O-methyladenosine-3'-phosphate
  modified_base 4: mod_base = OTHER; note = 2'-O-methyladenosine-3'-phosphate
  modified_base 5: mod_base = OTHER; note = 2'-O-methyladenosine-3'-phosphate
  modified_base 6: mod_base = OTHER; note = 2'-fluoroguanosine-3'-phosphate
  modified_base 7: mod_base = OTHER; note = 2'-O-methylguanosine-3'-phosphate
  modified_base 8: mod_base = OTHER; note = 2'-fluorocytidine-3'-phosphate
  modified_base 9: mod_base = OTHER; note = 2'-fluorocytidine-3'-phosphate
  modified_base 10: mod_base = OTHER; note = 2'-O-methylcytidine-3'-phosphate
  modified_base 11: mod_base = OTHER; note = 2'-O-methyladenosine-3'-phosphate
  modified_base 12: mod_base = OTHER; note = 2'-O-methyluridine-3'-phosphate
  modified_base 13: mod_base = OTHER; note = 2'-O-methyluridine-3'-phosphate
  modified_base 14: mod_base = OTHER; note = 2'-fluorouridine-3'-phosphate
  modified_base 15: mod_base = OTHER; note = 2'-O-methyladenosine-3'-phosphate
  modified_base 16: mod_base = OTHER; note = 2'-fluoroguanosine-3'-phosphate
  modified_base 17: mod_base = OTHER; note = 2'-O-methyladenosine-3'-phosphate
  modified_base 18: mod_base = OTHER; note = 2'-O-methyluridine-3'-phosphate
  modified_base 19: mod_base = OTHER; note = 2'-O-methyladenosine-3'-phosphate
  modified_base 20: mod_base = OTHER; note = 2'-O-methylguanosine-3'-phosphate
  modified_base 21: mod_base = OTHER; note = 2'-O-methylcytidine-3'-phosphorothioate
  modified_base 22: mod_base = OTHER; note = 2'-O-methyladenosine-3'-phosphorothioate
  modified_base 23: mod_base = OTHER; note = 2'-O-methyluridine-3'-phosphate
taaaaggcccatttagatagcat

SEQ ID NO: 4224 - RNA, 23 nt, synthetic construct
  source 1..23: mol_type = other RNA
  modified_base 1: mod_base = OTHER; note = Vinyl-phosphonate 2'-O-methyluridine-3'-phosphorothioate
  modified_base 2: mod_base = OTHER; note = 2'-fluorouridine -3'-phosphorothioate
  modified_base 3: mod_base = OTHER; note = 2'-O-methyluridine-3'-phosphate
  modified_base 4: mod_base = OTHER; note = 2'-O-methyluridine-3'-phosphate
  modified_base 5: mod_base = OTHER; note = 2'-O-methylcytidine-3'-phosphate
  modified_base 6: mod_base = OTHER; note = 2'-fluorocytidine-3'-phosphate
  modified_base 7: mod_base = OTHER; note = 2'-O-methyluridine-3'-phosphate
  modified_base 8: mod_base = OTHER; note = 2'-fluorouridine-3'-phosphate
  modified_base 9: mod_base = OTHER; note = 2'-fluorocytidine-3'-phosphate
  modified_base 10: mod_base = OTHER; note = 2'-O-methyluridine-3'-phosphate
  modified_base 11: mod_base = OTHER; note = 2'-O-methyluridine-3'-phosphate
  modified_base 12: mod_base = OTHER; note = 2'-O-methylguanosine-3'-phosphate
  modified_base 13: mod_base = OTHER; note = 2'-O-methylguanosine-3'-phosphate
  modified_base 14: mod_base = OTHER; note = 2'-fluorouridine-3'-phosphate
  modified_base 15: mod_base = OTHER; note = 2'-O-methylguanosine-3'-phosphate
  modified_base 16: mod_base = OTHER; note = 2'-fluoroguanosine-3'-phosphate
  modified_base 17: mod_base = OTHER; note = 2'-O-methyluridine-3'-phosphate
  modified_base 18: mod_base = OTHER; note = 2'-O-methyluridine-3'-phosphate
  modified_base 19: mod_base = OTHER; note = 2'-O-methyluridine-3'-phosphate
  modified_base 20: mod_base = OTHER; note = 2'-O-methyluridine-3'-phosphate
  modified_base 21: mod_base = OTHER; note = 2'-O-methylguanosine-3'-phosphorothioate
  modified_base 22: mod_base = OTHER; note = 2'-O-methylguanosine-3'-phosphorothioate
  modified_base 23: mod_base = OTHER; note = 2'-O-methyladenosine-3'-phosphate
ttttccttcttggtggttttgga

SEQ ID NO: 4225 - RNA, 23 nt, synthetic construct
  source 1..23: mol_type = other RNA
  modified_base 1: mod_base = OTHER; note = Vinyl-phosphonate 2'-O-methyluridine-3'-phosphorothioate
  modified_base 2: mod_base = OTHER; note = 2'-fluorouridine -3'-phosphorothioate
  modified_base 3: mod_base = OTHER; note = 2'-O-methylguanosine-3'-phosphate
  modified_base 4: mod_base = OTHER; note = 2'-O-methylcytidine-3'-phosphate
  modified_base 5: mod_base = OTHER; note = 2'-O-methyladenosine-3'-phosphate
  modified_base 6: mod_base = OTHER; note = 2'-fluorouridine-3'-phosphate
  modified_base 7: mod_base = OTHER; note = 2'-O-methylguanosine-3'-phosphate
  modified_base 8: mod_base = OTHER; note = 2'-fluorouridine-3'-phosphate
  modified_base 9: mod_base = OTHER; note = 2'-fluoroadenosine-3'-phosphate
  modified_base 10: mod_base = OTHER; note = 2'-O-methylguanosine-3'-phosphate
  modified_base 11: mod_base = OTHER; note = 2'-O-methylcytidine-3'-phosphate
  modified_base 12: mod_base = OTHER; note = 2'-O-methyladenosine-3'-phosphate
  modified_base 13: mod_base = OTHER; note = 2'-O-methylcytidine-3'-phosphate
  modified_base 14: mod_base = OTHER; note = 2'-fluoroadenosine-3'-phosphate
  modified_base 15: mod_base = OTHER; note = 2'-O-methyluridine-3'-phosphate
  modified_base 16: mod_base = OTHER; note = 2'-fluorocytidine-3'-phosphate
  modified_base 17: mod_base = OTHER; note = 2'-O-methyluridine-3'-phosphate
  modified_base 18: mod_base = OTHER; note = 2'-O-methylguanosine-3'-phosphate
  modified_base 19: mod_base = OTHER; note = 2'-O-methyluridine-3'-phosphate
  modified_base 20: mod_base = OTHER; note = 2'-O-methylguanosine-3'-phosphate
  modified_base 21: mod_base = OTHER; note = 2'-O-methylguanosine-3'-phosphorothioate
  modified_base 22: mod_base = OTHER; note = 2'-O-methylcytidine-3'-phosphorothioate
  modified_base 23: mod_base = OTHER; note = 2'-O-methyladenosine-3'-phosphate
ttgcatgtagcacatctgtggca

SEQ ID NO: 4226 - RNA, 23 nt, synthetic construct
  source 1..23: mol_type = other RNA
  modified_base 1: mod_base = OTHER; note = Vinyl-phosphonate 2'-O-methyluridine-3'-phosphorothioate
  modified_base 2: mod_base = OTHER; note = 2'-fluoroguanosine-3'-phosphorothioate
  modified_base 3: mod_base = OTHER; note = 2'-O-methylcytidine-3'-phosphate
  modified_base 4: mod_base = OTHER; note = 2'-O-methyluridine-3'-phosphate
  modified_base 5: mod_base = OTHER; note = 2'-O-methyluridine-3'-phosphate
  modified_base 6: mod_base = OTHER; note = 2'-fluoroguanosine-3'-phosphate
  modified_base 7: mod_base = OTHER; note = 2'-O-methyluridine-3'-phosphate
  modified_base 8: mod_base = OTHER; note = 2'-fluoroadenosine-3'-phosphate
  modified_base 9: mod_base = OTHER; note = 2'-fluorocytidine-3'-phosphate
  modified_base 10: mod_base = OTHER; note = 2'-O-methyladenosine-3'-phosphate
  modified_base 11: mod_base = OTHER; note = 2'-O-methyluridine-3'-phosphate
  modified_base 12: mod_base = OTHER; note = 2'-O-methylguanosine-3'-phosphate
  modified_base 13: mod_base = OTHER; note = 2'-O-methyluridine-3'-phosphate
  modified_base 14: mod_base = OTHER; note = 2'-fluoroadenosine-3'-phosphate
  modified_base 15: mod_base = OTHER; note = 2'-O-methyluridine-3'-phosphate
  modified_base 16: mod_base = OTHER; note = 2'-fluoroguanosine-3'-phosphate
  modified_base 17: mod_base = OTHER; note = 2'-O-methyladenosine-3'-phosphate
  modified_base 18: mod_base = OTHER; note = 2'-O-methylcytidine-3'-phosphate
  modified_base 19: mod_base = OTHER; note = 2'-O-methyluridine-3'-phosphate
  modified_base 20: mod_base = OTHER; note = 2'-O-methyluridine-3'-phosphate
  modified_base 21: mod_base = OTHER; note = 2'-O-methyluridine-3'-phosphorothioate
  modified_base 22: mod_base = OTHER; note = 2'-O-methyladenosine-3'-phosphorothioate
  modified_base 23: mod_base = OTHER; note = 2'-O-methyluridine-3'-phosphate
tgcttgtacatgtatgactttat

SEQ ID NO: 4227 - RNA, 23 nt, synthetic construct
  source 1..23: mol_type = other RNA
  modified_base 1: mod_base = OTHER; note = Vinyl-phosphonate 2'-O-methyluridine-3'-phosphorothioate
  modified_base 2: mod_base = OTHER; note = 2'-fluoroadenosine-3'-phosphorothioate
  modified_base 3: mod_base = OTHER; note = 2'-O-methyluridine-3'-phosphate
  modified_base 4: mod_base = OTHER; note = 2'-O-methyluridine-3'-phosphate
  modified_base 5: mod_base = OTHER; note = 2'-O-methyladenosine-3'-phosphate
  modified_base 6: mod_base = OTHER; note = 2'-fluorouridine-3'-phosphate
  modified_base 7: mod_base = OTHER; note = 2'-O-methylcytidine-3'-phosphate
  modified_base 8: mod_base = OTHER; note = 2'-fluorocytidine-3'-phosphate
  modified_base 9: mod_base = OTHER; note = 2'-fluorouridine-3'-phosphate
  modified_base 10: mod_base = OTHER; note = 2'-O-methylcytidine-3'-phosphate
  modified_base 11: mod_base = OTHER; note = 2'-O-methyluridine-3'-phosphate
  modified_base 12: mod_base = OTHER; note = 2'-O-methyluridine-3'-phosphate
  modified_base 13: mod_base = OTHER; note = 2'-O-methylcytidine-3'-phosphate
  modified_base 14: mod_base = OTHER; note = 2'-fluorouridine-3'-phosphate
  modified_base 15: mod_base = OTHER; note = 2'-O-methylguanosine-3'-phosphate
  modified_base 16: mod_base = OTHER; note = 2'-fluorocytidine-3'-phosphate
  modified_base 17: mod_base = OTHER; note = 2'-O-methyluridine-3'-phosphate
  modified_base 18: mod_base = OTHER; note = 2'-O-methyluridine-3'-phosphate
  modified_base 19: mod_base = OTHER; note = 2'-O-methylcytidine-3'-phosphate
  modified_base 20: mod_base = OTHER; note = 2'-O-methyluridine-3'-phosphate
  modified_base 21: mod_base = OTHER; note = 2'-O-methyladenosine-3'-phosphorothioate
  modified_base 22: mod_base = OTHER; note = 2'-O-methyladenosine-3'-phosphorothioate
  modified_base 23: mod_base = OTHER; note = 2'-O-methylcytidine-3'-phosphate
tattatcctcttctgcttctaac

SEQ ID NO: 4228 - RNA, 23 nt, synthetic construct
  source 1..23: mol_type = other RNA
  modified_base 1: mod_base = OTHER; note = Vinyl-phosphonate 2'-O-methyluridine-3'-phosphorothioate
  modified_base 2: mod_base = OTHER; note = 2'-fluorouridine -3'-phosphorothioate
  modified_base 3: mod_base = OTHER; note = 2'-O-methylcytidine-3'-phosphate
  modified_base 4: mod_base = OTHER; note = 2'-O-methyladenosine-3'-phosphate
  modified_base 5: mod_base = OTHER; note = 2'-O-methyladenosine-3'-phosphate
  modified_base 6: mod_base = OTHER; note = 2'-fluoroguanosine-3'-phosphate
  modified_base 7: mod_base = OTHER; note = 2'-O-methylcytidine-3'-phosphate
  modified_base 8: mod_base = OTHER; note = 2'-fluorouridine-3'-phosphate
  modified_base 9: mod_base = OTHER; note = 2'-fluoroguanosine-3'-phosphate
  modified_base 10: mod_base = OTHER; note = 2'-O-methyluridine-3'-phosphate
  modified_base 11: mod_base = OTHER; note = 2'-O-methylguanosine-3'-phosphate
  modified_base 12: mod_base = OTHER; note = 2'-O-methylcytidine-3'-phosphate
  modified_base 13: mod_base = OTHER; note = 2'-O-methylguanosine-3'-phosphate
  modified_base 14: mod_base = OTHER; note = 2'-fluoroadenosine-3'-phosphate
  modified_base 15: mod_base = OTHER; note = 2'-O-methyladenosine-3'-phosphate
  modified_base 16: mod_base = OTHER; note = 2'-fluorocytidine-3'-phosphate
  modified_base 17: mod_base = OTHER; note = 2'-O-methyladenosine-3'-phosphate
  modified_base 18: mod_base = OTHER; note = 2'-O-methylcytidine-3'-phosphate
  modified_base 19: mod_base = OTHER; note = 2'-O-methyladenosine-3'-phosphate
  modified_base 20: mod_base = OTHER; note = 2'-O-methylcytidine-3'-phosphate
  modified_base 21: mod_base = OTHER; note = 2'-O-methylguanosine-3'-phosphorothioate
  modified_base 22: mod_base = OTHER; note = 2'-O-methylcytidine-3'-phosphorothioate
  modified_base 23: mod_base = OTHER; note = 2'-O-methyluridine-3'-phosphate
ttcaagctgtgcgaacacacgct

SEQ ID NO: 4229 - RNA, 23 nt, synthetic construct
  source 1..23: mol_type = other RNA
  modified_base 1: mod_base = OTHER; note = Vinyl-phosphonate 2'-O-methyluridine-3'-phosphorothioate
  modified_base 2: mod_base = OTHER; note = 2'-fluoroadenosine-3'-phosphorothioate
  modified_base 3: mod_base = OTHER; note = 2'-O-methylguanosine-3'-phosphate
  modified_base 4: mod_base = OTHER; note = 2'-O-methyladenosine-3'-phosphate
  modified_base 5: mod_base = OTHER; note = 2'-O-methylcytidine-3'-phosphate
  modified_base 6: mod_base = OTHER; note = 2'-fluorouridine-3'-phosphate
  modified_base 7: mod_base = OTHER; note = 2'-O-methylguanosine-3'-phosphate
  modified_base 8: mod_base = OTHER; note = 2'-fluoroguanosine-3'-phosphate
  modified_base 9: mod_base = OTHER; note = 2'-fluoroadenosine-3'-phosphate
  modified_base 10: mod_base = OTHER; note = 2'-O-methylcytidine-3'-phosphate
  modified_base 11: mod_base = OTHER; note = 2'-O-methyladenosine-3'-phosphate
  modified_base 12: mod_base = OTHER; note = 2'-O-methyladenosine-3'-phosphate
  modified_base 13: mod_base = OTHER; note = 2'-O-methyladenosine-3'-phosphate
  modified_base 14: mod_base = OTHER; note = 2'-fluoroadenosine-3'-phosphate
  modified_base 15: mod_base = OTHER; note = 2'-O-methylcytidine-3'-phosphate
  modified_base 16: mod_base = OTHER; note = 2'-fluoroadenosine-3'-phosphate
  modified_base 17: mod_base = OTHER; note = 2'-O-methylcytidine-3'-phosphate
  modified_base 18: mod_base = OTHER; note = 2'-O-methylcytidine-3'-phosphate
  modified_base 19: mod_base = OTHER; note = 2'-O-methyladenosine-3'-phosphate
  modified_base 20: mod_base = OTHER; note = 2'-O-methylguanosine-3'-phosphate
  modified_base 21: mod_base = OTHER; note = 2'-O-methylcytidine-3'-phosphorothioate
  modified_base 22: mod_base = OTHER; note = 2'-O-methyluridine-3'-phosphorothioate
  modified_base 23: mod_base = OTHER; note = 2'-O-methylcytidine-3'-phosphate
tagactggacaaaacaccagctc

SEQ ID NO: 4230 - RNA, 23 nt, synthetic construct
  source 1..23: mol_type = other RNA
  modified_base 1: mod_base = OTHER; note = Vinyl-phosphonate 2'-O-methyluridine-3'-phosphorothioate
  modified_base 2: mod_base = OTHER; note = 2'-fluoroguanosine-3'-phosphorothioate
  modified_base 3: mod_base = OTHER; note = 2'-O-methylguanosine-3'-phosphate
  modified_base 4: mod_base = OTHER; note = 2'-O-methyladenosine-3'-phosphate
  modified_base 5: mod_base = OTHER; note = 2'-O-methyluridine-3'-phosphate
  modified_base 6: mod_base = OTHER; note = 2'-fluorouridine-3'-phosphate
  modified_base 7: mod_base = OTHER; note = 2'-O-methyluridine-3'-phosphate
  modified_base 8: mod_base = OTHER; note = 2'-fluoroadenosine-3'-phosphate
  modified_base 9: mod_base = OTHER; note = 2'-fluoroguanosine-3'-phosphate
  modified_base 10: mod_base = OTHER; note = 2'-O-methyladenosine-3'-phosphate
  modified_base 11: mod_base = OTHER; note = 2'-O-methyluridine-3'-phosphate
  modified_base 12: mod_base = OTHER; note = 2'-O-methyluridine-3'-phosphate
  modified_base 13: mod_base = OTHER; note = 2'-O-methylguanosine-3'-phosphate
  modified_base 14: mod_base = OTHER; note = 2'-fluorouridine-3'-phosphate
  modified_base 15: mod_base = OTHER; note = 2'-O-methyluridine-3'-phosphate
  modified_base 16: mod_base = OTHER; note = 2'-fluorouridine-3'-phosphate
  modified_base 17: mod_base = OTHER; note = 2'-O-methyluridine-3'-phosphate
  modified_base 18: mod_base = OTHER; note = 2'-O-methylcytidine-3'-phosphate
  modified_base 19: mod_base = OTHER; note = 2'-O-methylcytidine-3'-phosphate
  modified_base 20: mod_base = OTHER; note = 2'-O-methyladenosine-3'-phosphate
  modified_base 21: mod_base = OTHER; note = 2'-O-methyluridine-3'-phosphorothioate
  modified_base 22: mod_base = OTHER; note = 2'-O-methyluridine-3'-phosphorothioate
  modified_base 23: mod_base = OTHER; note = 2'-O-methyluridine-3'-phosphate
tggatttagattgttttccattt

SEQ ID NO: 4231 - RNA, 23 nt, synthetic construct
  source 1..23: mol_type = other RNA
  modified_base 1: mod_base = OTHER; note = Vinyl-phosphonate 2'-O-methyluridine-3'-phosphorothioate
  modified_base 2: mod_base = OTHER; note = 2'-fluorouridine -3'-phosphorothioate
  modified_base 3: mod_base = OTHER; note = 2'-O-methylcytidine-3'-phosphate
  modified_base 4: mod_base = OTHER; note = 2'-O-methylguanosine-3'-phosphate
  modified_base 5: mod_base = OTHER; note = 2'-O-methyladenosine-3'-phosphate
  modified_base 6: mod_base = OTHER; note = 2'-fluorouridine-3'-phosphate
  modified_base 7: mod_base = OTHER; note = 2'-O-methyladenosine-3'-phosphate
  modified_base 8: mod_base = OTHER; note = 2'-fluoroguanosine-3'-phosphate
  modified_base 9: mod_base = OTHER; note = 2'-fluorocytidine-3'-phosphate
  modified_base 10: mod_base = OTHER; note = 2'-O-methylcytidine-3'-phosphate
  modified_base 11: mod_base = OTHER; note = 2'-O-methyladenosine-3'-phosphate
  modified_base 12: mod_base = OTHER; note = 2'-O-methyluridine-3'-phosphate
  modified_base 13: mod_base = OTHER; note = 2'-O-methyluridine-3'-phosphate
  modified_base 14: mod_base = OTHER; note = 2'-fluorouridine-3'-phosphate
  modified_base 15: mod_base = OTHER; note = 2'-O-methyluridine-3'-phosphate
  modified_base 16: mod_base = OTHER; note = 2'-fluorocytidine-3'-phosphate
  modified_base 17: mod_base = OTHER; note = 2'-O-methyluridine-3'-phosphate
  modified_base 18: mod_base = OTHER; note = 2'-O-methyladenosine-3'-phosphate
  modified_base 19: mod_base = OTHER; note = 2'-O-methyladenosine-3'-phosphate
  modified_base 20: mod_base = OTHER; note = 2'-O-methyluridine-3'-phosphate
  modified_base 21: mod_base = OTHER; note = 2'-O-methylguanosine-3'-phosphorothioate
  modified_base 22: mod_base = OTHER; note = 2'-O-methylcytidine-3'-phosphorothioate
  modified_base 23: mod_base = OTHER; note = 2'-O-methyladenosine-3'-phosphate
ttcgatagccattttctaatgca

SEQ ID NO: 4232 - RNA, 23 nt, synthetic construct
  source 1..23: mol_type = other RNA
  modified_base 1: mod_base = OTHER; note = Vinyl-phosphonate 2'-O-methyluridine-3'-phosphorothioate
  modified_base 2: mod_base = OTHER; note = 2'-fluorouridine -3'-phosphorothioate
  modified_base 3: mod_base = OTHER; note = 2'-O-methylguanosine-3'-phosphate
  modified_base 4: mod_base = OTHER; note = 2'-O-methyladenosine-3'-phosphate
  modified_base 5: mod_base = OTHER; note = 2'-O-methylcytidine-3'-phosphate
  modified_base 6: mod_base = OTHER; note = 2'-fluoroadenosine-3'-phosphate
  modified_base 7: mod_base = OTHER; note = 2'-O-methyladenosine-3'-phosphate
  modified_base 8: mod_base = OTHER; note = 2'-fluorouridine-3'-phosphate
  modified_base 9: mod_base = OTHER; note = 2'-fluoroguanosine-3'-phosphate
  modified_base 10: mod_base = OTHER; note = 2'-O-methylcytidine-3'-phosphate
  modified_base 11: mod_base = OTHER; note = 2'-O-methylcytidine-3'-phosphate
  modified_base 12: mod_base = OTHER; note = 2'-O-methyluridine-3'-phosphate
  modified_base 13: mod_base = OTHER; note = 2'-O-methyluridine-3'-phosphate
  modified_base 14: mod_base = OTHER; note = 2'-fluorocytidine-3'-phosphate
  modified_base 15: mod_base = OTHER; note = 2'-O-methyluridine-3'-phosphate
  modified_base 16: mod_base = OTHER; note = 2'-fluoroguanosine-3'-phosphate
  modified_base 17: mod_base = OTHER; note = 2'-O-methyluridine-3'-phosphate
  modified_base 18: mod_base = OTHER; note = 2'-O-methylcytidine-3'-phosphate
  modified_base 19: mod_base = OTHER; note = 2'-O-methylcytidine-3'-phosphate
  modified_base 20: mod_base = OTHER; note = 2'-O-methyladenosine-3'-phosphate
  modified_base 21: mod_base = OTHER; note = 2'-O-methyluridine-3'-phosphorothioate
  modified_base 22: mod_base = OTHER; note = 2'-O-methyluridine-3'-phosphorothioate
  modified_base 23: mod_base = OTHER; note = 2'-O-methyluridine-3'-phosphate
ttgacaatgccttctgtccattt

SEQ ID NO: 4233 - RNA, 23 nt, synthetic construct
  source 1..23: mol_type = other RNA
  modified_base 1: mod_base = OTHER; note = Vinyl-phosphonate 2'-O-methyluridine-3'-phosphorothioate
  modified_base 2: mod_base = OTHER; note = 2'-fluorouridine -3'-phosphorothioate
  modified_base 3: mod_base = OTHER; note = 2'-O-methyluridine-3'-phosphate
  modified_base 4: mod_base = OTHER; note = 2'-O-methyluridine-3'-phosphate
  modified_base 5: mod_base = OTHER; note = 2'-O-methyluridine-3'-phosphate
  modified_base 6: mod_base = OTHER; note = 2'-fluorocytidine-3'-phosphate
  modified_base 7: mod_base = OTHER; note = 2'-O-methylcytidine-3'-phosphate
  modified_base 8: mod_base = OTHER; note = 2'-fluoroadenosine-3'-phosphate
  modified_base 9: mod_base = OTHER; note = 2'-fluorocytidine-3'-phosphate
  modified_base 10: mod_base = OTHER; note = 2'-O-methyluridine-3'-phosphate
  modified_base 11: mod_base = OTHER; note = 2'-O-methylguanosine-3'-phosphate
  modified_base 12: mod_base = OTHER; note = 2'-O-methylcytidine-3'-phosphate
  modified_base 13: mod_base = OTHER; note = 2'-O-methyladenosine-3'-phosphate
  modified_base 14: mod_base = OTHER; note = 2'-fluoroguanosine-3'-phosphate
  modified_base 15: mod_base = OTHER; note = 2'-O-methylcytidine-3'-phosphate
  modified_base 16: mod_base = OTHER; note = 2'-fluoroadenosine-3'-phosphate
  modified_base 17: mod_base = OTHER; note = 2'-O-methyladenosine-3'-phosphate
  modified_base 18: mod_base = OTHER; note = 2'-O-methyluridine-3'-phosphate
  modified_base 19: mod_base = OTHER; note = 2'-O-methylcytidine-3'-phosphate
  modified_base 20: mod_base = OTHER; note = 2'-O-methyluridine-3'-phosphate
  modified_base 21: mod_base = OTHER; note = 2'-O-methylguanosine-3'-phosphorothioate
  modified_base 22: mod_base = OTHER; note = 2'-O-methyluridine-3'-phosphorothioate
  modified_base 23: mod_base = OTHER; note = 2'-O-methyladenosine-3'-phosphate
tttttccactgcagcaatctgta

SEQ ID NO: 4234 - RNA, 23 nt, synthetic construct
  source 1..23: mol_type = other RNA
  modified_base 1: mod_base = OTHER; note = Vinyl-phosphonate 2'-O-methyluridine-3'-phosphorothioate
  modified_base 2: mod_base = OTHER; note = 2'-fluoroguanosine-3'-phosphorothioate
  modified_base 3: mod_base = OTHER; note = 2'-O-methyladenosine-3'-phosphate
  modified_base 4: mod_base = OTHER; note = 2'-O-methyluridine-3'-phosphate
  modified_base 5: mod_base = OTHER; note = 2'-O-methylcytidine-3'-phosphate
  modified_base 6: mod_base = OTHER; note = 2'-fluoroadenosine-3'-phosphate
  modified_base 7: mod_base = OTHER; note = 2'-O-methyladenosine-3'-phosphate
  modified_base 8: mod_base = OTHER; note = 2'-fluorocytidine-3'-phosphate
  modified_base 9: mod_base = OTHER; note = 2'-fluorouridine-3'-phosphate
  modified_base 10: mod_base = OTHER; note = 2'-O-methylcytidine-3'-phosphate
  modified_base 11: mod_base = OTHER; note = 2'-O-methylcytidine-3'-phosphate
  modified_base 12: mod_base = OTHER; note = 2'-O-methyladenosine-3'-phosphate
  modified_base 13: mod_base = OTHER; note = 2'-O-methyluridine-3'-phosphate
  modified_base 14: mod_base = OTHER; note = 2'-fluorouridine-3'-phosphate
  modified_base 15: mod_base = OTHER; note = 2'-O-methyluridine-3'-phosphate
  modified_base 16: mod_base = OTHER; note = 2'-fluorocytidine-3'-phosphate
  modified_base 17: mod_base = OTHER; note = 2'-O-methylcytidine-3'-phosphate
  modified_base 18: mod_base = OTHER; note = 2'-O-methyladenosine-3'-phosphate
  modified_base 19: mod_base = OTHER; note = 2'-O-methylcytidine-3'-phosphate
  modified_base 20: mod_base = OTHER; note = 2'-O-methylcytidine-3'-phosphate
  modified_base 21: mod_base = OTHER; note = 2'-O-methyluridine-3'-phosphorothioate
  modified_base 22: mod_base = OTHER; note = 2'-O-methylcytidine-3'-phosphorothioate
  modified_base 23: mod_base = OTHER; note = 2'-O-methylcytidine-3'-phosphate
tgatcaactccatttccacctcc

SEQ ID NO: 4235 - RNA, 23 nt, synthetic construct
  source 1..23: mol_type = other RNA
  modified_base 1: mod_base = OTHER; note = Vinyl-phosphonate 2'-O-methyluridine-3'-phosphorothioate
  modified_base 2: mod_base = OTHER; note = 2'-fluoroguanosine-3'-phosphorothioate
  modified_base 3: mod_base = OTHER; note = 2'-O-methyluridine-3'-phosphate
  modified_base 4: mod_base = OTHER; note = 2'-O-methyladenosine-3'-phosphate
  modified_base 5: mod_base = OTHER; note = 2'-O-methyluridine-3'-phosphate
  modified_base 6: mod_base = OTHER; note = 2'-fluorouridine-3'-phosphate
  modified_base 7: mod_base = OTHER; note = 2'-O-methyladenosine-3'-phosphate
  modified_base 8: mod_base = OTHER; note = 2'-fluoroguanosine-3'-phosphate
  modified_base 9: mod_base = OTHER; note = 2'-fluoroguanosine-3'-phosphate
  modified_base 10: mod_base = OTHER; note = 2'-O-methyluridine-3'-phosphate
  modified_base 11: mod_base = OTHER; note = 2'-O-methylguanosine-3'-phosphate
  modified_base 12: mod_base = OTHER; note = 2'-O-methylcytidine-3'-phosphate
  modified_base 13: mod_base = OTHER; note = 2'-O-methyladenosine-3'-phosphate
  modified_base 14: mod_base = OTHER; note = 2'-fluorouridine-3'-phosphate
  modified_base 15: mod_base = OTHER; note = 2'-O-methyluridine-3'-phosphate
  modified_base 16: mod_base = OTHER; note = 2'-fluoroguanosine-3'-phosphate
  modified_base 17: mod_base = OTHER; note = 2'-O-methylcytidine-3'-phosphate
  modified_base 18: mod_base = OTHER; note = 2'-O-methylcytidine-3'-phosphate
  modified_base 19: mod_base = OTHER; note = 2'-O-methylcytidine-3'-phosphate
  modified_base 20: mod_base = OTHER; note = 2'-O-methyladenosine-3'-phosphate
  modified_base 21: mod_base = OTHER; note = 2'-O-methylguanosine-3'-phosphorothioate
  modified_base 22: mod_base = OTHER; note = 2'-O-methyladenosine-3'-phosphorothioate
  modified_base 23: mod_base = OTHER; note = 2'-O-methylguanosine-3'-phosphate
tgtattaggtgcattgcccagag

SEQ ID NO: 4236 - RNA, 23 nt, synthetic construct
  source 1..23: mol_type = other RNA
  modified_base 1: mod_base = OTHER; note = Vinyl-phosphonate 2'-O-methyluridine-3'-phosphorothioate
  modified_base 2: mod_base = OTHER; note = 2'-fluoroguanosine-3'-phosphorothioate
  modified_base 3: mod_base = OTHER; note = 2'-O-methyluridine-3'-phosphate
  modified_base 4: mod_base = OTHER; note = 2'-O-methylcytidine-3'-phosphate
  modified_base 5: mod_base = OTHER; note = 2'-O-methyluridine-3'-phosphate
  modified_base 6: mod_base = OTHER; note = 2'-fluorouridine-3'-phosphate
  modified_base 7: mod_base = OTHER; note = 2'-O-methyluridine-3'-phosphate
  modified_base 8: mod_base = OTHER; note = 2'-fluoroadenosine-3'-phosphate
  modified_base 9: mod_base = OTHER; note = 2'-fluoroguanosine-3'-phosphate
  modified_base 10: mod_base = OTHER; note = 2'-O-methylguanosine-3'-phosphate
  modified_base 11: mod_base = OTHER; note = 2'-O-methylcytidine-3'-phosphate
  modified_base 12: mod_base = OTHER; note = 2'-O-methyladenosine-3'-phosphate
  modified_base 13: mod_base = OTHER; note = 2'-O-methylguanosine-3'-phosphate
  modified_base 14: mod_base = OTHER; note = 2'-fluoroadenosine-3'-phosphate
  modified_base 15: mod_base = OTHER; note = 2'-O-methylguanosine-3'-phosphate
  modified_base 16: mod_base = OTHER; note = 2'-fluoroguanosine-3'-phosphate
  modified_base 17: mod_base = OTHER; note = 2'-O-methylguanosine-3'-phosphate
  modified_base 18: mod_base = OTHER; note = 2'-O-methyladenosine-3'-phosphate
  modified_base 19: mod_base = OTHER; note = 2'-O-methyladenosine-3'-phosphate
  modified_base 20: mod_base = OTHER; note = 2'-O-methyladenosine-3'-phosphate
  modified_base 21: mod_base = OTHER; note = 2'-O-methyluridine-3'-phosphorothioate
  modified_base 22: mod_base = OTHER; note = 2'-O-methyluridine-3'-phosphorothioate
  modified_base 23: mod_base = OTHER; note = 2'-O-methyladenosine-3'-phosphate
tgtctttaggcagagggaaatta

SEQ ID NO: 4237 - RNA, 23 nt, synthetic construct
  source 1..23: mol_type = other RNA
  modified_base 1: mod_base = OTHER; note = Vinyl-phosphonate 2'-O-methyluridine-3'-phosphorothioate
  modified_base 2: mod_base = OTHER; note = 2'-fluoroadenosine-3'-phosphorothioate
  modified_base 3: mod_base = OTHER; note = 2'-O-methylguanosine-3'-phosphate
  modified_base 4: mod_base = OTHER; note = 2'-O-methylcytidine-3'-phosphate
  modified_base 5: mod_base = OTHER; note = 2'-O-methyluridine-3'-phosphate
  modified_base 6: mod_base = OTHER; note = 2'-fluorocytidine-3'-phosphate
  modified_base 7: mod_base = OTHER; note = 2'-O-methylcytidine-3'-phosphate
  modified_base 8: mod_base = OTHER; note = 2'-fluoroadenosine-3'-phosphate
  modified_base 9: mod_base = OTHER; note = 2'-fluorocytidine-3'-phosphate
  modified_base 10: mod_base = OTHER; note = 2'-O-methylguanosine-3'-phosphate
  modified_base 11: mod_base = OTHER; note = 2'-O-methyluridine-3'-phosphate
  modified_base 12: mod_base = OTHER; note = 2'-O-methyluridine-3'-phosphate
  modified_base 13: mod_base = OTHER; note = 2'-O-methylguanosine-3'-phosphate
  modified_base 14: mod_base = OTHER; note = 2'-fluorocytidine-3'-phosphate
  modified_base 15: mod_base = OTHER; note = 2'-O-methyladenosine-3'-phosphate
  modified_base 16: mod_base = OTHER; note = 2'-fluoroguanosine-3'-phosphate
  modified_base 17: mod_base = OTHER; note = 2'-O-methyladenosine-3'-phosphate
  modified_base 18: mod_base = OTHER; note = 2'-O-methyladenosine-3'-phosphate
  modified_base 19: mod_base = OTHER; note = 2'-O-methylguanosine-3'-phosphate
  modified_base 20: mod_base = OTHER; note = 2'-O-methylcytidine-3'-phosphate
  modified_base 21: mod_base = OTHER; note = 2'-O-methylguanosine-3'-phosphorothioate
  modified_base 22: mod_base = OTHER; note = 2'-O-methylguanosine-3'-phosphorothioate
  modified_base 23: mod_base = OTHER; note = 2'-O-methylcytidine-3'-phosphate
tagctccacgttgcagaagcggc

SEQ ID NO: 4238 - RNA, 23 nt, synthetic construct
  source 1..23: mol_type = other RNA
  modified_base 1: mod_base = OTHER; note = Vinyl-phosphonate 2'-O-methyluridine-3'-phosphorothioate
  modified_base 2: mod_base = OTHER; note = 2'-fluoroguanosine-3'-phosphorothioate
  modified_base 3: mod_base = OTHER; note = 2'-O-methylguanosine-3'-phosphate
  modified_base 4: mod_base = OTHER; note = 2'-O-methylguanosine-3'-phosphate
  modified_base 5: mod_base = OTHER; note = 2'-O-methyladenosine-3'-phosphate
  modified_base 6: mod_base = OTHER; note = 2'-fluoroadenosine-3'-phosphate
  modified_base 7: mod_base = OTHER; note = 2'-O-methyladenosine-3'-phosphate
  modified_base 8: mod_base = OTHER; note = 2'-fluorouridine-3'-phosphate
  modified_base 9: mod_base = OTHER; note = 2'-fluoroadenosine-3'-phosphate
  modified_base 10: mod_base = OTHER; note = 2'-O-methylcytidine-3'-phosphate
  modified_base 11: mod_base = OTHER; note = 2'-O-methyladenosine-3'-phosphate
  modified_base 12: mod_base = OTHER; note = 2'-O-methyladenosine-3'-phosphate
  modified_base 13: mod_base = OTHER; note = 2'-O-methyluridine-3'-phosphate
  modified_base 14: mod_base = OTHER; note = 2'-fluoroadenosine-3'-phosphate
  modified_base 15: mod_base = OTHER; note = 2'-O-methyluridine-3'-phosphate
  modified_base 16: mod_base = OTHER; note = 2'-fluoroguanosine-3'-phosphate
  modified_base 17: mod_base = OTHER; note = 2'-O-methyladenosine-3'-phosphate
  modified_base 18: mod_base = OTHER; note = 2'-O-methyladenosine-3'-phosphate
  modified_base 19: mod_base = OTHER; note = 2'-O-methyluridine-3'-phosphate
  modified_base 20: mod_base = OTHER; note = 2'-O-methylcytidine-3'-phosphate
  modified_base 21: mod_base = OTHER; note = 2'-O-methyluridine-3'-phosphorothioate
  modified_base 22: mod_base = OTHER; note = 2'-O-methyladenosine-3'-phosphorothioate
  modified_base 23: mod_base = OTHER; note = 2'-O-methyluridine-3'-phosphate
tgggaaatacaatatgaatctat

SEQ ID NO: 4239 - RNA, 23 nt, synthetic construct
  source 1..23: mol_type = other RNA
  modified_base 1: mod_base = OTHER; note = Vinyl-phosphonate 2'-O-methyluridine-3'-phosphorothioate
  modified_base 2: mod_base = OTHER; note = 2'-fluoroadenosine-3'-phosphorothioate
  modified_base 3: mod_base = OTHER; note = 2'-O-methylcytidine-3'-phosphate
  modified_base 4: mod_base = OTHER; note = 2'-O-methyluridine-3'-phosphate
  modified_base 5: mod_base = OTHER; note = 2'-O-methyladenosine-3'-phosphate
  modified_base 6: mod_base = OTHER; note = 2'-fluoroguanosine-3'-phosphate
  modified_base 7: mod_base = OTHER; note = 2'-O-methyladenosine-3'-phosphate
  modified_base 8: mod_base = OTHER; note = 2'-fluoroadenosine-3'-phosphate
  modified_base 9: mod_base = OTHER; note = 2'-fluoroadenosine-3'-phosphate
  modified_base 10: mod_base = OTHER; note = 2'-O-methyluridine-3'-phosphate
  modified_base 11: mod_base = OTHER; note = 2'-O-methylguanosine-3'-phosphate
  modified_base 12: mod_base = OTHER; note = 2'-O-methylcytidine-3'-phosphate
  modified_base 13: mod_base = OTHER; note = 2'-O-methyladenosine-3'-phosphate
  modified_base 14: mod_base = OTHER; note = 2'-fluorouridine-3'-phosphate
  modified_base 15: mod_base = OTHER; note = 2'-O-methyluridine-3'-phosphate
  modified_base 16: mod_base = OTHER; note = 2'-fluorouridine-3'-phosphate
  modified_base 17: mod_base = OTHER; note = 2'-O-methylguanosine-3'-phosphate
  modified_base 18: mod_base = OTHER; note = 2'-O-methyluridine-3'-phosphate
  modified_base 19: mod_base = OTHER; note = 2'-O-methylcytidine-3'-phosphate
  modified_base 20: mod_base = OTHER; note = 2'-O-methylcytidine-3'-phosphate
  modified_base 21: mod_base = OTHER; note = 2'-O-methyluridine-3'-phosphorothioate
  modified_base 22: mod_base = OTHER; note = 2'-O-methylcytidine-3'-phosphorothioate
  modified_base 23: mod_base = OTHER; note = 2'-O-methylcytidine-3'-phosphate
tactagaaatgcatttgtcctcc

SEQ ID NO: 4240 - RNA, 23 nt, synthetic construct
  source 1..23: mol_type = other RNA
  modified_base 1: mod_base = OTHER; note = Vinyl-phosphonate 2'-O-methyluridine-3'-phosphorothioate
  modified_base 2: mod_base = OTHER; note = 2'-fluorocytidine-3'-phosphorothioate
  modified_base 3: mod_base = OTHER; note = 2'-O-methyladenosine-3'-phosphate
  modified_base 4: mod_base = OTHER; note = 2'-O-methylcytidine-3'-phosphate
  modified_base 5: mod_base = OTHER; note = 2'-O-methyluridine-3'-phosphate
  modified_base 6: mod_base = OTHER; note = 2'-fluorocytidine-3'-phosphate
  modified_base 7: mod_base = OTHER; note = 2'-O-methyladenosine-3'-phosphate
  modified_base 8: mod_base = OTHER; note = 2'-fluorocytidine-3'-phosphate
  modified_base 9: mod_base = OTHER; note = 2'-fluorouridine-3'-phosphate
  modified_base 10: mod_base = OTHER; note = 2'-O-methylcytidine-3'-phosphate
  modified_base 11: mod_base = OTHER; note = 2'-O-methyladenosine-3'-phosphate
  modified_base 12: mod_base = OTHER; note = 2'-O-methyladenosine-3'-phosphate
  modified_base 13: mod_base = OTHER; note = 2'-O-methylcytidine-3'-phosphate
  modified_base 14: mod_base = OTHER; note = 2'-fluoroadenosine-3'-phosphate
  modified_base 15: mod_base = OTHER; note = 2'-O-methylcytidine-3'-phosphate
  modified_base 16: mod_base = OTHER; note = 2'-fluoroguanosine-3'-phosphate
  modified_base 17: mod_base = OTHER; note = 2'-O-methyluridine-3'-phosphate
  modified_base 18: mod_base = OTHER; note = 2'-O-methylcytidine-3'-phosphate
  modified_base 19: mod_base = OTHER; note = 2'-O-methyluridine-3'-phosphate
  modified_base 20: mod_base = OTHER; note = 2'-O-methyladenosine-3'-phosphate
  modified_base 21: mod_base = OTHER; note = 2'-O-methyladenosine-3'-phosphorothioate
  modified_base 22: mod_base = OTHER; note = 2'-O-methyluridine-3'-phosphorothioate
  modified_base 23: mod_base = OTHER; note = 2'-O-methyladenosine-3'-phosphate
tcactcactcaacacgtctaata

SEQ ID NO: 4241 - RNA, 23 nt, synthetic construct
  source 1..23: mol_type = other RNA
  modified_base 1: mod_base = OTHER; note = Vinyl-phosphonate 2'-O-methyluridine-3'-phosphorothioate
  modified_base 2: mod_base = OTHER; note = 2'-fluorouridine -3'-phosphorothioate
  modified_base 3: mod_base = OTHER; note = 2'-O-methylcytidine-3'-phosphate
  modified_base 4: mod_base = OTHER; note = 2'-O-methyladenosine-3'-phosphate
  modified_base 5: mod_base = OTHER; note = 2'-O-methylguanosine-3'-phosphate
  modified_base 6: mod_base = OTHER; note = 2'-fluorocytidine-3'-phosphate
  modified_base 7: mod_base = OTHER; note = 2'-O-methyladenosine-3'-phosphate
  modified_base 8: mod_base = OTHER; note = 2'-fluorouridine-3'-phosphate
  modified_base 9: mod_base = OTHER; note = 2'-fluorouridine-3'-phosphate
  modified_base 10: mod_base = OTHER; note = 2'-O-methyluridine-3'-phosphate
  modified_base 11: mod_base = OTHER; note = 2'-O-methylguanosine-3'-phosphate
  modified_base 12: mod_base = OTHER; note = 2'-O-methyladenosine-3'-phosphate
  modified_base 13: mod_base = OTHER; note = 2'-O-methyluridine-3'-phosphate
  modified_base 14: mod_base = OTHER; note = 2'-fluoroguanosine-3'-phosphate
  modified_base 15: mod_base = OTHER; note = 2'-O-methyluridine-3'-phosphate
  modified_base 16: mod_base = OTHER; note = 2'-fluorocytidine-3'-phosphate
  modified_base 17: mod_base = OTHER; note = 2'-O-methylcytidine-3'-phosphate
  modified_base 18: mod_base = OTHER; note = 2'-O-methyladenosine-3'-phosphate
  modified_base 19: mod_base = OTHER; note = 2'-O-methylcytidine-3'-phosphate
  modified_base 20: mod_base = OTHER; note = 2'-O-methyladenosine-3'-phosphate
  modified_base 21: mod_base = OTHER; note = 2'-O-methylguanosine-3'-phosphorothioate
  modified_base 22: mod_base = OTHER; note = 2'-O-methylcytidine-3'-phosphorothioate
  modified_base 23: mod_base = OTHER; note = 2'-O-methyluridine-3'-phosphate
ttcagcatttgatgtccacagct

SEQ ID NO: 4242 - RNA, 23 nt, synthetic construct
  source 1..23: mol_type = other RNA
  modified_base 1: mod_base = OTHER; note = Vinyl-phosphonate 2'-O-methyluridine-3'-phosphorothioate
  modified_base 2: mod_base = OTHER; note = 2'-fluorocytidine-3'-phosphorothioate
  modified_base 3: mod_base = OTHER; note = 2'-O-methyluridine-3'-phosphate
  modified_base 4: mod_base = OTHER; note = 2'-O-methylcytidine-3'-phosphate
  modified_base 5: mod_base = OTHER; note = 2'-O-methyluridine-3'-phosphate
  modified_base 6: mod_base = OTHER; note = 2'-fluorocytidine-3'-phosphate
  modified_base 7: mod_base = OTHER; note = 2'-O-methyladenosine-3'-phosphate
  modified_base 8: mod_base = OTHER; note = 2'-fluorocytidine-3'-phosphate
  modified_base 9: mod_base = OTHER; note = 2'-fluoroadenosine-3'-phosphate
  modified_base 10: mod_base = OTHER; note = 2'-O-methylguanosine-3'-phosphate
  modified_base 11: mod_base = OTHER; note = 2'-O-methyluridine-3'-phosphate
  modified_base 12: mod_base = OTHER; note = 2'-O-methyladenosine-3'-phosphate
  modified_base 13: mod_base = OTHER; note = 2'-O-methyluridine-3'-phosphate
  modified_base 14: mod_base = OTHER; note = 2'-fluorouridine-3'-phosphate
  modified_base 15: mod_base = OTHER; note = 2'-O-methyladenosine-3'-phosphate
  modified_base 16: mod_base = OTHER; note = 2'-fluoroadenosine-3'-phosphate
  modified_base 17: mod_base = OTHER; note = 2'-O-methylguanosine-3'-phosphate
  modified_base 18: mod_base = OTHER; note = 2'-O-methylguanosine-3'-phosphate
  modified_base 19: mod_base = OTHER; note = 2'-O-methylcytidine-3'-phosphate
  modified_base 20: mod_base = OTHER; note = 2'-O-methylcytidine-3'-phosphate
  modified_base 21: mod_base = OTHER; note = 2'-O-methyluridine-3'-phosphorothioate
  modified_base 22: mod_base = OTHER; note = 2'-O-methylguanosine-3'-phosphorothioate
  modified_base 23: mod_base = OTHER; note = 2'-O-methyluridine-3'-phosphate
tctctcacagtattaaggcctgt

SEQ ID NO: 4243 - RNA, 23 nt, synthetic construct
  source 1..23: mol_type = other RNA
  modified_base 1: mod_base = OTHER; note = Vinyl-phosphonate 2'-O-methyluridine-3'-phosphorothioate
  modified_base 2: mod_base = OTHER; note = 2'-fluoroadenosine-3'-phosphorothioate
  modified_base 3: mod_base = OTHER; note = 2'-O-methyladenosine-3'-phosphate
  modified_base 4: mod_base = OTHER; note = 2'-O-methylcytidine-3'-phosphate
  modified_base 5: mod_base = OTHER; note = 2'-O-methyladenosine-3'-phosphate
  modified_base 6: mod_base = OTHER; note = 2'-fluorocytidine-3'-phosphate
  modified_base 7: mod_base = OTHER; note = 2'-O-methyluridine-3'-phosphate
  modified_base 8: mod_base = OTHER; note = 2'-fluoroadenosine-3'-phosphate
  modified_base 9: mod_base = OTHER; note = 2'-fluoroguanosine-3'-phosphate
  modified_base 10: mod_base = OTHER; note = 2'-O-methylguanosine-3'-phosphate
  modified_base 11: mod_base = OTHER; note = 2'-O-methylcytidine-3'-phosphate
  modified_base 12: mod_base = OTHER; note = 2'-O-methyladenosine-3'-phosphate
  modified_base 13: mod_base = OTHER; note = 2'-O-methyladenosine-3'-phosphate
  modified_base 14: mod_base = OTHER; note = 2'-fluorouridine-3'-phosphate
  modified_base 15: mod_base = OTHER; note = 2'-O-methylguanosine-3'-phosphate
  modified_base 16: mod_base = OTHER; note = 2'-fluoroadenosine-3'-phosphate
  modified_base 17: mod_base = OTHER; note = 2'-O-methyluridine-3'-phosphate
  modified_base 18: mod_base = OTHER; note = 2'-O-methyluridine-3'-phosphate
  modified_base 19: mod_base = OTHER; note = 2'-O-methyluridine-3'-phosphate
  modified_base 20: mod_base = OTHER; note = 2'-O-methylcytidine-3'-phosphate
  modified_base 21: mod_base = OTHER; note = 2'-O-methyluridine-3'-phosphorothioate
  modified_base 22: mod_base = OTHER; note = 2'-O-methylguanosine-3'-phosphorothioate
  modified_base 23: mod_base = OTHER; note = 2'-O-methylcytidine-3'-phosphate
taacactaggcaatgatttctgc

SEQ ID NO: 4244 - RNA, 23 nt, synthetic construct
  source 1..23: mol_type = other RNA
  modified_base 1: mod_base = OTHER; note = Vinyl-phosphonate 2'-O-methyluridine-3'-phosphorothioate
  modified_base 2: mod_base = OTHER; note = 2'-fluoroadenosine-3'-phosphorothioate
  modified_base 3: mod_base = OTHER; note = 2'-O-methylguanosine-3'-phosphate
  modified_base 4: mod_base = OTHER; note = 2'-O-methylcytidine-3'-phosphate
  modified_base 5: mod_base = OTHER; note = 2'-O-methyladenosine-3'-phosphate
  modified_base 6: mod_base = OTHER; note = 2'-fluoroadenosine-3'-phosphate
  modified_base 7: mod_base = OTHER; note = 2'-O-methylguanosine-3'-phosphate
  modified_base 8: mod_base = OTHER; note = 2'-fluoroguanosine-3'-phosphate
  modified_base 9: mod_base = OTHER; note = 2'-fluoroadenosine-3'-phosphate
  modified_base 10: mod_base = OTHER; note = 2'-O-methyladenosine-3'-phosphate
  modified_base 11: mod_base = OTHER; note = 2'-O-methylcytidine-3'-phosphate
  modified_base 12: mod_base = OTHER; note = 2'-O-methyluridine-3'-phosphate
  modified_base 13: mod_base = OTHER; note = 2'-O-methylcytidine-3'-phosphate
  modified_base 14: mod_base = OTHER; note = 2'-fluoroadenosine-3'-phosphate
  modified_base 15: mod_base = OTHER; note = 2'-O-methylguanosine-3'-phosphate
  modified_base 16: mod_base = OTHER; note = 2'-fluorocytidine-3'-phosphate
  modified_base 17: mod_base = OTHER; note = 2'-O-methyladenosine-3'-phosphate
  modified_base 18: mod_base = OTHER; note = 2'-O-methylcytidine-3'-phosphate
  modified_base 19: mod_base = OTHER; note = 2'-O-methyluridine-3'-phosphate
  modified_base 20: mod_base = OTHER; note = 2'-O-methylcytidine-3'-phosphate
  modified_base 21: mod_base = OTHER; note = 2'-O-methyladenosine-3'-phosphorothioate
  modified_base 22: mod_base = OTHER; note = 2'-O-methylcytidine-3'-phosphorothioate
  modified_base 23: mod_base = OTHER; note = 2'-O-methyluridine-3'-phosphate
tagcaaggaactcagcactcact

SEQ ID NO: 4245 - RNA, 23 nt, synthetic construct
  source 1..23: mol_type = other RNA
  modified_base 1: mod_base = OTHER; note = Vinyl-phosphonate 2'-O-methyluridine-3'-phosphorothioate
  modified_base 2: mod_base = OTHER; note = 2'-fluorouridine -3'-phosphorothioate
  modified_base 3: mod_base = OTHER; note = 2'-O-methylguanosine-3'-phosphate
  modified_base 4: mod_base = OTHER; note = 2'-O-methyladenosine-3'-phosphate
  modified_base 5: mod_base = OTHER; note = 2'-O-methyluridine-3'-phosphate
  modified_base 6: mod_base = OTHER; note = 2'-fluorocytidine-3'-phosphate
  modified_base 7: mod_base = OTHER; note = 2'-O-methyladenosine-3'-phosphate
  modified_base 8: mod_base = OTHER; note = 2'-fluorouridine-3'-phosphate
  modified_base 9: mod_base = OTHER; note = 2'-fluoroadenosine-3'-phosphate
  modified_base 10: mod_base = OTHER; note = 2'-O-methyladenosine-3'-phosphate
  modified_base 11: mod_base = OTHER; note = 2'-O-methyluridine-3'-phosphate
  modified_base 12: mod_base = OTHER; note = 2'-O-methylcytidine-3'-phosphate
  modified_base 13: mod_base = OTHER; note = 2'-O-methyladenosine-3'-phosphate
  modified_base 14: mod_base = OTHER; note = 2'-fluorouridine-3'-phosphate
  modified_base 15: mod_base = OTHER; note = 2'-O-methylguanosine-3'-phosphate
  modified_base 16: mod_base = OTHER; note = 2'-fluorocytidine-3'-phosphate
  modified_base 17: mod_base = OTHER; note = 2'-O-methyladenosine-3'-phosphate
  modified_base 18: mod_base = OTHER; note = 2'-O-methyluridine-3'-phosphate
  modified_base 19: mod_base = OTHER; note = 2'-O-methylguanosine-3'-phosphate
  modified_base 20: mod_base = OTHER; note = 2'-O-methylguanosine-3'-phosphate
  modified_base 21: mod_base = OTHER; note = 2'-O-methylcytidine-3'-phosphorothioate
  modified_base 22: mod_base = OTHER; note = 2'-O-methyladenosine-3'-phosphorothioate
  modified_base 23: mod_base = OTHER; note = 2'-O-methylguanosine-3'-phosphate
ttgatcataatcatgcatggcag

SEQ ID NO: 4246 - RNA, 23 nt, synthetic construct
  source 1..23: mol_type = other RNA
  modified_base 1: mod_base = OTHER; note = Vinyl-phosphonate 2'-O-methyluridine-3'-phosphorothioate
  modified_base 2: mod_base = OTHER; note = 2'-fluorocytidine-3'-phosphorothioate
  modified_base 3: mod_base = OTHER; note = 2'-O-methyluridine-3'-phosphate
  modified_base 4: mod_base = OTHER; note = 2'-O-methylguanosine-3'-phosphate
  modified_base 5: mod_base = OTHER; note = 2'-O-methylguanosine-3'-phosphate
  modified_base 6: mod_base = OTHER; note = 2'-fluorouridine-3'-phosphate
  modified_base 7: mod_base = OTHER; note = 2'-O-methyladenosine-3'-phosphate
  modified_base 8: mod_base = OTHER; note = 2'-fluoroguanosine-3'-phosphate
  modified_base 9: mod_base = OTHER; note = 2'-fluorocytidine-3'-phosphate
  modified_base 10: mod_base = OTHER; note = 2'-O-methyladenosine-3'-phosphate
  modified_base 11: mod_base = OTHER; note = 2'-O-methyladenosine-3'-phosphate
  modified_base 12: mod_base = OTHER; note = 2'-O-methyladenosine-3'-phosphate
  modified_base 13: mod_base = OTHER; note = 2'-O-methylcytidine-3'-phosphate
  modified_base 14: mod_base = OTHER; note = 2'-fluorocytidine-3'-phosphate
  modified_base 15: mod_base = OTHER; note = 2'-O-methyladenosine-3'-phosphate
  modified_base 16: mod_base = OTHER; note = 2'-fluoroguanosine-3'-phosphate
  modified_base 17: mod_base = OTHER; note = 2'-O-methylcytidine-3'-phosphate
  modified_base 18: mod_base = OTHER; note = 2'-O-methyladenosine-3'-phosphate
  modified_base 19: mod_base = OTHER; note = 2'-O-methylguanosine-3'-phosphate
  modified_base 20: mod_base = OTHER; note = 2'-O-methylcytidine-3'-phosphate
  modified_base 21: mod_base = OTHER; note = 2'-O-methyladenosine-3'-phosphorothioate
  modified_base 22: mod_base = OTHER; note = 2'-O-methyluridine-3'-phosphorothioate
  modified_base 23: mod_base = OTHER; note = 2'-O-methylcytidine-3'-phosphate
tctggtagcaaaccagcagcatc

SEQ ID NO: 4247 - RNA, 23 nt, synthetic construct
  source 1..23: mol_type = other RNA
  modified_base 1: mod_base = OTHER; note = Vinyl-phosphonate 2'-O-methyluridine-3'-phosphorothioate
  modified_base 2: mod_base = OTHER; note = 2'-fluorouridine -3'-phosphorothioate
  modified_base 3: mod_base = OTHER; note = 2'-O-methylcytidine-3'-phosphate
  modified_base 4: mod_base = OTHER; note = 2'-O-methylguanosine-3'-phosphate
  modified_base 5: mod_base = OTHER; note = 2'-O-methylcytidine-3'-phosphate
  modified_base 6: mod_base = OTHER; note = 2'-fluorouridine-3'-phosphate
  modified_base 7: mod_base = OTHER; note = 2'-O-methyladenosine-3'-phosphate
  modified_base 8: mod_base = OTHER; note = 2'-fluorouridine-3'-phosphate
  modified_base 9: mod_base = OTHER; note = 2'-fluorouridine-3'-phosphate
  modified_base 10: mod_base = OTHER; note = 2'-O-methylcytidine-3'-phosphate
  modified_base 11: mod_base = OTHER; note = 2'-O-methylcytidine-3'-phosphate
  modified_base 12: mod_base = OTHER; note = 2'-O-methyluridine-3'-phosphate
  modified_base 13: mod_base = OTHER; note = 2'-O-methylcytidine-3'-phosphate
  modified_base 14: mod_base = OTHER; note = 2'-fluorouridine-3'-phosphate
  modified_base 15: mod_base = OTHER; note = 2'-O-methyluridine-3'-phosphate
  modified_base 16: mod_base = OTHER; note = 2'-fluorocytidine-3'-phosphate
  modified_base 17: mod_base = OTHER; note = 2'-O-methyladenosine-3'-phosphate
  modified_base 18: mod_base = OTHER; note = 2'-O-methyluridine-3'-phosphate
  modified_base 19: mod_base = OTHER; note = 2'-O-methylcytidine-3'-phosphate
  modified_base 20: mod_base = OTHER; note = 2'-O-methyluridine-3'-phosphate
  modified_base 21: mod_base = OTHER; note = 2'-O-methylguanosine-3'-phosphorothioate
  modified_base 22: mod_base = OTHER; note = 2'-O-methylcytidine-3'-phosphorothioate
  modified_base 23: mod_base = OTHER; note = 2'-O-methylcytidine-3'-phosphate
ttcgctattcctcttcatctgcc

SEQ ID NO: 4248 - RNA, 23 nt, synthetic construct
  source 1..23: mol_type = other RNA
  modified_base 1: mod_base = OTHER; note = Vinyl-phosphonate 2'-O-methyluridine-3'-phosphorothioate
  modified_base 2: mod_base = OTHER; note = 2'-fluoroadenosine-3'-phosphorothioate
  modified_base 3: mod_base = OTHER; note = 2'-O-methylguanosine-3'-phosphate
  modified_base 4: mod_base = OTHER; note = 2'-O-methyladenosine-3'-phosphate
  modified_base 5: mod_base = OTHER; note = 2'-O-methyladenosine-3'-phosphate
  modified_base 6: mod_base = OTHER; note = 2'-fluoroadenosine-3'-phosphate
  modified_base 7: mod_base = OTHER; note = 2'-O-methyluridine-3'-phosphate
  modified_base 8: mod_base = OTHER; note = 2'-fluorouridine-3'-phosphate
  modified_base 9: mod_base = OTHER; note = 2'-fluoroguanosine-3'-phosphate
  modified_base 10: mod_base = OTHER; note = 2'-O-methyladenosine-3'-phosphate
  modified_base 11: mod_base = OTHER; note = 2'-O-methyluridine-3'-phosphate
  modified_base 12: mod_base = OTHER; note = 2'-O-methylguanosine-3'-phosphate
  modified_base 13: mod_base = OTHER; note = 2'-O-methylcytidine-3'-phosphate
  modified_base 14: mod_base = OTHER; note = 2'-fluoroadenosine-3'-phosphate
  modified_base 15: mod_base = OTHER; note = 2'-O-methylcytidine-3'-phosphate
  modified_base 16: mod_base = OTHER; note = 2'-fluorocytidine-3'-phosphate
  modified_base 17: mod_base = OTHER; note = 2'-O-methyluridine-3'-phosphate
  modified_base 18: mod_base = OTHER; note = 2'-O-methylguanosine-3'-phosphate
  modified_base 19: mod_base = OTHER; note = 2'-O-methylguanosine-3'-phosphate
  modified_base 20: mod_base = OTHER; note = 2'-O-methyladenosine-3'-phosphate
  modified_base 21: mod_base = OTHER; note = 2'-O-methyluridine-3'-phosphorothioate
  modified_base 22: mod_base = OTHER; note = 2'-O-methyluridine-3'-phosphorothioate
  modified_base 23: mod_base = OTHER; note = 2'-O-methyluridine-3'-phosphate
tagaaattgatgcacctggattt

SEQ ID NO: 4249 - RNA, 23 nt, synthetic construct
  source 1..23: mol_type = other RNA
  modified_base 1: mod_base = OTHER; note = Vinyl-phosphonate 2'-O-methyluridine-3'-phosphorothioate
  modified_base 2: mod_base = OTHER; note = 2'-fluoroadenosine-3'-phosphorothioate
  modified_base 3: mod_base = OTHER; note = 2'-O-methyladenosine-3'-phosphate
  modified_base 4: mod_base = OTHER; note = 2'-O-methylguanosine-3'-phosphate
  modified_base 5: mod_base = OTHER; note = 2'-O-methyladenosine-3'-phosphate
  modified_base 6: mod_base = OTHER; note = 2'-fluorouridine-3'-phosphate
  modified_base 7: mod_base = OTHER; note = 2'-O-methyladenosine-3'-phosphate
  modified_base 8: mod_base = OTHER; note = 2'-fluoroadenosine-3'-phosphate
  modified_base 9: mod_base = OTHER; note = 2'-fluorocytidine-3'-phosphate
  modified_base 10: mod_base = OTHER; note = 2'-O-methylguanosine-3'-phosphate
  modified_base 11: mod_base = OTHER; note = 2'-O-methylcytidine-3'-phosphate
  modified_base 12: mod_base = OTHER; note = 2'-O-methyluridine-3'-phosphate
  modified_base 13: mod_base = OTHER; note = 2'-O-methyluridine-3'-phosphate
  modified_base 14: mod_base = OTHER; note = 2'-fluoroguanosine-3'-phosphate
  modified_base 15: mod_base = OTHER; note = 2'-O-methylguanosine-3'-phosphate
  modified_base 16: mod_base = OTHER; note = 2'-fluorocytidine-3'-phosphate
  modified_base 17: mod_base = OTHER; note = 2'-O-methyluridine-3'-phosphate
  modified_base 18: mod_base = OTHER; note = 2'-O-methyluridine-3'-phosphate
  modified_base 19: mod_base = OTHER; note = 2'-O-methyladenosine-3'-phosphate
  modified_base 20: mod_base = OTHER; note = 2'-O-methyluridine-3'-phosphate
  modified_base 21: mod_base = OTHER; note = 2'-O-methyluridine-3'-phosphorothioate
  modified_base 22: mod_base = OTHER; note = 2'-O-methyladenosine-3'-phosphorothioate
  modified_base 23: mod_base = OTHER; note = 2'-O-methyladenosine-3'-phosphate
taagataacgcttggcttattaa

SEQ ID NO: 4250 - RNA, 23 nt, synthetic construct
  source 1..23: mol_type = other RNA
  modified_base 1: mod_base = OTHER; note = Vinyl-phosphonate 2'-O-methyluridine-3'-phosphorothioate
  modified_base 2: mod_base = OTHER; note = 2'-fluoroadenosine-3'-phosphorothioate
  modified_base 3: mod_base = OTHER; note = 2'-O-methylguanosine-3'-phosphate
  modified_base 4: mod_base = OTHER; note = 2'-O-methylcytidine-3'-phosphate
  modified_base 5: mod_base = OTHER; note = 2'-O-methyladenosine-3'-phosphate
  modified_base 6: mod_base = OTHER; note = 2'-fluoroguanosine-3'-phosphate
  modified_base 7: mod_base = OTHER; note = 2'-O-methyladenosine-3'-phosphate
  modified_base 8: mod_base = OTHER; note = 2'-fluoroguanosine-3'-phosphate
  modified_base 9: mod_base = OTHER; note = 2'-fluorocytidine-3'-phosphate
  modified_base 10: mod_base = OTHER; note = 2'-O-methyladenosine-3'-phosphate
  modified_base 11: mod_base = OTHER; note = 2'-O-methyladenosine-3'-phosphate
  modified_base 12: mod_base = OTHER; note = 2'-O-methylguanosine-3'-phosphate
  modified_base 13: mod_base = OTHER; note = 2'-O-methylguanosine-3'-phosphate
  modified_base 14: mod_base = OTHER; note = 2'-fluoroadenosine-3'-phosphate
  modified_base 15: mod_base = OTHER; note = 2'-O-methyluridine-3'-phosphate
  modified_base 16: mod_base = OTHER; note = 2'-fluorocytidine-3'-phosphate
  modified_base 17: mod_base = OTHER; note = 2'-O-methylcytidine-3'-phosphate
  modified_base 18: mod_base = OTHER; note = 2'-O-methyluridine-3'-phosphate
  modified_base 19: mod_base = OTHER; note = 2'-O-methylcytidine-3'-phosphate
  modified_base 20: mod_base = OTHER; note = 2'-O-methyluridine-3'-phosphate
  modified_base 21: mod_base = OTHER; note = 2'-O-methylcytidine-3'-phosphorothioate
  modified_base 22: mod_base = OTHER; note = 2'-O-methyladenosine-3'-phosphorothioate
  modified_base 23: mod_base = OTHER; note = 2'-O-methylcytidine-3'-phosphate
tagcagagcaaggatcctctcac

SEQ ID NO: 4251 - RNA, 23 nt, synthetic construct
  source 1..23: mol_type = other RNA
  modified_base 1: mod_base = OTHER; note = Vinyl-phosphonate 2'-O-methyluridine-3'-phosphorothioate
  modified_base 2: mod_base = OTHER; note = 2'-fluorouridine -3'-phosphorothioate
  modified_base 3: mod_base = OTHER; note = 2'-O-methyluridine-3'-phosphate
  modified_base 4: mod_base = OTHER; note = 2'-O-methylcytidine-3'-phosphate
  modified_base 5: mod_base = OTHER; note = 2'-O-methyluridine-3'-phosphate
  modified_base 6: mod_base = OTHER; note = 2'-fluorouridine-3'-phosphate
  modified_base 7: mod_base = OTHER; note = 2'-O-methylcytidine-3'-phosphate
  modified_base 8: mod_base = OTHER; note = 2'-fluoroadenosine-3'-phosphate
  modified_base 9: mod_base = OTHER; note = 2'-fluorocytidine-3'-phosphate
  modified_base 10: mod_base = OTHER; note = 2'-O-methylcytidine-3'-phosphate
  modified_base 11: mod_base = OTHER; note = 2'-O-methylguanosine-3'-phosphate
  modified_base 12: mod_base = OTHER; note = 2'-O-methyluridine-3'-phosphate
  modified_base 13: mod_base = OTHER; note = 2'-O-methylcytidine-3'-phosphate
  modified_base 14: mod_base = OTHER; note = 2'-fluorouridine-3'-phosphate
  modified_base 15: mod_base = OTHER; note = 2'-O-methyluridine-3'-phosphate
  modified_base 16: mod_base = OTHER; note = 2'-fluorocytidine-3'-phosphate
  modified_base 17: mod_base = OTHER; note = 2'-O-methyladenosine-3'-phosphate
  modified_base 18: mod_base = OTHER; note = 2'-O-methyluridine-3'-phosphate
  modified_base 19: mod_base = OTHER; note = 2'-O-methylcytidine-3'-phosphate
  modified_base 20: mod_base = OTHER; note = 2'-O-methyladenosine-3'-phosphate
  modified_base 21: mod_base = OTHER; note = 2'-O-methyluridine-3'-phosphorothioate
  modified_base 22: mod_base = OTHER; note = 2'-O-methylcytidine-3'-phosphorothioate
  modified_base 23: mod_base = OTHER; note = 2'-O-methyladenosine-3'-phosphate
tttcttcaccgtcttcatcatca

SEQ ID NO: 4252 - RNA, 23 nt, synthetic construct
  source 1..23: mol_type = other RNA
  modified_base 1: mod_base = OTHER; note = Vinyl-phosphonate 2'-O-methyluridine-3'-phosphorothioate
  modified_base 2: mod_base = OTHER; note = 2'-fluoroadenosine-3'-phosphorothioate
  modified_base 3: mod_base = OTHER; note = 2'-O-methyluridine-3'-phosphate
  modified_base 4: mod_base = OTHER; note = 2'-O-methyluridine-3'-phosphate
  modified_base 5: mod_base = OTHER; note = 2'-O-methylcytidine-3'-phosphate
  modified_base 6: mod_base = OTHER; note = 2'-fluorouridine-3'-phosphate
  modified_base 7: mod_base = OTHER; note = 2'-O-methyluridine-3'-phosphate
  modified_base 8: mod_base = OTHER; note = 2'-fluorouridine-3'-phosphate
  modified_base 9: mod_base = OTHER; note = 2'-fluorocytidine-3'-phosphate
  modified_base 10: mod_base = OTHER; note = 2'-O-methyluridine-3'-phosphate
  modified_base 11: mod_base = OTHER; note = 2'-O-methyluridine-3'-phosphate
  modified_base 12: mod_base = OTHER; note = 2'-O-methyladenosine-3'-phosphate
  modified_base 13: mod_base = OTHER; note = 2'-O-methylcytidine-3'-phosphate
  modified_base 14: mod_base = OTHER; note = 2'-fluoroadenosine-3'-phosphate
  modified_base 15: mod_base = OTHER; note = 2'-O-methylcytidine-3'-phosphate
  modified_base 16: mod_base = OTHER; note = 2'-fluorouridine-3'-phosphate
  modified_base 17: mod_base = OTHER; note = 2'-O-methyluridine-3'-phosphate
  modified_base 18: mod_base = OTHER; note = 2'-O-methyladenosine-3'-phosphate
  modified_base 19: mod_base = OTHER; note = 2'-O-methylcytidine-3'-phosphate
  modified_base 20: mod_base = OTHER; note = 2'-O-methylguanosine-3'-phosphate
  modified_base 21: mod_base = OTHER; note = 2'-O-methyladenosine-3'-phosphorothioate
  modified_base 22: mod_base = OTHER; note = 2'-O-methyladenosine-3'-phosphorothioate
  modified_base 23: mod_base = OTHER; note = 2'-O-methyluridine-3'-phosphate
tattctttcttacacttacgaat

SEQ ID NO: 4253 - RNA, 23 nt, synthetic construct
  source 1..23: mol_type = other RNA
  modified_base 1: mod_base = OTHER; note = Vinyl-phosphonate 2'-O-methyluridine-3'-phosphorothioate
  modified_base 2: mod_base = OTHER; note = 2'-fluorouridine -3'-phosphorothioate
  modified_base 3: mod_base = OTHER; note = 2'-O-methylcytidine-3'-phosphate
  modified_base 4: mod_base = OTHER; note = 2'-O-methylcytidine-3'-phosphate
  modified_base 5: mod_base = OTHER; note = 2'-O-methyladenosine-3'-phosphate
  modified_base 6: mod_base = OTHER; note = 2'-fluorocytidine-3'-phosphate
  modified_base 7: mod_base = OTHER; note = 2'-O-methyladenosine-3'-phosphate
  modified_base 8: mod_base = OTHER; note = 2'-fluoroguanosine-3'-phosphate
  modified_base 9: mod_base = OTHER; note = 2'-fluorocytidine-3'-phosphate
  modified_base 10: mod_base = OTHER; note = 2'-O-methyluridine-3'-phosphate
  modified_base 11: mod_base = OTHER; note = 2'-O-methylguanosine-3'-phosphate
  modified_base 12: mod_base = OTHER; note = 2'-O-methyluridine-3'-phosphate
  modified_base 13: mod_base = OTHER; note = 2'-O-methyluridine-3'-phosphate
  modified_base 14: mod_base = OTHER; note = 2'-fluoroadenosine-3'-phosphate
  modified_base 15: mod_base = OTHER; note = 2'-O-methylcytidine-3'-phosphate
  modified_base 16: mod_base = OTHER; note = 2'-fluoroadenosine-3'-phosphate
  modified_base 17: mod_base = OTHER; note = 2'-O-methylcytidine-3'-phosphate
  modified_base 18: mod_base = OTHER; note = 2'-O-methyladenosine-3'-phosphate
  modified_base 19: mod_base = OTHER; note = 2'-O-methylguanosine-3'-phosphate
  modified_base 20: mod_base = OTHER; note = 2'-O-methyladenosine-3'-phosphate
  modified_base 21: mod_base = OTHER; note = 2'-O-methyluridine-3'-phosphorothioate
  modified_base 22: mod_base = OTHER; note = 2'-O-methyluridine-3'-phosphorothioate
  modified_base 23: mod_base = OTHER; note = 2'-O-methylguanosine-3'-phosphate
ttccacagctgttacacagattg

SEQ ID NO: 4254 - RNA, 23 nt, synthetic construct
  source 1..23: mol_type = other RNA
  modified_base 1: mod_base = OTHER; note = Vinyl-phosphonate 2'-O-methyluridine-3'-phosphorothioate
  modified_base 2: mod_base = OTHER; note = 2'-fluoroguanosine-3'-phosphorothioate
  modified_base 3: mod_base = OTHER; note = 2'-O-methyluridine-3'-phosphate
  modified_base 4: mod_base = OTHER; note = 2'-O-methyluridine-3'-phosphate
  modified_base 5: mod_base = OTHER; note = 2'-O-methylguanosine-3'-phosphate
  modified_base 6: mod_base = OTHER; note = 2'-fluoroadenosine-3'-phosphate
  modified_base 7: mod_base = OTHER; note = 2'-O-methylguanosine-3'-phosphate
  modified_base 8: mod_base = OTHER; note = 2'-fluorouridine-3'-phosphate
  modified_base 9: mod_base = OTHER; note = 2'-fluoroguanosine-3'-phosphate
  modified_base 10: mod_base = OTHER; note = 2'-O-methylguanosine-3'-phosphate
  modified_base 11: mod_base = OTHER; note = 2'-O-methylguanosine-3'-phosphate
  modified_base 12: mod_base = OTHER; note = 2'-O-methyladenosine-3'-phosphate
  modified_base 13: mod_base = OTHER; note = 2'-O-methyladenosine-3'-phosphate
  modified_base 14: mod_base = OTHER; note = 2'-fluorouridine-3'-phosphate
  modified_base 15: mod_base = OTHER; note = 2'-O-methyluridine-3'-phosphate
  modified_base 16: mod_base = OTHER; note = 2'-fluorouridine-3'-phosphate
  modified_base 17: mod_base = OTHER; note = 2'-O-methyluridine-3'-phosphate
  modified_base 18: mod_base = OTHER; note = 2'-O-methyladenosine-3'-phosphate
  modified_base 19: mod_base = OTHER; note = 2'-O-methyladenosine-3'-phosphate
  modified_base 20: mod_base = OTHER; note = 2'-O-methyladenosine-3'-phosphate
  modified_base 21: mod_base = OTHER; note = 2'-O-methyluridine-3'-phosphorothioate
  modified_base 22: mod_base = OTHER; note = 2'-O-methyladenosine-3'-phosphorothioate
  modified_base 23: mod_base = OTHER; note = 2'-O-methyluridine-3'-phosphate
tgttgagtgggaattttaaatat

SEQ ID NO: 4255 - RNA, 23 nt, synthetic construct
  source 1..23: mol_type = other RNA
  modified_base 1: mod_base = OTHER; note = Vinyl-phosphonate 2'-O-methyluridine-3'-phosphorothioate
  modified_base 2: mod_base = OTHER; note = 2'-fluoroadenosine-3'-phosphorothioate
  modified_base 3: mod_base = OTHER; note = 2'-O-methylguanosine-3'-phosphate
  modified_base 4: mod_base = OTHER; note = 2'-O-methyladenosine-3'-phosphate
  modified_base 5: mod_base = OTHER; note = 2'-O-methylguanosine-3'-phosphate
  modified_base 6: mod_base = OTHER; note = 2'-fluorocytidine-3'-phosphate
  modified_base 7: mod_base = OTHER; note = 2'-O-methylcytidine-3'-phosphate
  modified_base 8: mod_base = OTHER; note = 2'-fluoroadenosine-3'-phosphate
  modified_base 9: mod_base = OTHER; note = 2'-fluoroguanosine-3'-phosphate
  modified_base 10: mod_base = OTHER; note = 2'-O-methyluridine-3'-phosphate
  modified_base 11: mod_base = OTHER; note = 2'-O-methyladenosine-3'-phosphate
  modified_base 12: mod_base = OTHER; note = 2'-O-methylguanosine-3'-phosphate
  modified_base 13: mod_base = OTHER; note = 2'-O-methyladenosine-3'-phosphate
  modified_base 14: mod_base = OTHER; note = 2'-fluorocytidine-3'-phosphate
  modified_base 15: mod_base = OTHER; note = 2'-O-methyladenosine-3'-phosphate
  modified_base 16: mod_base = OTHER; note = 2'-fluorocytidine-3'-phosphate
  modified_base 17: mod_base = OTHER; note = 2'-O-methyluridine-3'-phosphate
  modified_base 18: mod_base = OTHER; note = 2'-O-methylguanosine-3'-phosphate
  modified_base 19: mod_base = OTHER; note = 2'-O-methylguanosine-3'-phosphate
  modified_base 20: mod_base = OTHER; note = 2'-O-methyluridine-3'-phosphate
  modified_base 21: mod_base = OTHER; note = 2'-O-methylcytidine-3'-phosphorothioate
  modified_base 22: mod_base = OTHER; note = 2'-O-methylcytidine-3'-phosphorothioate
  modified_base 23: mod_base = OTHER; note = 2'-O-methyladenosine-3'-phosphate
tagagccagtagacactggtcca

SEQ ID NO: 4256 - RNA, 23 nt, synthetic construct
  source 1..23: mol_type = other RNA
  modified_base 1: mod_base = OTHER; note = Vinyl-phosphonate 2'-O-methyluridine-3'-phosphorothioate
  modified_base 2: mod_base = OTHER; note = 2'-fluoroadenosine-3'-phosphorothioate
  modified_base 3: mod_base = OTHER; note = 2'-O-methyluridine-3'-phosphate
  modified_base 4: mod_base = OTHER; note = 2'-O-methylguanosine-3'-phosphate
  modified_base 5: mod_base = OTHER; note = 2'-O-methyladenosine-3'-phosphate
  modified_base 6: mod_base = OTHER; note = 2'-fluorocytidine-3'-phosphate
  modified_base 7: mod_base = OTHER; note = 2'-O-methyluridine-3'-phosphate
  modified_base 8: mod_base = OTHER; note = 2'-fluoroadenosine-3'-phosphate
  modified_base 9: mod_base = OTHER; note = 2'-fluoroadenosine-3'-phosphate
  modified_base 10: mod_base = OTHER; note = 2'-O-methyladenosine-3'-phosphate
  modified_base 11: mod_base = OTHER; note = 2'-O-methyladenosine-3'-phosphate
  modified_base 12: mod_base = OTHER; note = 2'-O-methyladenosine-3'-phosphate
  modified_base 13: mod_base = OTHER; note = 2'-O-methyladenosine-3'-phosphate
  modified_base 14: mod_base = OTHER; note = 2'-fluorocytidine-3'-phosphate
  modified_base 15: mod_base = OTHER; note = 2'-O-methylguanosine-3'-phosphate
  modified_base 16: mod_base = OTHER; note = 2'-fluoroadenosine-3'-phosphate
  modified_base 17: mod_base = OTHER; note = 2'-O-methyladenosine-3'-phosphate
  modified_base 18: mod_base = OTHER; note = 2'-O-methyladenosine-3'-phosphate
  modified_base 19: mod_base = OTHER; note = 2'-O-methylguanosine-3'-phosphate
  modified_base 20: mod_base = OTHER; note = 2'-O-methylcytidine-3'-phosphate
  modified_base 21: mod_base = OTHER; note = 2'-O-methylguanosine-3'-phosphorothioate
  modified_base 22: mod_base = OTHER; note = 2'-O-methylcytidine-3'-phosphorothioate
  modified_base 23: mod_base = OTHER; note = 2'-O-methyluridine-3'-phosphate
tatgactaaaaaacgaaagcgct

SEQ ID NO: 4257 - RNA, 23 nt, synthetic construct
  source 1..23: mol_type = other RNA
  modified_base 1: mod_base = OTHER; note = Vinyl-phosphonate 2'-O-methyluridine-3'-phosphorothioate
  modified_base 2: mod_base = OTHER; note = 2'-fluoroguanosine-3'-phosphorothioate
  modified_base 3: mod_base = OTHER; note = 2'-O-methylcytidine-3'-phosphate
  modified_base 4: mod_base = OTHER; note = 2'-O-methyladenosine-3'-phosphate
  modified_base 5: mod_base = OTHER; note = 2'-O-methyladenosine-3'-phosphate
  modified_base 6: mod_base = OTHER; note = 2'-fluorocytidine-3'-phosphate
  modified_base 7: mod_base = OTHER; note = 2'-O-methyladenosine-3'-phosphate
  modified_base 8: mod_base = OTHER; note = 2'-fluorouridine-3'-phosphate
  modified_base 9: mod_base = OTHER; note = 2'-fluoroguanosine-3'-phosphate
  modified_base 10: mod_base = OTHER; note = 2'-O-methylguanosine-3'-phosphate
  modified_base 11: mod_base = OTHER; note = 2'-O-methylguanosine-3'-phosphate
  modified_base 12: mod_base = OTHER; note = 2'-O-methyluridine-3'-phosphate
  modified_base 13: mod_base = OTHER; note = 2'-O-methylcytidine-3'-phosphate
  modified_base 14: mod_base = OTHER; note = 2'-fluoroadenosine-3'-phosphate
  modified_base 15: mod_base = OTHER; note = 2'-O-methyladenosine-3'-phosphate
  modified_base 16: mod_base = OTHER; note = 2'-fluorocytidine-3'-phosphate
  modified_base 17: mod_base = OTHER; note = 2'-O-methyladenosine-3'-phosphate
  modified_base 18: mod_base = OTHER; note = 2'-O-methylcytidine-3'-phosphate
  modified_base 19: mod_base = OTHER; note = 2'-O-methylguanosine-3'-phosphate
  modified_base 20: mod_base = OTHER; note = 2'-O-methylguanosine-3'-phosphate
  modified_base 21: mod_base = OTHER; note = 2'-O-methyladenosine-3'-phosphorothioate
  modified_base 22: mod_base = OTHER; note = 2'-O-methyluridine-3'-phosphorothioate
  modified_base 23: mod_base = OTHER; note = 2'-O-methylguanosine-3'-phosphate
tgcaacatgggtcaacacggatg

SEQ ID NO: 4258 - RNA, 23 nt, synthetic construct
  source 1..23: mol_type = other RNA
  modified_base 1: mod_base = OTHER; note = Vinyl-phosphonate 2'-O-methyluridine-3'-phosphorothioate
  modified_base 2: mod_base = OTHER; note = 2'-fluorocytidine-3'-phosphorothioate
  modified_base 3: mod_base = OTHER; note = 2'-O-methyladenosine-3'-phosphate
  modified_base 4: mod_base = OTHER; note = 2'-O-methyluridine-3'-phosphate
  modified_base 5: mod_base = OTHER; note = 2'-O-methyluridine-3'-phosphate
  modified_base 6: mod_base = OTHER; note = 2'-fluorouridine-3'-phosphate
  modified_base 7: mod_base = OTHER; note = 2'-O-methylcytidine-3'-phosphate
  modified_base 8: mod_base = OTHER; note = 2'-fluorouridine-3'-phosphate
  modified_base 9: mod_base = OTHER; note = 2'-fluorouridine-3'-phosphate
  modified_base 10: mod_base = OTHER; note = 2'-O-methylcytidine-3'-phosphate
  modified_base 11: mod_base = OTHER; note = 2'-O-methyladenosine-3'-phosphate
  modified_base 12: mod_base = OTHER; note = 2'-O-methyluridine-3'-phosphate
  modified_base 13: mod_base = OTHER; note = 2'-O-methylcytidine-3'-phosphate
  modified_base 14: mod_base = OTHER; note = 2'-fluorouridine-3'-phosphate
  modified_base 15: mod_base = OTHER; note = 2'-O-methyluridine-3'-phosphate
  modified_base 16: mod_base = OTHER; note = 2'-fluorocytidine-3'-phosphate
  modified_base 17: mod_base = OTHER; note = 2'-O-methyluridine-3'-phosphate
  modified_base 18: mod_base = OTHER; note = 2'-O-methylguanosine-3'-phosphate
  modified_base 19: mod_base = OTHER; note = 2'-O-methyluridine-3'-phosphate
  modified_base 20: mod_base = OTHER; note = 2'-O-methyladenosine-3'-phosphate
  modified_base 21: mod_base = OTHER; note = 2'-O-methyluridine-3'-phosphorothioate
  modified_base 22: mod_base = OTHER; note = 2'-O-methylcytidine-3'-phosphorothioate
  modified_base 23: mod_base = OTHER; note = 2'-O-methyluridine-3'-phosphate
tcatttcttcatcttctgtatct

SEQ ID NO: 4259 - RNA, 23 nt, synthetic construct
  source 1..23: mol_type = other RNA
  modified_base 1: mod_base = OTHER; note = Vinyl-phosphonate 2'-O-methyluridine-3'-phosphorothioate
  modified_base 2: mod_base = OTHER; note = 2'-fluorouridine -3'-phosphorothioate
  modified_base 3: mod_base = OTHER; note = 2'-O-methyluridine-3'-phosphate
  modified_base 4: mod_base = OTHER; note = 2'-O-methyladenosine-3'-phosphate
  modified_base 5: mod_base = OTHER; note = 2'-O-methyladenosine-3'-phosphate
  modified_base 6: mod_base = OTHER; note = 2'-fluoroguanosine-3'-phosphate
  modified_base 7: mod_base = OTHER; note = 2'-O-methyluridine-3'-phosphate
  modified_base 8: mod_base = OTHER; note = 2'-fluorouridine-3'-phosphate
  modified_base 9: mod_base = OTHER; note = 2'-fluorouridine-3'-phosphate
  modified_base 10: mod_base = OTHER; note = 2'-O-methylcytidine-3'-phosphate
  modified_base 11: mod_base = OTHER; note = 2'-O-methyladenosine-3'-phosphate
  modified_base 12: mod_base = OTHER; note = 2'-O-methylguanosine-3'-phosphate
  modified_base 13: mod_base = OTHER; note = 2'-O-methylcytidine-3'-phosphate
  modified_base 14: mod_base = OTHER; note = 2'-fluorouridine-3'-phosphate
  modified_base 15: mod_base = OTHER; note = 2'-O-methylcytidine-3'-phosphate
  modified_base 16: mod_base = OTHER; note = 2'-fluoroguanosine-3'-phosphate
  modified_base 17: mod_base = OTHER; note = 2'-O-methylguanosine-3'-phosphate
  modified_base 18: mod_base = OTHER; note = 2'-O-methylguanosine-3'-phosphate
  modified_base 19: mod_base = OTHER; note = 2'-O-methyladenosine-3'-phosphate
  modified_base 20: mod_base = OTHER; note = 2'-O-methylguanosine-3'-phosphate
  modified_base 21: mod_base = OTHER; note = 2'-O-methyladenosine-3'-phosphorothioate
  modified_base 22: mod_base = OTHER; note = 2'-O-methylguanosine-3'-phosphorothioate
  modified_base 23: mod_base = OTHER; note = 2'-O-methyladenosine-3'-phosphate
tttaagtttcagctcgggagaga

SEQ ID NO: 4260 - RNA, 23 nt, synthetic construct
  source 1..23: mol_type = other RNA
  modified_base 1: mod_base = OTHER; note = Vinyl-phosphonate 2'-O-methyluridine-3'-phosphorothioate
  modified_base 2: mod_base = OTHER; note = 2'-fluoroadenosine-3'-phosphorothioate
  modified_base 3: mod_base = OTHER; note = 2'-O-methyluridine-3'-phosphate
  modified_base 4: mod_base = OTHER; note = 2'-O-methyladenosine-3'-phosphate
  modified_base 5: mod_base = OTHER; note = 2'-O-methyluridine-3'-phosphate
  modified_base 6: mod_base = OTHER; note = 2'-fluorocytidine-3'-phosphate
  modified_base 7: mod_base = OTHER; note = 2'-O-methyluridine-3'-phosphate
  modified_base 8: mod_base = OTHER; note = 2'-fluoroguanosine-3'-phosphate
  modified_base 9: mod_base = OTHER; note = 2'-fluorocytidine-3'-phosphate
  modified_base 10: mod_base = OTHER; note = 2'-O-methylcytidine-3'-phosphate
  modified_base 11: mod_base = OTHER; note = 2'-O-methyladenosine-3'-phosphate
  modified_base 12: mod_base = OTHER; note = 2'-O-methylguanosine-3'-phosphate
  modified_base 13: mod_base = OTHER; note = 2'-O-methyluridine-3'-phosphate
  modified_base 14: mod_base = OTHER; note = 2'-fluorouridine-3'-phosphate
  modified_base 15: mod_base = OTHER; note = 2'-O-methyluridine-3'-phosphate
  modified_base 16: mod_base = OTHER; note = 2'-fluoroguanosine-3'-phosphate
  modified_base 17: mod_base = OTHER; note = 2'-O-methyladenosine-3'-phosphate
  modified_base 18: mod_base = OTHER; note = 2'-O-methyluridine-3'-phosphate
  modified_base 19: mod_base = OTHER; note = 2'-O-methylguanosine-3'-phosphate
  modified_base 20: mod_base = OTHER; note = 2'-O-methylcytidine-3'-phosphate
  modified_base 21: mod_base = OTHER; note = 2'-O-methyladenosine-3'-phosphorothioate
  modified_base 22: mod_base = OTHER; note = 2'-O-methylcytidine-3'-phosphorothioate
  modified_base 23: mod_base = OTHER; note = 2'-O-methyladenosine-3'-phosphate
tatatctgccagtttgatgcaca

SEQ ID NO: 4261 - RNA, 23 nt, synthetic construct
  source 1..23: mol_type = other RNA
  modified_base 1: mod_base = OTHER; note = Vinyl-phosphonate 2'-O-methyluridine-3'-phosphorothioate
  modified_base 2: mod_base = OTHER; note = 2'-fluoroguanosine-3'-phosphorothioate
  modified_base 3: mod_base = OTHER; note = 2'-O-methyluridine-3'-phosphate
  modified_base 4: mod_base = OTHER; note = 2'-O-methylcytidine-3'-phosphate
  modified_base 5: mod_base = OTHER; note = 2'-O-methyluridine-3'-phosphate
  modified_base 6: mod_base = OTHER; note = 2'-fluorocytidine-3'-phosphate
  modified_base 7: mod_base = OTHER; note = 2'-O-methylcytidine-3'-phosphate
  modified_base 8: mod_base = OTHER; note = 2'-fluorouridine-3'-phosphate
  modified_base 9: mod_base = OTHER; note = 2'-fluoroguanosine-3'-phosphate
  modified_base 10: mod_base = OTHER; note = 2'-O-methyladenosine-3'-phosphate
  modified_base 11: mod_base = OTHER; note = 2'-O-methyladenosine-3'-phosphate
  modified_base 12: mod_base = OTHER; note = 2'-O-methyluridine-3'-phosphate
  modified_base 13: mod_base = OTHER; note = 2'-O-methyladenosine-3'-phosphate
  modified_base 14: mod_base = OTHER; note = 2'-fluorouridine-3'-phosphate
  modified_base 15: mod_base = OTHER; note = 2'-O-methyluridine-3'-phosphate
  modified_base 16: mod_base = OTHER; note = 2'-fluorouridine-3'-phosphate
  modified_base 17: mod_base = OTHER; note = 2'-O-methyluridine-3'-phosphate
  modified_base 18: mod_base = OTHER; note = 2'-O-methylguanosine-3'-phosphate
  modified_base 19: mod_base = OTHER; note = 2'-O-methylcytidine-3'-phosphate
  modified_base 20: mod_base = OTHER; note = 2'-O-methyladenosine-3'-phosphate
  modified_base 21: mod_base = OTHER; note = 2'-O-methyladenosine-3'-phosphorothioate
  modified_base 22: mod_base = OTHER; note = 2'-O-methylcytidine-3'-phosphorothioate
  modified_base 23: mod_base = OTHER; note = 2'-O-methyluridine-3'-phosphate
tgtctcctgaatattttgcaact

SEQ ID NO: 4262 - RNA, 23 nt, synthetic construct
  source 1..23: mol_type = other RNA
  modified_base 1: mod_base = OTHER; note = Vinyl-phosphonate 2'-O-methyluridine-3'-phosphorothioate
  modified_base 2: mod_base = OTHER; note = 2'-fluorouridine -3'-phosphorothioate
  modified_base 3: mod_base = OTHER; note = 2'-O-methylguanosine-3'-phosphate
  modified_base 4: mod_base = OTHER; note = 2'-O-methyluridine-3'-phosphate
  modified_base 5: mod_base = OTHER; note = 2'-O-methylguanosine-3'-phosphate
  modified_base 6: mod_base = OTHER; note = 2'-fluoroguanosine-3'-phosphate
  modified_base 7: mod_base = OTHER; note = 2'-O-methylcytidine-3'-phosphate
  modified_base 8: mod_base = OTHER; note = 2'-fluoroadenosine-3'-phosphate
  modified_base 9: mod_base = OTHER; note = 2'-fluorouridine-3'-phosphate
  modified_base 10: mod_base = OTHER; note = 2'-O-methylguanosine-3'-phosphate
  modified_base 11: mod_base = OTHER; note = 2'-O-methyluridine-3'-phosphate
  modified_base 12: mod_base = OTHER; note = 2'-O-methyladenosine-3'-phosphate
  modified_base 13: mod_base = OTHER; note = 2'-O-methyluridine-3'-phosphate
  modified_base 14: mod_base = OTHER; note = 2'-fluoroadenosine-3'-phosphate
  modified_base 15: mod_base = OTHER; note = 2'-O-methylcytidine-3'-phosphate
  modified_base 16: mod_base = OTHER; note = 2'-fluoroguanosine-3'-phosphate
  modified_base 17: mod_base = OTHER; note = 2'-O-methyladenosine-3'-phosphate
  modified_base 18: mod_base = OTHER; note = 2'-O-methyluridine-3'-phosphate
  modified_base 19: mod_base = OTHER; note = 2'-O-methyluridine-3'-phosphate
  modified_base 20: mod_base = OTHER; note = 2'-O-methylguanosine-3'-phosphate
  modified_base 21: mod_base = OTHER; note = 2'-O-methyluridine-3'-phosphorothioate
  modified_base 22: mod_base = OTHER; note = 2'-O-methylguanosine-3'-phosphorothioate
  modified_base 23: mod_base = OTHER; note = 2'-O-methyladenosine-3'-phosphate
ttgtggcatgtatacgattgtga

SEQ ID NO: 4263 - RNA, 23 nt, synthetic construct
  source 1..23: mol_type = other RNA
  modified_base 1: mod_base = OTHER; note = Vinyl-phosphonate 2'-O-methyluridine-3'-phosphorothioate
  modified_base 2: mod_base = OTHER; note = 2'-fluoroadenosine-3'-phosphorothioate
  modified_base 3: mod_base = OTHER; note = 2'-O-methylguanosine-3'-phosphate
  modified_base 4: mod_base = OTHER; note = 2'-O-methyluridine-3'-phosphate
  modified_base 5: mod_base = OTHER; note = 2'-O-methyluridine-3'-phosphate
  modified_base 6: mod_base = OTHER; note = 2'-fluoroguanosine-3'-phosphate
  modified_base 7: mod_base = OTHER; note = 2'-O-methylcytidine-3'-phosphate
  modified_base 8: mod_base = OTHER; note = 2'-fluorouridine-3'-phosphate
  modified_base 9: mod_base = OTHER; note = 2'-fluorocytidine-3'-phosphate
  modified_base 10: mod_base = OTHER; note = 2'-O-methyladenosine-3'-phosphate
  modified_base 11: mod_base = OTHER; note = 2'-O-methyluridine-3'-phosphate
  modified_base 12: mod_base = OTHER; note = 2'-O-methylcytidine-3'-phosphate
  modified_base 13: mod_base = OTHER; note = 2'-O-methyluridine-3'-phosphate
  modified_base 14: mod_base = OTHER; note = 2'-fluorouridine-3'-phosphate
  modified_base 15: mod_base = OTHER; note = 2'-O-methyluridine-3'-phosphate
  modified_base 16: mod_base = OTHER; note = 2'-fluorouridine-3'-phosphate
  modified_base 17: mod_base = OTHER; note = 2'-O-methylcytidine-3'-phosphate
  modified_base 18: mod_base = OTHER; note = 2'-O-methyluridine-3'-phosphate
  modified_base 19: mod_base = OTHER; note = 2'-O-methyladenosine-3'-phosphate
  modified_base 20: mod_base = OTHER; note = 2'-O-methyluridine-3'-phosphate
  modified_base 21: mod_base = OTHER; note = 2'-O-methyluridine-3'-phosphorothioate
  modified_base 22: mod_base = OTHER; note = 2'-O-methyladenosine-3'-phosphorothioate
  modified_base 23: mod_base = OTHER; note = 2'-O-methyladenosine-3'-phosphate
tagttgctcatcttttctattaa

SEQ ID NO: 4264 - RNA, 23 nt, synthetic construct
  source 1..23: mol_type = other RNA
  modified_base 1: mod_base = OTHER; note = Vinyl-phosphonate 2'-O-methyluridine-3'-phosphorothioate
  modified_base 2: mod_base = OTHER; note = 2'-fluorocytidine-3'-phosphorothioate
  modified_base 3: mod_base = OTHER; note = 2'-O-methyladenosine-3'-phosphate
  modified_base 4: mod_base = OTHER; note = 2'-O-methylguanosine-3'-phosphate
  modified_base 5: mod_base = OTHER; note = 2'-O-methylcytidine-3'-phosphate
  modified_base 6: mod_base = OTHER; note = 2'-fluorocytidine-3'-phosphate
  modified_base 7: mod_base = OTHER; note = 2'-O-methyladenosine-3'-phosphate
  modified_base 8: mod_base = OTHER; note = 2'-fluorouridine-3'-phosphate
  modified_base 9: mod_base = OTHER; note = 2'-fluoroguanosine-3'-phosphate
  modified_base 10: mod_base = OTHER; note = 2'-O-methylguanosine-3'-phosphate
  modified_base 11: mod_base = OTHER; note = 2'-O-methyladenosine-3'-phosphate
  modified_base 12: mod_base = OTHER; note = 2'-O-methyladenosine-3'-phosphate
  modified_base 13: mod_base = OTHER; note = 2'-O-methylcytidine-3'-phosphate
  modified_base 14: mod_base = OTHER; note = 2'-fluoroadenosine-3'-phosphate
  modified_base 15: mod_base = OTHER; note = 2'-O-methyluridine-3'-phosphate
  modified_base 16: mod_base = OTHER; note = 2'-fluoroadenosine-3'-phosphate
  modified_base 17: mod_base = OTHER; note = 2'-O-methyladenosine-3'-phosphate
  modified_base 18: mod_base = OTHER; note = 2'-O-methylguanosine-3'-phosphate
  modified_base 19: mod_base = OTHER; note = 2'-O-methyladenosine-3'-phosphate
  modified_base 20: mod_base = OTHER; note = 2'-O-methyluridine-3'-phosphate
  modified_base 21: mod_base = OTHER; note = 2'-O-methyladenosine-3'-phosphorothioate
  modified_base 22: mod_base = OTHER; note = 2'-O-methyladenosine-3'-phosphorothioate
  modified_base 23: mod_base = OTHER; note = 2'-O-methylguanosine-3'-phosphate
tcagccatggaacataagataag

SEQ ID NO: 4265 - RNA, 23 nt, synthetic construct
  source 1..23: mol_type = other RNA
  modified_base 1: mod_base = OTHER; note = Vinyl-phosphonate 2'-O-methyluridine-3'-phosphorothioate
  modified_base 2: mod_base = OTHER; note = 2'-fluorouridine -3'-phosphorothioate
  modified_base 3: mod_base = OTHER; note = 2'-O-methylcytidine-3'-phosphate
  modified_base 4: mod_base = OTHER; note = 2'-O-methyladenosine-3'-phosphate
  modified_base 5: mod_base = OTHER; note = 2'-O-methylcytidine-3'-phosphate
  modified_base 6: mod_base = OTHER; note = 2'-fluoroguanosine-3'-phosphate
  modified_base 7: mod_base = OTHER; note = 2'-O-methylcytidine-3'-phosphate
  modified_base 8: mod_base = OTHER; note = 2'-fluoroadenosine-3'-phosphate
  modified_base 9: mod_base = OTHER; note = 2'-fluoroguanosine-3'-phosphate
  modified_base 10: mod_base = OTHER; note = 2'-O-methylcytidine-3'-phosphate
  modified_base 11: mod_base = OTHER; note = 2'-O-methyluridine-3'-phosphate
  modified_base 12: mod_base = OTHER; note = 2'-O-methylcytidine-3'-phosphate
  modified_base 13: mod_base = OTHER; note = 2'-O-methyluridine-3'-phosphate
  modified_base 14: mod_base = OTHER; note = 2'-fluorouridine-3'-phosphate
  modified_base 15: mod_base = OTHER; note = 2'-O-methylcytidine-3'-phosphate
  modified_base 16: mod_base = OTHER; note = 2'-fluoroadenosine-3'-phosphate
  modified_base 17: mod_base = OTHER; note = 2'-O-methylcytidine-3'-phosphate
  modified_base 18: mod_base = OTHER; note = 2'-O-methylguanosine-3'-phosphate
  modified_base 19: mod_base = OTHER; note = 2'-O-methyluridine-3'-phosphate
  modified_base 20: mod_base = OTHER; note = 2'-O-methyladenosine-3'-phosphate
  modified_base 21: mod_base = OTHER; note = 2'-O-methylguanosine-3'-phosphorothioate
  modified_base 22: mod_base = OTHER; note = 2'-O-methylcytidine-3'-phosphorothioate
  modified_base 23: mod_base = OTHER; note = 2'-O-methylcytidine-3'-phosphate
ttcacgcagctcttcacgtagcc

SEQ ID NO: 4266 - RNA, 23 nt, synthetic construct
  source 1..23: mol_type = other RNA
  modified_base 1: mod_base = OTHER; note = Vinyl-phosphonate 2'-O-methyluridine-3'-phosphorothioate
  modified_base 2: mod_base = OTHER; note = 2'-fluoroadenosine-3'-phosphorothioate
  modified_base 3: mod_base = OTHER; note = 2'-O-methylcytidine-3'-phosphate
  modified_base 4: mod_base = OTHER; note = 2'-O-methylguanosine-3'-phosphate
  modified_base 5: mod_base = OTHER; note = 2'-O-methyluridine-3'-phosphate
  modified_base 6: mod_base = OTHER; note = 2'-fluoroadenosine-3'-phosphate
  modified_base 7: mod_base = OTHER; note = 2'-O-methyluridine-3'-phosphate
  modified_base 8: mod_base = OTHER; note = 2'-fluoroadenosine-3'-phosphate
  modified_base 9: mod_base = OTHER; note = 2'-fluoroguanosine-3'-phosphate
  modified_base 10: mod_base = OTHER; note = 2'-O-methyladenosine-3'-phosphate
  modified_base 11: mod_base = OTHER; note = 2'-O-methylguanosine-3'-phosphate
  modified_base 12: mod_base = OTHER; note = 2'-O-methylcytidine-3'-phosphate
  modified_base 13: mod_base = OTHER; note = 2'-O-methylcytidine-3'-phosphate
  modified_base 14: mod_base = OTHER; note = 2'-fluoroadenosine-3'-phosphate
  modified_base 15: mod_base = OTHER; note = 2'-O-methyluridine-3'-phosphate
  modified_base 16: mod_base = OTHER; note = 2'-fluorocytidine-3'-phosphate
  modified_base 17: mod_base = OTHER; note = 2'-O-methyladenosine-3'-phosphate
  modified_base 18: mod_base = OTHER; note = 2'-O-methyladenosine-3'-phosphate
  modified_base 19: mod_base = OTHER; note = 2'-O-methyluridine-3'-phosphate
  modified_base 20: mod_base = OTHER; note = 2'-O-methyluridine-3'-phosphate
  modified_base 21: mod_base = OTHER; note = 2'-O-methylcytidine-3'-phosphorothioate
  modified_base 22: mod_base = OTHER; note = 2'-O-methyluridine-3'-phosphorothioate
  modified_base 23: mod_base = OTHER; note = 2'-O-methyladenosine-3'-phosphate
tacgtatagagccatcaattcta

SEQ ID NO: 4267 - RNA, 23 nt, synthetic construct
  source 1..23: mol_type = other RNA
  modified_base 1: mod_base = OTHER; note = Vinyl-phosphonate 2'-O-methyluridine-3'-phosphorothioate
  modified_base 2: mod_base = OTHER; note = 2'-fluorouridine -3'-phosphorothioate
  modified_base 3: mod_base = OTHER; note = 2'-O-methylguanosine-3'-phosphate
  modified_base 4: mod_base = OTHER; note = 2'-O-methylcytidine-3'-phosphate
  modified_base 5: mod_base = OTHER; note = 2'-O-methylcytidine-3'-phosphate
  modified_base 6: mod_base = OTHER; note = 2'-fluorouridine-3'-phosphate
  modified_base 7: mod_base = OTHER; note = 2'-O-methylcytidine-3'-phosphate
  modified_base 8: mod_base = OTHER; note = 2'-fluorouridine-3'-phosphate
  modified_base 9: mod_base = OTHER; note = 2'-fluorouridine-3'-phosphate
  modified_base 10: mod_base = OTHER; note = 2'-O-methylcytidine-3'-phosphate
  modified_base 11: mod_base = OTHER; note = 2'-O-methyladenosine-3'-phosphate
  modified_base 12: mod_base = OTHER; note = 2'-O-methyladenosine-3'-phosphate
  modified_base 13: mod_base = OTHER; note = 2'-O-methyluridine-3'-phosphate
  modified_base 14: mod_base = OTHER; note = 2'-fluorouridine-3'-phosphate
  modified_base 15: mod_base = OTHER; note = 2'-O-methyladenosine-3'-phosphate
  modified_base 16: mod_base = OTHER; note = 2'-fluorocytidine-3'-phosphate
  modified_base 17: mod_base = OTHER; note = 2'-O-methylcytidine-3'-phosphate
  modified_base 18: mod_base = OTHER; note = 2'-O-methyluridine-3'-phosphate
  modified_base 19: mod_base = OTHER; note = 2'-O-methylguanosine-3'-phosphate
  modified_base 20: mod_base = OTHER; note = 2'-O-methyladenosine-3'-phosphate
  modified_base 21: mod_base = OTHER; note = 2'-O-methyladenosine-3'-phosphorothioate
  modified_base 22: mod_base = OTHER; note = 2'-O-methyluridine-3'-phosphorothioate
  modified_base 23: mod_base = OTHER; note = 2'-O-methylcytidine-3'-phosphate
ttgcctcttcaattacctgaatc

SEQ ID NO: 4268 - RNA, 23 nt, synthetic construct
  source 1..23: mol_type = other RNA
  modified_base 1: mod_base = OTHER; note = Vinyl-phosphonate 2'-O-methyluridine-3'-phosphorothioate
  modified_base 2: mod_base = OTHER; note = 2'-fluoroadenosine-3'-phosphorothioate
  modified_base 3: mod_base = OTHER; note = 2'-O-methylcytidine-3'-phosphate
  modified_base 4: mod_base = OTHER; note = 2'-O-methyladenosine-3'-phosphate
  modified_base 5: mod_base = OTHER; note = 2'-O-methyladenosine-3'-phosphate
  modified_base 6: mod_base = OTHER; note = 2'-fluoroadenosine-3'-phosphate
  modified_base 7: mod_base = OTHER; note = 2'-O-methylguanosine-3'-phosphate
  modified_base 8: mod_base = OTHER; note = 2'-fluoroguanosine-3'-phosphate
  modified_base 9: mod_base = OTHER; note = 2'-fluorouridine-3'-phosphate
  modified_base 10: mod_base = OTHER; note = 2'-O-methylcytidine-3'-phosphate
  modified_base 11: mod_base = OTHER; note = 2'-O-methyladenosine-3'-phosphate
  modified_base 12: mod_base = OTHER; note = 2'-O-methylcytidine-3'-phosphate
  modified_base 13: mod_base = OTHER; note = 2'-O-methyluridine-3'-phosphate
  modified_base 14: mod_base = OTHER; note = 2'-fluorocytidine-3'-phosphate
  modified_base 15: mod_base = OTHER; note = 2'-O-methyladenosine-3'-phosphate
  modified_base 16: mod_base = OTHER; note = 2'-fluoroguanosine-3'-phosphate
  modified_base 17: mod_base = OTHER; note = 2'-O-methyluridine-3'-phosphate
  modified_base 18: mod_base = OTHER; note = 2'-O-methylcytidine-3'-phosphate
  modified_base 19: mod_base = OTHER; note = 2'-O-methylcytidine-3'-phosphate
  modified_base 20: mod_base = OTHER; note = 2'-O-methyluridine-3'-phosphate
  modified_base 21: mod_base = OTHER; note = 2'-O-methyluridine-3'-phosphorothioate
  modified_base 22: mod_base = OTHER; note = 2'-O-methylcytidine-3'-phosphorothioate
  modified_base 23: mod_base = OTHER; note = 2'-O-methyladenosine-3'-phosphate
tacaaaggtcactcagtccttca

SEQ ID NO: 4269 - RNA, 23 nt, synthetic construct
  source 1..23: mol_type = other RNA
  modified_base 1: mod_base = OTHER; note = Vinyl-phosphonate 2'-O-methyluridine-3'-phosphorothioate
  modified_base 2: mod_base = OTHER; note = 2'-fluoroadenosine-3'-phosphorothioate
  modified_base 3: mod_base = OTHER; note = 2'-O-methylguanosine-3'-phosphate
  modified_base 4: mod_base = OTHER; note = 2'-O-methylcytidine-3'-phosphate
  modified_base 5: mod_base = OTHER; note = 2'-O-methylcytidine-3'-phosphate
  modified_base 6: mod_base = OTHER; note = 2'-fluoroguanosine-3'-phosphate
  modified_base 7: mod_base = OTHER; note = 2'-O-methyluridine-3'-phosphate
  modified_base 8: mod_base = OTHER; note = 2'-fluorouridine-3'-phosphate
  modified_base 9: mod_base = OTHER; note = 2'-fluorocytidine-3'-phosphate
  modified_base 10: mod_base = OTHER; note = 2'-O-methylcytidine-3'-phosphate
  modified_base 11: mod_base = OTHER; note = 2'-O-methyluridine-3'-phosphate
  modified_base 12: mod_base = OTHER; note = 2'-O-methylcytidine-3'-phosphate
  modified_base 13: mod_base = OTHER; note = 2'-O-methyladenosine-3'-phosphate
  modified_base 14: mod_base = OTHER; note = 2'-fluoroguanosine-3'-phosphate
  modified_base 15: mod_base = OTHER; note = 2'-O-methyladenosine-3'-phosphate
  modified_base 16: mod_base = OTHER; note = 2'-fluorocytidine-3'-phosphate
  modified_base 17: mod_base = OTHER; note = 2'-O-methyluridine-3'-phosphate
  modified_base 18: mod_base = OTHER; note = 2'-O-methylcytidine-3'-phosphate
  modified_base 19: mod_base = OTHER; note = 2'-O-methyluridine-3'-phosphate
  modified_base 20: mod_base = OTHER; note = 2'-O-methylcytidine-3'-phosphate
  modified_base 21: mod_base = OTHER; note = 2'-O-methylguanosine-3'-phosphorothioate
  modified_base 22: mod_base = OTHER; note = 2'-O-methylguanosine-3'-phosphorothioate
  modified_base 23: mod_base = OTHER; note = 2'-O-methylguanosine-3'-phosphate
tagccgttcctcagactctcggg

SEQ ID NO: 4270 - RNA, 23 nt, synthetic construct
  source 1..23: mol_type = other RNA
  modified_base 1: mod_base = OTHER; note = Vinyl-phosphonate 2'-O-methyluridine-3'-phosphorothioate
  modified_base 2: mod_base = OTHER; note = 2'-fluoroadenosine-3'-phosphorothioate
  modified_base 3: mod_base = OTHER; note = 2'-O-methyladenosine-3'-phosphate
  modified_base 4: mod_base = OTHER; note = 2'-O-methylguanosine-3'-phosphate
  modified_base 5: mod_base = OTHER; note = 2'-O-methyluridine-3'-phosphate
  modified_base 6: mod_base = OTHER; note = 2'-fluorocytidine-3'-phosphate
  modified_base 7: mod_base = OTHER; note = 2'-O-methylcytidine-3'-phosphate
  modified_base 8: mod_base = OTHER; note = 2'-fluorocytidine-3'-phosphate
  modified_base 9: mod_base = OTHER; note = 2'-fluoroadenosine-3'-phosphate
  modified_base 10: mod_base = OTHER; note = 2'-O-methyladenosine-3'-phosphate
  modified_base 11: mod_base = OTHER; note = 2'-O-methyluridine-3'-phosphate
  modified_base 12: mod_base = OTHER; note = 2'-O-methylcytidine-3'-phosphate
  modified_base 13: mod_base = OTHER; note = 2'-O-methylcytidine-3'-phosphate
  modified_base 14: mod_base = OTHER; note = 2'-fluorocytidine-3'-phosphate
  modified_base 15: mod_base = OTHER; note = 2'-O-methyladenosine-3'-phosphate
  modified_base 16: mod_base = OTHER; note = 2'-fluoroadenosine-3'-phosphate
  modified_base 17: mod_base = OTHER; note = 2'-O-methyladenosine-3'-phosphate
  modified_base 18: mod_base = OTHER; note = 2'-O-methylguanosine-3'-phosphate
  modified_base 19: mod_base = OTHER; note = 2'-O-methyladenosine-3'-phosphate
  modified_base 20: mod_base = OTHER; note = 2'-O-methyladenosine-3'-phosphate
  modified_base 21: mod_base = OTHER; note = 2'-O-methyluridine-3'-phosphorothioate
  modified_base 22: mod_base = OTHER; note = 2'-O-methylcytidine-3'-phosphorothioate
  modified_base 23: mod_base = OTHER; note = 2'-O-methyladenosine-3'-phosphate
taagtcccaatcccaaagaatca

SEQ ID NO: 4271 - RNA, 23 nt, synthetic construct
  source 1..23: mol_type = other RNA
  modified_base 1: mod_base = OTHER; note = Vinyl-phosphonate 2'-O-methyluridine-3'-phosphorothioate
  modified_base 2: mod_base = OTHER; note = 2'-fluorouridine -3'-phosphorothioate
  modified_base 3: mod_base = OTHER; note = 2'-O-methyluridine-3'-phosphate
  modified_base 4: mod_base = OTHER; note = 2'-O-methylcytidine-3'-phosphate
  modified_base 5: mod_base = OTHER; note = 2'-O-methyluridine-3'-phosphate
  modified_base 6: mod_base = OTHER; note = 2'-fluoroadenosine-3'-phosphate
  modified_base 7: mod_base = OTHER; note = 2'-O-methyladenosine-3'-phosphate
  modified_base 8: mod_base = OTHER; note = 2'-fluorocytidine-3'-phosphate
  modified_base 9: mod_base = OTHER; note = 2'-fluorocytidine-3'-phosphate
  modified_base 10: mod_base = OTHER; note = 2'-O-methyladenosine-3'-phosphate
  modified_base 11: mod_base = OTHER; note = 2'-O-methylcytidine-3'-phosphate
  modified_base 12: mod_base = OTHER; note = 2'-O-methyluridine-3'-phosphate
  modified_base 13: mod_base = OTHER; note = 2'-O-methylguanosine-3'-phosphate
  modified_base 14: mod_base = OTHER; note = 2'-fluoroadenosine-3'-phosphate
  modified_base 15: mod_base = OTHER; note = 2'-O-methylcytidine-3'-phosphate
  modified_base 16: mod_base = OTHER; note = 2'-fluorocytidine-3'-phosphate
  modified_base 17: mod_base = OTHER; note = 2'-O-methyluridine-3'-phosphate
  modified_base 18: mod_base = OTHER; note = 2'-O-methylguanosine-3'-phosphate
  modified_base 19: mod_base = OTHER; note = 2'-O-methylguanosine-3'-phosphate
  modified_base 20: mod_base = OTHER; note = 2'-O-methyluridine-3'-phosphate
  modified_base 21: mod_base = OTHER; note = 2'-O-methyladenosine-3'-phosphorothioate
  modified_base 22: mod_base = OTHER; note = 2'-O-methylguanosine-3'-phosphorothioate
  modified_base 23: mod_base = OTHER; note = 2'-O-methylcytidine-3'-phosphate
tttctaaccactgacctggtagc

SEQ ID NO: 4272 - RNA, 23 nt, synthetic construct
  source 1..23: mol_type = other RNA
  modified_base 1: mod_base = OTHER; note = Vinyl-phosphonate 2'-O-methyluridine-3'-phosphorothioate
  modified_base 2: mod_base = OTHER; note = 2'-fluorouridine -3'-phosphorothioate
  modified_base 3: mod_base = OTHER; note = 2'-O-methylguanosine-3'-phosphate
  modified_base 4: mod_base = OTHER; note = 2'-O-methyluridine-3'-phosphate
  modified_base 5: mod_base = OTHER; note = 2'-O-methylcytidine-3'-phosphate
  modified_base 6: mod_base = OTHER; note = 2'-fluorocytidine-3'-phosphate
  modified_base 7: mod_base = OTHER; note = 2'-O-methyladenosine-3'-phosphate
  modified_base 8: mod_base = OTHER; note = 2'-fluorouridine-3'-phosphate
  modified_base 9: mod_base = OTHER; note = 2'-fluoroguanosine-3'-phosphate
  modified_base 10: mod_base = OTHER; note = 2'-O-methylguanosine-3'-phosphate
  modified_base 11: mod_base = OTHER; note = 2'-O-methylcytidine-3'-phosphate
  modified_base 12: mod_base = OTHER; note = 2'-O-methyladenosine-3'-phosphate
  modified_base 13: mod_base = OTHER; note = 2'-O-methyladenosine-3'-phosphate
  modified_base 14: mod_base = OTHER; note = 2'-fluoroadenosine-3'-phosphate
  modified_base 15: mod_base = OTHER; note = 2'-O-methylcytidine-3'-phosphate
  modified_base 16: mod_base = OTHER; note = 2'-fluorocytidine-3'-phosphate
  modified_base 17: mod_base = OTHER; note = 2'-O-methyluridine-3'-phosphate
  modified_base 18: mod_base = OTHER; note = 2'-O-methylguanosine-3'-phosphate
  modified_base 19: mod_base = OTHER; note = 2'-O-methyladenosine-3'-phosphate
  modified_base 20: mod_base = OTHER; note = 2'-O-methyladenosine-3'-phosphate
  modified_base 21: mod_base = OTHER; note = 2'-O-methyluridine-3'-phosphorothioate
  modified_base 22: mod_base = OTHER; note = 2'-O-methyladenosine-3'-phosphorothioate
  modified_base 23: mod_base = OTHER; note = 2'-O-methylcytidine-3'-phosphate
ttgtccatggcaaacctgaatac

SEQ ID NO: 4273 - RNA, 23 nt, synthetic construct
  source 1..23: mol_type = other RNA
  modified_base 1: mod_base = OTHER; note = Vinyl-phosphonate 2'-O-methyluridine-3'-phosphorothioate
  modified_base 2: mod_base = OTHER; note = 2'-fluorouridine -3'-phosphorothioate
  modified_base 3: mod_base = OTHER; note = 2'-O-methylcytidine-3'-phosphate
  modified_base 4: mod_base = OTHER; note = 2'-O-methylcytidine-3'-phosphate
  modified_base 5: mod_base = OTHER; note = 2'-O-methyladenosine-3'-phosphate
  modified_base 6: mod_base = OTHER; note = 2'-fluoroguanosine-3'-phosphate
  modified_base 7: mod_base = OTHER; note = 2'-O-methylguanosine-3'-phosphate
  modified_base 8: mod_base = OTHER; note = 2'-fluoroadenosine-3'-phosphate
  modified_base 9: mod_base = OTHER; note = 2'-fluorocytidine-3'-phosphate
  modified_base 10: mod_base = OTHER; note = 2'-O-methylcytidine-3'-phosphate
  modified_base 11: mod_base = OTHER; note = 2'-O-methyladenosine-3'-phosphate
  modified_base 12: mod_base = OTHER; note = 2'-O-methylguanosine-3'-phosphate
  modified_base 13: mod_base = OTHER; note = 2'-O-methyluridine-3'-phosphate
  modified_base 14: mod_base = OTHER; note = 2'-fluorouridine-3'-phosphate
  modified_base 15: mod_base = OTHER; note = 2'-O-methyluridine-3'-phosphate
  modified_base 16: mod_base = OTHER; note = 2'-fluoroadenosine-3'-phosphate
  modified_base 17: mod_base = OTHER; note = 2'-O-methylguanosine-3'-phosphate
  modified_base 18: mod_base = OTHER; note = 2'-O-methylcytidine-3'-phosphate
  modified_base 19: mod_base = OTHER; note = 2'-O-methyluridine-3'-phosphate
  modified_base 20: mod_base = OTHER; note = 2'-O-methylguanosine-3'-phosphate
  modified_base 21: mod_base = OTHER; note = 2'-O-methylcytidine-3'-phosphorothioate
  modified_base 22: mod_base = OTHER; note = 2'-O-methylcytidine-3'-phosphorothioate
  modified_base 23: mod_base = OTHER; note = 2'-O-methylguanosine-3'-phosphate
ttccaggaccagtttagctgccg

SEQ ID NO: 4274 - RNA, 23 nt, synthetic construct
  source 1..23: mol_type = other RNA
  modified_base 1: mod_base = OTHER; note = Vinyl-phosphonate 2'-O-methyluridine-3'-phosphorothioate
  modified_base 2: mod_base = OTHER; note = 2'-fluorocytidine-3'-phosphorothioate
  modified_base 3: mod_base = OTHER; note = 2'-O-methyluridine-3'-phosphate
  modified_base 4: mod_base = OTHER; note = 2'-O-methylcytidine-3'-phosphate
  modified_base 5: mod_base = OTHER; note = 2'-O-methylcytidine-3'-phosphate
  modified_base 6: mod_base = OTHER; note = 2'-fluoroadenosine-3'-phosphate
  modified_base 7: mod_base = OTHER; note = 2'-O-methyluridine-3'-phosphate
  modified_base 8: mod_base = OTHER; note = 2'-fluorouridine-3'-phosphate
  modified_base 9: mod_base = OTHER; note = 2'-fluorocytidine-3'-phosphate
  modified_base 10: mod_base = OTHER; note = 2'-O-methyluridine-3'-phosphate
  modified_base 11: mod_base = OTHER; note = 2'-O-methyladenosine-3'-phosphate
  modified_base 12: mod_base = OTHER; note = 2'-O-methyluridine-3'-phosphate
  modified_base 13: mod_base = OTHER; note = 2'-O-methylguanosine-3'-phosphate
  modified_base 14: mod_base = OTHER; note = 2'-fluorocytidine-3'-phosphate
  modified_base 15: mod_base = OTHER; note = 2'-O-methylcytidine-3'-phosphate
  modified_base 16: mod_base = OTHER; note = 2'-fluoroadenosine-3'-phosphate
  modified_base 17: mod_base = OTHER; note = 2'-O-methyluridine-3'-phosphate
  modified_base 18: mod_base = OTHER; note = 2'-O-methyluridine-3'-phosphate
  modified_base 19: mod_base = OTHER; note = 2'-O-methyladenosine-3'-phosphate
  modified_base 20: mod_base = OTHER; note = 2'-O-methylcytidine-3'-phosphate
  modified_base 21: mod_base = OTHER; note = 2'-O-methyluridine-3'-phosphorothioate
  modified_base 22: mod_base = OTHER; note = 2'-O-methyladenosine-3'-phosphorothioate
  modified_base 23: mod_base = OTHER; note = 2'-O-methyluridine-3'-phosphate
tctccattctatgccattactat

SEQ ID NO: 4275 - RNA, 23 nt, synthetic construct
  source 1..23: mol_type = other RNA
  modified_base 1: mod_base = OTHER; note = Vinyl-phosphonate 2'-O-methyluridine-3'-phosphorothioate
  modified_base 2: mod_base = OTHER; note = 2'-fluorouridine -3'-phosphorothioate
  modified_base 3: mod_base = OTHER; note = 2'-O-methylguanosine-3'-phosphate
  modified_base 4: mod_base = OTHER; note = 2'-O-methylguanosine-3'-phosphate
  modified_base 5: mod_base = OTHER; note = 2'-O-methyluridine-3'-phosphate
  modified_base 6: mod_base = OTHER; note = 2'-fluorocytidine-3'-phosphate
  modified_base 7: mod_base = OTHER; note = 2'-O-methylcytidine-3'-phosphate
  modified_base 8: mod_base = OTHER; note = 2'-fluoroadenosine-3'-phosphate
  modified_base 9: mod_base = OTHER; note = 2'-fluorouridine-3'-phosphate
  modified_base 10: mod_base = OTHER; note = 2'-O-methyluridine-3'-phosphate
  modified_base 11: mod_base = OTHER; note = 2'-O-methyluridine-3'-phosphate
  modified_base 12: mod_base = OTHER; note = 2'-O-methyluridine-3'-phosphate
  modified_base 13: mod_base = OTHER; note = 2'-O-methylcytidine-3'-phosphate
  modified_base 14: mod_base = OTHER; note = 2'-fluorouridine-3'-phosphate
  modified_base 15: mod_base = OTHER; note = 2'-O-methyluridine-3'-phosphate
  modified_base 16: mod_base = OTHER; note = 2'-fluoroguanosine-3'-phosphate
  modified_base 17: mod_base = OTHER; note = 2'-O-methylcytidine-3'-phosphate
  modified_base 18: mod_base = OTHER; note = 2'-O-methyladenosine-3'-phosphate
  modified_base 19: mod_base = OTHER; note = 2'-O-methyladenosine-3'-phosphate
  modified_base 20: mod_base = OTHER; note = 2'-O-methyluridine-3'-phosphate
  modified_base 21: mod_base = OTHER; note = 2'-O-methyluridine-3'-phosphorothioate
  modified_base 22: mod_base = OTHER; note = 2'-O-methyladenosine-3'-phosphorothioate
  modified_base 23: mod_base = OTHER; note = 2'-O-methyluridine-3'-phosphate
ttggtccattttcttgcaattat

SEQ ID NO: 4276 - RNA, 23 nt, synthetic construct
  source 1..23: mol_type = other RNA
  modified_base 1: mod_base = OTHER; note = Vinyl-phosphonate 2'-O-methyluridine-3'-phosphorothioate
  modified_base 2: mod_base = OTHER; note = 2'-fluoroadenosine-3'-phosphorothioate
  modified_base 3: mod_base = OTHER; note = 2'-O-methylguanosine-3'-phosphate
  modified_base 4: mod_base = OTHER; note = 2'-O-methylcytidine-3'-phosphate
  modified_base 5: mod_base = OTHER; note = 2'-O-methyladenosine-3'-phosphate
  modified_base 6: mod_base = OTHER; note = 2'-fluorocytidine-3'-phosphate
  modified_base 7: mod_base = OTHER; note = 2'-O-methylcytidine-3'-phosphate
  modified_base 8: mod_base = OTHER; note = 2'-fluoroadenosine-3'-phosphate
  modified_base 9: mod_base = OTHER; note = 2'-fluoroguanosine-3'-phosphate
  modified_base 10: mod_base = OTHER; note = 2'-O-methyladenosine-3'-phosphate
  modified_base 11: mod_base = OTHER; note = 2'-O-methyladenosine-3'-phosphate
  modified_base 12: mod_base = OTHER; note = 2'-O-methylcytidine-3'-phosphate
  modified_base 13: mod_base = OTHER; note = 2'-O-methylguanosine-3'-phosphate
  modified_base 14: mod_base = OTHER; note = 2'-fluorocytidine-3'-phosphate
  modified_base 15: mod_base = OTHER; note = 2'-O-methyladenosine-3'-phosphate
  modified_base 16: mod_base = OTHER; note = 2'-fluoroguanosine-3'-phosphate
  modified_base 17: mod_base = OTHER; note = 2'-O-methyluridine-3'-phosphate
  modified_base 18: mod_base = OTHER; note = 2'-O-methylguanosine-3'-phosphate
  modified_base 19: mod_base = OTHER; note = 2'-O-methylcytidine-3'-phosphate
  modified_base 20: mod_base = OTHER; note = 2'-O-methylcytidine-3'-phosphate
  modified_base 21: mod_base = OTHER; note = 2'-O-methylguanosine-3'-phosphorothioate
  modified_base 22: mod_base = OTHER; note = 2'-O-methylguanosine-3'-phosphorothioate
  modified_base 23: mod_base = OTHER; note = 2'-O-methyladenosine-3'-phosphate
tagcaccagaacgcagtgccgga

SEQ ID NO: 4277 - RNA, 23 nt, synthetic construct
  source 1..23: mol_type = other RNA
  modified_base 1: mod_base = OTHER; note = Vinyl-phosphonate 2'-O-methyluridine-3'-phosphorothioate
  modified_base 2: mod_base = OTHER; note = 2'-fluorouridine -3'-phosphorothioate
  modified_base 3: mod_base = OTHER; note = 2'-O-methylguanosine-3'-phosphate
  modified_base 4: mod_base = OTHER; note = 2'-O-methylguanosine-3'-phosphate
  modified_base 5: mod_base = OTHER; note = 2'-O-methylguanosine-3'-phosphate
  modified_base 6: mod_base = OTHER; note = 2'-fluorocytidine-3'-phosphate
  modified_base 7: mod_base = OTHER; note = 2'-O-methyluridine-3'-phosphate
  modified_base 8: mod_base = OTHER; note = 2'-fluorouridine-3'-phosphate
  modified_base 9: mod_base = OTHER; note = 2'-fluorocytidine-3'-phosphate
  modified_base 10: mod_base = OTHER; note = 2'-O-methyluridine-3'-phosphate
  modified_base 11: mod_base = OTHER; note = 2'-O-methyluridine-3'-phosphate
  modified_base 12: mod_base = OTHER; note = 2'-O-methylcytidine-3'-phosphate
  modified_base 13: mod_base = OTHER; note = 2'-O-methyladenosine-3'-phosphate
  modified_base 14: mod_base = OTHER; note = 2'-fluoroadenosine-3'-phosphate
  modified_base 15: mod_base = OTHER; note = 2'-O-methyluridine-3'-phosphate
  modified_base 16: mod_base = OTHER; note = 2'-fluoroadenosine-3'-phosphate
  modified_base 17: mod_base = OTHER; note = 2'-O-methyluridine-3'-phosphate
  modified_base 18: mod_base = OTHER; note = 2'-O-methylguanosine-3'-phosphate
  modified_base 19: mod_base = OTHER; note = 2'-O-methyladenosine-3'-phosphate
  modified_base 20: mod_base = OTHER; note = 2'-O-methylcytidine-3'-phosphate
  modified_base 21: mod_base = OTHER; note = 2'-O-methyluridine-3'-phosphorothioate
  modified_base 22: mod_base = OTHER; note = 2'-O-methyluridine-3'-phosphorothioate
  modified_base 23: mod_base = OTHER; note = 2'-O-methyluridine-3'-phosphate
ttgggcttcttcaatatgacttt

SEQ ID NO: 4278 - RNA, 23 nt, synthetic construct
  source 1..23: mol_type = other RNA
  modified_base 1: mod_base = OTHER; note = Vinyl-phosphonate 2'-O-methyluridine-3'-phosphorothioate
  modified_base 2: mod_base = OTHER; note = 2'-fluoroadenosine-3'-phosphorothioate
  modified_base 3: mod_base = OTHER; note = 2'-O-methyladenosine-3'-phosphate
  modified_base 4: mod_base = OTHER; note = 2'-O-methylguanosine-3'-phosphate
  modified_base 5: mod_base = OTHER; note = 2'-O-methylcytidine-3'-phosphate
  modified_base 6: mod_base = OTHER; note = 2'-fluorouridine-3'-phosphate
  modified_base 7: mod_base = OTHER; note = 2'-O-methylguanosine-3'-phosphate
  modified_base 8: mod_base = OTHER; note = 2'-fluoroadenosine-3'-phosphate
  modified_base 9: mod_base = OTHER; note = 2'-fluorocytidine-3'-phosphate
  modified_base 10: mod_base = OTHER; note = 2'-O-methylguanosine-3'-phosphate
  modified_base 11: mod_base = OTHER; note = 2'-O-methylcytidine-3'-phosphate
  modified_base 12: mod_base = OTHER; note = 2'-O-methyladenosine-3'-phosphate
  modified_base 13: mod_base = OTHER; note = 2'-O-methylguanosine-3'-phosphate
  modified_base 14: mod_base = OTHER; note = 2'-fluorocytidine-3'-phosphate
  modified_base 15: mod_base = OTHER; note = 2'-O-methyladenosine-3'-phosphate
  modified_base 16: mod_base = OTHER; note = 2'-fluorouridine-3'-phosphate
  modified_base 17: mod_base = OTHER; note = 2'-O-methylguanosine-3'-phosphate
  modified_base 18: mod_base = OTHER; note = 2'-O-methyladenosine-3'-phosphate
  modified_base 19: mod_base = OTHER; note = 2'-O-methyluridine-3'-phosphate
  modified_base 20: mod_base = OTHER; note = 2'-O-methylguanosine-3'-phosphate
  modified_base 21: mod_base = OTHER; note = 2'-O-methyladenosine-3'-phosphorothioate
  modified_base 22: mod_base = OTHER; note = 2'-O-methyluridine-3'-phosphorothioate
  modified_base 23: mod_base = OTHER; note = 2'-O-methyluridine-3'-phosphate
taagctgacgcagcatgatgatt

SEQ ID NO: 4279 - RNA, 23 nt, synthetic construct
  source 1..23: mol_type = other RNA
  modified_base 1: mod_base = OTHER; note = Vinyl-phosphonate 2'-O-methyluridine-3'-phosphorothioate
  modified_base 2: mod_base = OTHER; note = 2'-fluoroadenosine-3'-phosphorothioate
  modified_base 3: mod_base = OTHER; note = 2'-O-methyluridine-3'-phosphate
  modified_base 4: mod_base = OTHER; note = 2'-O-methyladenosine-3'-phosphate
  modified_base 5: mod_base = OTHER; note = 2'-O-methylcytidine-3'-phosphate
  modified_base 6: mod_base = OTHER; note = 2'-fluorocytidine-3'-phosphate
  modified_base 7: mod_base = OTHER; note = 2'-O-methyladenosine-3'-phosphate
  modified_base 8: mod_base = OTHER; note = 2'-fluoroadenosine-3'-phosphate
  modified_base 9: mod_base = OTHER; note = 2'-fluoroguanosine-3'-phosphate
  modified_base 10: mod_base = OTHER; note = 2'-O-methyladenosine-3'-phosphate
  modified_base 11: mod_base = OTHER; note = 2'-O-methylguanosine-3'-phosphate
  modified_base 12: mod_base = OTHER; note = 2'-O-methylguanosine-3'-phosphate
  modified_base 13: mod_base = OTHER; note = 2'-O-methylcytidine-3'-phosphate
  modified_base 14: mod_base = OTHER; note = 2'-fluoroguanosine-3'-phosphate
  modified_base 15: mod_base = OTHER; note = 2'-O-methyladenosine-3'-phosphate
  modified_base 16: mod_base = OTHER; note = 2'-fluorouridine-3'-phosphate
  modified_base 17: mod_base = OTHER; note = 2'-O-methylcytidine-3'-phosphate
  modified_base 18: mod_base = OTHER; note = 2'-O-methyladenosine-3'-phosphate
  modified_base 19: mod_base = OTHER; note = 2'-O-methyluridine-3'-phosphate
  modified_base 20: mod_base = OTHER; note = 2'-O-methyluridine-3'-phosphate
  modified_base 21: mod_base = OTHER; note = 2'-O-methyluridine-3'-phosphorothioate
  modified_base 22: mod_base = OTHER; note = 2'-O-methyluridine-3'-phosphorothioate
  modified_base 23: mod_base = OTHER; note = 2'-O-methylcytidine-3'-phosphate
tataccaagaggcgatcattttc

SEQ ID NO: 4280 - RNA, 23 nt, synthetic construct
  source 1..23: mol_type = other RNA
  modified_base 1: mod_base = OTHER; note = Vinyl-phosphonate 2'-O-methyluridine-3'-phosphorothioate
  modified_base 2: mod_base = OTHER; note = 2'-fluorouridine -3'-phosphorothioate
  modified_base 3: mod_base = OTHER; note = 2'-O-methylguanosine-3'-phosphate
  modified_base 4: mod_base = OTHER; note = 2'-O-methylcytidine-3'-phosphate
  modified_base 5: mod_base = OTHER; note = 2'-O-methyluridine-3'-phosphate
  modified_base 6: mod_base = OTHER; note = 2'-fluorocytidine-3'-phosphate
  modified_base 7: mod_base = OTHER; note = 2'-O-methyluridine-3'-phosphate
  modified_base 8: mod_base = OTHER; note = 2'-fluorouridine-3'-phosphate
  modified_base 9: mod_base = OTHER; note = 2'-fluorouridine-3'-phosphate
  modified_base 10: mod_base = OTHER; note = 2'-O-methyladenosine-3'-phosphate
  modified_base 11: mod_base = OTHER; note = 2'-O-methyluridine-3'-phosphate
  modified_base 12: mod_base = OTHER; note = 2'-O-methyladenosine-3'-phosphate
  modified_base 13: mod_base = OTHER; note = 2'-O-methyluridine-3'-phosphate
  modified_base 14: mod_base = OTHER; note = 2'-fluorocytidine-3'-phosphate
  modified_base 15: mod_base = OTHER; note = 2'-O-methyluridine-3'-phosphate
  modified_base 16: mod_base = OTHER; note = 2'-fluorouridine-3'-phosphate
  modified_base 17: mod_base = OTHER; note = 2'-O-methylcytidine-3'-phosphate
  modified_base 18: mod_base = OTHER; note = 2'-O-methyladenosine-3'-phosphate
  modified_base 19: mod_base = OTHER; note = 2'-O-methyladenosine-3'-phosphate
  modified_base 20: mod_base = OTHER; note = 2'-O-methyladenosine-3'-phosphate
  modified_base 21: mod_base = OTHER; note = 2'-O-methyluridine-3'-phosphorothioate
  modified_base 22: mod_base = OTHER; note = 2'-O-methylguanosine-3'-phosphorothioate
  modified_base 23: mod_base = OTHER; note = 2'-O-methyluridine-3'-phosphate
ttgctctttatatcttcaaatgt

SEQ ID NO: 4281 - RNA, 23 nt, synthetic construct
  source 1..23: mol_type = other RNA
  modified_base 1: mod_base = OTHER; note = Vinyl-phosphonate 2'-O-methyluridine-3'-phosphorothioate
  modified_base 2: mod_base = OTHER; note = 2'-fluorocytidine-3'-phosphorothioate
  modified_base 3: mod_base = OTHER; note = 2'-O-methylguanosine-3'-phosphate
  modified_base 4: mod_base = OTHER; note = 2'-O-methyladenosine-3'-phosphate
  modified_base 5: mod_base = OTHER; note = 2'-O-methylguanosine-3'-phosphate
  modified_base 6: mod_base = OTHER; note = 2'-fluoroguanosine-3'-phosphate
  modified_base 7: mod_base = OTHER; note = 2'-O-methylcytidine-3'-phosphate
  modified_base 8: mod_base = OTHER; note = 2'-fluorouridine-3'-phosphate
  modified_base 9: mod_base = OTHER; note = 2'-fluoroguanosine-3'-phosphate
  modified_base 10: mod_base = OTHER; note = 2'-O-methylguanosine-3'-phosphate
  modified_base 11: mod_base = OTHER; note = 2'-O-methyluridine-3'-phosphate
  modified_base 12: mod_base = OTHER; note = 2'-O-methylguanosine-3'-phosphate
  modified_base 13: mod_base = OTHER; note = 2'-O-methyladenosine-3'-phosphate
  modified_base 14: mod_base = OTHER; note = 2'-fluoroadenosine-3'-phosphate
  modified_base 15: mod_base = OTHER; note = 2'-O-methylguanosine-3'-phosphate
  modified_base 16: mod_base = OTHER; note = 2'-fluoroguanosine-3'-phosphate
  modified_base 17: mod_base = OTHER; note = 2'-O-methyladenosine-3'-phosphate
  modified_base 18: mod_base = OTHER; note = 2'-O-methylguanosine-3'-phosphate
  modified_base 19: mod_base = OTHER; note = 2'-O-methyladenosine-3'-phosphate
  modified_base 20: mod_base = OTHER; note = 2'-O-methylcytidine-3'-phosphate
  modified_base 21: mod_base = OTHER; note = 2'-O-methylcytidine-3'-phosphorothioate
  modified_base 22: mod_base = OTHER; note = 2'-O-methylcytidine-3'-phosphorothioate
  modified_base 23: mod_base = OTHER; note = 2'-O-methyladenosine-3'-phosphate
tcgaggctggtgaaggagaccca

SEQ ID NO: 4282 - RNA, 23 nt, synthetic construct
  source 1..23: mol_type = other RNA
  modified_base 1: mod_base = OTHER; note = Vinyl-phosphonate 2'-O-methyluridine-3'-phosphorothioate
  modified_base 2: mod_base = OTHER; note = 2'-fluorocytidine-3'-phosphorothioate
  modified_base 3: mod_base = OTHER; note = 2'-O-methyluridine-3'-phosphate
  modified_base 4: mod_base = OTHER; note = 2'-O-methylguanosine-3'-phosphate
  modified_base 5: mod_base = OTHER; note = 2'-O-methyluridine-3'-phosphate
  modified_base 6: mod_base = OTHER; note = 2'-fluorocytidine-3'-phosphate
  modified_base 7: mod_base = OTHER; note = 2'-O-methyluridine-3'-phosphate
  modified_base 8: mod_base = OTHER; note = 2'-fluorouridine-3'-phosphate
  modified_base 9: mod_base = OTHER; note = 2'-fluorouridine-3'-phosphate
  modified_base 10: mod_base = OTHER; note = 2'-O-methylcytidine-3'-phosphate
  modified_base 11: mod_base = OTHER; note = 2'-O-methyluridine-3'-phosphate
  modified_base 12: mod_base = OTHER; note = 2'-O-methyluridine-3'-phosphate
  modified_base 13: mod_base = OTHER; note = 2'-O-methylcytidine-3'-phosphate
  modified_base 14: mod_base = OTHER; note = 2'-fluorouridine-3'-phosphate
  modified_base 15: mod_base = OTHER; note = 2'-O-methylcytidine-3'-phosphate
  modified_base 16: mod_base = OTHER; note = 2'-fluorouridine-3'-phosphate
  modified_base 17: mod_base = OTHER; note = 2'-O-methylguanosine-3'-phosphate
  modified_base 18: mod_base = OTHER; note = 2'-O-methyluridine-3'-phosphate
  modified_base 19: mod_base = OTHER; note = 2'-O-methyluridine-3'-phosphate
  modified_base 20: mod_base = OTHER; note = 2'-O-methyluridine-3'-phosphate
  modified_base 21: mod_base = OTHER; note = 2'-O-methylcytidine-3'-phosphorothioate
  modified_base 22: mod_base = OTHER; note = 2'-O-methylcytidine-3'-phosphorothioate
  modified_base 23: mod_base = OTHER; note = 2'-O-methyluridine-3'-phosphate
tctgtctttcttctctgtttcct

SEQ ID NO: 4283 - RNA, 23 nt, synthetic construct
  source 1..23: mol_type = other RNA
  modified_base 1: mod_base = OTHER; note = Vinyl-phosphonate 2'-O-methyluridine-3'-phosphorothioate
  modified_base 2: mod_base = OTHER; note = 2'-fluoroguanosine-3'-phosphorothioate
  modified_base 3: mod_base = OTHER; note = 2'-O-methylguanosine-3'-phosphate
  modified_base 4: mod_base = OTHER; note = 2'-O-methylcytidine-3'-phosphate
  modified_base 5: mod_base = OTHER; note = 2'-O-methyladenosine-3'-phosphate
  modified_base 6: mod_base = OTHER; note = 2'-fluorouridine-3'-phosphate
  modified_base 7: mod_base = OTHER; note = 2'-O-methyluridine-3'-phosphate
  modified_base 8: mod_base = OTHER; note = 2'-fluorouridine-3'-phosphate
  modified_base 9: mod_base = OTHER; note = 2'-fluoroguanosine-3'-phosphate
  modified_base 10: mod_base = OTHER; note = 2'-O-methyluridine-3'-phosphate
  modified_base 11: mod_base = OTHER; note = 2'-O-methyladenosine-3'-phosphate
  modified_base 12: mod_base = OTHER; note = 2'-O-methylguanosine-3'-phosphate
  modified_base 13: mod_base = OTHER; note = 2'-O-methylcytidine-3'-phosphate
  modified_base 14: mod_base = OTHER; note = 2'-fluorocytidine-3'-phosphate
  modified_base 15: mod_base = OTHER; note = 2'-O-methyladenosine-3'-phosphate
  modified_base 16: mod_base = OTHER; note = 2'-fluorocytidine-3'-phosphate
  modified_base 17: mod_base = OTHER; note = 2'-O-methyluridine-3'-phosphate
  modified_base 18: mod_base = OTHER; note = 2'-O-methyladenosine-3'-phosphate
  modified_base 19: mod_base = OTHER; note = 2'-O-methylguanosine-3'-phosphate
  modified_base 20: mod_base = OTHER; note = 2'-O-methyladenosine-3'-phosphate
  modified_base 21: mod_base = OTHER; note = 2'-O-methyladenosine-3'-phosphorothioate
  modified_base 22: mod_base = OTHER; note = 2'-O-methyladenosine-3'-phosphorothioate
  modified_base 23: mod_base = OTHER; note = 2'-O-methyluridine-3'-phosphate
tggcatttgtagccactagaaat

SEQ ID NO: 4284 - RNA, 23 nt, synthetic construct
  source 1..23: mol_type = other RNA
  modified_base 1: mod_base = OTHER; note = Vinyl-phosphonate 2'-O-methyluridine-3'-phosphorothioate
  modified_base 2: mod_base = OTHER; note = 2'-fluoroadenosine-3'-phosphorothioate
  modified_base 3: mod_base = OTHER; note = 2'-O-methyluridine-3'-phosphate
  modified_base 4: mod_base = OTHER; note = 2'-O-methylcytidine-3'-phosphate
  modified_base 5: mod_base = OTHER; note = 2'-O-methylcytidine-3'-phosphate
  modified_base 6: mod_base = OTHER; note = 2'-fluorouridine-3'-phosphate
  modified_base 7: mod_base = OTHER; note = 2'-O-methyluridine-3'-phosphate
  modified_base 8: mod_base = OTHER; note = 2'-fluorocytidine-3'-phosphate
  modified_base 9: mod_base = OTHER; note = 2'-fluorocytidine-3'-phosphate
  modified_base 10: mod_base = OTHER; note = 2'-O-methyluridine-3'-phosphate
  modified_base 11: mod_base = OTHER; note = 2'-O-methylguanosine-3'-phosphate
  modified_base 12: mod_base = OTHER; note = 2'-O-methyladenosine-3'-phosphate
  modified_base 13: mod_base = OTHER; note = 2'-O-methyluridine-3'-phosphate
  modified_base 14: mod_base = OTHER; note = 2'-fluorouridine-3'-phosphate
  modified_base 15: mod_base = OTHER; note = 2'-O-methyluridine-3'-phosphate
  modified_base 16: mod_base = OTHER; note = 2'-fluorocytidine-3'-phosphate
  modified_base 17: mod_base = OTHER; note = 2'-O-methyluridine-3'-phosphate
  modified_base 18: mod_base = OTHER; note = 2'-O-methylcytidine-3'-phosphate
  modified_base 19: mod_base = OTHER; note = 2'-O-methyluridine-3'-phosphate
  modified_base 20: mod_base = OTHER; note = 2'-O-methylcytidine-3'-phosphate
  modified_base 21: mod_base = OTHER; note = 2'-O-methylcytidine-3'-phosphorothioate
  modified_base 22: mod_base = OTHER; note = 2'-O-methylcytidine-3'-phosphorothioate
  modified_base 23: mod_base = OTHER; note = 2'-O-methyladenosine-3'-phosphate
tatccttcctgatttctctccca

SEQ ID NO: 4285 - RNA, 23 nt, synthetic construct
  source 1..23: mol_type = other RNA
  modified_base 1: mod_base = OTHER; note = Vinyl-phosphonate 2'-O-methyluridine-3'-phosphorothioate
  modified_base 2: mod_base = OTHER; note = 2'-fluorouridine -3'-phosphorothioate
  modified_base 3: mod_base = OTHER; note = 2'-O-methylcytidine-3'-phosphate
  modified_base 4: mod_base = OTHER; note = 2'-O-methylcytidine-3'-phosphate
  modified_base 5: mod_base = OTHER; note = 2'-O-methyluridine-3'-phosphate
  modified_base 6: mod_base = OTHER; note = 2'-fluorouridine-3'-phosphate
  modified_base 7: mod_base = OTHER; note = 2'-O-methyluridine-3'-phosphate
  modified_base 8: mod_base = OTHER; note = 2'-fluoroadenosine-3'-phosphate
  modified_base 9: mod_base = OTHER; note = 2'-fluoroguanosine-3'-phosphate
  modified_base 10: mod_base = OTHER; note = 2'-O-methylguanosine-3'-phosphate
  modified_base 11: mod_base = OTHER; note = 2'-O-methylguanosine-3'-phosphate
  modified_base 12: mod_base = OTHER; note = 2'-O-methylcytidine-3'-phosphate
  modified_base 13: mod_base = OTHER; note = 2'-O-methyluridine-3'-phosphate
  modified_base 14: mod_base = OTHER; note = 2'-fluorocytidine-3'-phosphate
  modified_base 15: mod_base = OTHER; note = 2'-O-methyladenosine-3'-phosphate
  modified_base 16: mod_base = OTHER; note = 2'-fluorocytidine-3'-phosphate
  modified_base 17: mod_base = OTHER; note = 2'-O-methyluridine-3'-phosphate
  modified_base 18: mod_base = OTHER; note = 2'-O-methyladenosine-3'-phosphate
  modified_base 19: mod_base = OTHER; note = 2'-O-methyluridine-3'-phosphate
  modified_base 20: mod_base = OTHER; note = 2'-O-methyladenosine-3'-phosphate
  modified_base 21: mod_base = OTHER; note = 2'-O-methyluridine-3'-phosphorothioate
  modified_base 22: mod_base = OTHER; note = 2'-O-methyluridine-3'-phosphorothioate
  modified_base 23: mod_base = OTHER; note = 2'-O-methyluridine-3'-phosphate
ttcctttagggctcactatattt

SEQ ID NO: 4286 - RNA, 23 nt, synthetic construct
  source 1..23: mol_type = other RNA
  modified_base 1: mod_base = OTHER; note = Vinyl-phosphonate 2'-O-methyluridine-3'-phosphorothioate
  modified_base 2: mod_base = OTHER; note = 2'-fluoroadenosine-3'-phosphorothioate
  modified_base 3: mod_base = OTHER; note = 2'-O-methylguanosine-3'-phosphate
  modified_base 4: mod_base = OTHER; note = 2'-O-methylguanosine-3'-phosphate
  modified_base 5: mod_base = OTHER; note = 2'-O-methylguanosine-3'-phosphate
  modified_base 6: mod_base = OTHER; note = 2'-fluorocytidine-3'-phosphate
  modified_base 7: mod_base = OTHER; note = 2'-O-methylguanosine-3'-phosphate
  modified_base 8: mod_base = OTHER; note = 2'-fluoroadenosine-3'-phosphate
  modified_base 9: mod_base = OTHER; note = 2'-fluoroguanosine-3'-phosphate
  modified_base 10: mod_base = OTHER; note = 2'-O-methylguanosine-3'-phosphate
  modified_base 11: mod_base = OTHER; note = 2'-O-methyladenosine-3'-phosphate
  modified_base 12: mod_base = OTHER; note = 2'-O-methylcytidine-3'-phosphate
  modified_base 13: mod_base = OTHER; note = 2'-O-methyladenosine-3'-phosphate
  modified_base 14: mod_base = OTHER; note = 2'-fluoroadenosine-3'-phosphate
  modified_base 15: mod_base = OTHER; note = 2'-O-methyladenosine-3'-phosphate
  modified_base 16: mod_base = OTHER; note = 2'-fluoroguanosine-3'-phosphate
  modified_base 17: mod_base = OTHER; note = 2'-O-methylguanosine-3'-phosphate
  modified_base 18: mod_base = OTHER; note = 2'-O-methylcytidine-3'-phosphate
  modified_base 19: mod_base = OTHER; note = 2'-O-methyladenosine-3'-phosphate
  modified_base 20: mod_base = OTHER; note = 2'-O-methylguanosine-3'-phosphate
  modified_base 21: mod_base = OTHER; note = 2'-O-methylcytidine-3'-phosphorothioate
  modified_base 22: mod_base = OTHER; note = 2'-O-methylcytidine-3'-phosphorothioate
  modified_base 23: mod_base = OTHER; note = 2'-O-methyladenosine-3'-phosphate
tagggcgaggacaaaggcagcca

SEQ ID NO: 4287 - RNA, 23 nt, synthetic construct
  source 1..23: mol_type = other RNA
  modified_base 1: mod_base = OTHER; note = Vinyl-phosphonate 2'-O-methyluridine-3'-phosphorothioate
  modified_base 2: mod_base = OTHER; note = 2'-fluorouridine -3'-phosphorothioate
  modified_base 3: mod_base = OTHER; note = 2'-O-methylcytidine-3'-phosphate
  modified_base 4: mod_base = OTHER; note = 2'-O-methyluridine-3'-phosphate
  modified_base 5: mod_base = OTHER; note = 2'-O-methyluridine-3'-phosphate
  modified_base 6: mod_base = OTHER; note = 2'-fluoroguanosine-3'-phosphate
  modified_base 7: mod_base = OTHER; note = 2'-O-methylguanosine-3'-phosphate
  modified_base 8: mod_base = OTHER; note = 2'-fluorouridine-3'-phosphate
  modified_base 9: mod_base = OTHER; note = 2'-fluoroguanosine-3'-phosphate
  modified_base 10: mod_base = OTHER; note = 2'-O-methyladenosine-3'-phosphate
  modified_base 11: mod_base = OTHER; note = 2'-O-methylguanosine-3'-phosphate
  modified_base 12: mod_base = OTHER; note = 2'-O-methylguanosine-3'-phosphate
  modified_base 13: mod_base = OTHER; note = 2'-O-methyluridine-3'-phosphate
  modified_base 14: mod_base = OTHER; note = 2'-fluorocytidine-3'-phosphate
  modified_base 15: mod_base = OTHER; note = 2'-O-methyluridine-3'-phosphate
  modified_base 16: mod_base = OTHER; note = 2'-fluorouridine-3'-phosphate
  modified_base 17: mod_base = OTHER; note = 2'-O-methyluridine-3'-phosphate
  modified_base 18: mod_base = OTHER; note = 2'-O-methyluridine-3'-phosphate
  modified_base 19: mod_base = OTHER; note = 2'-O-methylguanosine-3'-phosphate
  modified_base 20: mod_base = OTHER; note = 2'-O-methylcytidine-3'-phosphate
  modified_base 21: mod_base = OTHER; note = 2'-O-methylcytidine-3'-phosphorothioate
  modified_base 22: mod_base = OTHER; note = 2'-O-methyladenosine-3'-phosphorothioate
  modified_base 23: mod_base = OTHER; note = 2'-O-methyluridine-3'-phosphate
ttcttggtgaggtcttttgccat

SEQ ID NO: 4288 - RNA, 23 nt, synthetic construct
  source 1..23: mol_type = other RNA
  modified_base 1: mod_base = OTHER; note = Vinyl-phosphonate 2'-O-methyluridine-3'-phosphorothioate
  modified_base 2: mod_base = OTHER; note = 2'-fluoroadenosine-3'-phosphorothioate
  modified_base 3: mod_base = OTHER; note = 2'-O-methyladenosine-3'-phosphate
  modified_base 4: mod_base = OTHER; note = 2'-O-methylguanosine-3'-phosphate
  modified_base 5: mod_base = OTHER; note = 2'-O-methylguanosine-3'-phosphate
  modified_base 6: mod_base = OTHER; note = 2'-fluorocytidine-3'-phosphate
  modified_base 7: mod_base = OTHER; note = 2'-O-methyladenosine-3'-phosphate
  modified_base 8: mod_base = OTHER; note = 2'-fluorocytidine-3'-phosphate
  modified_base 9: mod_base = OTHER; note = 2'-fluoroadenosine-3'-phosphate
  modified_base 10: mod_base = OTHER; note = 2'-O-methylguanosine-3'-phosphate
  modified_base 11: mod_base = OTHER; note = 2'-O-methylguanosine-3'-phosphate
  modified_base 12: mod_base = OTHER; note = 2'-O-methylcytidine-3'-phosphate
  modified_base 13: mod_base = OTHER; note = 2'-O-methylguanosine-3'-phosphate
  modified_base 14: mod_base = OTHER; note = 2'-fluoroadenosine-3'-phosphate
  modified_base 15: mod_base = OTHER; note = 2'-O-methyluridine-3'-phosphate
  modified_base 16: mod_base = OTHER; note = 2'-fluoroguanosine-3'-phosphate
  modified_base 17: mod_base = OTHER; note = 2'-O-methylcytidine-3'-phosphate
  modified_base 18: mod_base = OTHER; note = 2'-O-methyluridine-3'-phosphate
  modified_base 19: mod_base = OTHER; note = 2'-O-methylguanosine-3'-phosphate
  modified_base 20: mod_base = OTHER; note = 2'-O-methyladenosine-3'-phosphate
  modified_base 21: mod_base = OTHER; note = 2'-O-methyladenosine-3'-phosphorothioate
  modified_base 22: mod_base = OTHER; note = 2'-O-methylguanosine-3'-phosphorothioate
  modified_base 23: mod_base = OTHER; note = 2'-O-methyladenosine-3'-phosphate
taaggcacaggcgatgctgaaga

SEQ ID NO: 4289 - RNA, 23 nt, synthetic construct
  source 1..23: mol_type = other RNA
  modified_base 1: mod_base = OTHER; note = Vinyl-phosphonate 2'-O-methyluridine-3'-phosphorothioate
  modified_base 2: mod_base = OTHER; note = 2'-fluorouridine -3'-phosphorothioate
  modified_base 3: mod_base = OTHER; note = 2'-O-methyladenosine-3'-phosphate
  modified_base 4: mod_base = OTHER; note = 2'-O-methyluridine-3'-phosphate
  modified_base 5: mod_base = OTHER; note = 2'-O-methyluridine-3'-phosphate
  modified_base 6: mod_base = OTHER; note = 2'-fluoroguanosine-3'-phosphate
  modified_base 7: mod_base = OTHER; note = 2'-O-methylcytidine-3'-phosphate
  modified_base 8: mod_base = OTHER; note = 2'-fluoroguanosine-3'-phosphate
  modified_base 9: mod_base = OTHER; note = 2'-fluoroadenosine-3'-phosphate
  modified_base 10: mod_base = OTHER; note = 2'-O-methylguanosine-3'-phosphate
  modified_base 11: mod_base = OTHER; note = 2'-O-methylcytidine-3'-phosphate
  modified_base 12: mod_base = OTHER; note = 2'-O-methylcytidine-3'-phosphate
  modified_base 13: mod_base = OTHER; note = 2'-O-methyluridine-3'-phosphate
  modified_base 14: mod_base = OTHER; note = 2'-fluorocytidine-3'-phosphate
  modified_base 15: mod_base = OTHER; note = 2'-O-methyladenosine-3'-phosphate
  modified_base 16: mod_base = OTHER; note = 2'-fluorouridine-3'-phosphate
  modified_base 17: mod_base = OTHER; note = 2'-O-methyluridine-3'-phosphate
  modified_base 18: mod_base = OTHER; note = 2'-O-methyluridine-3'-phosphate
  modified_base 19: mod_base = OTHER; note = 2'-O-methyladenosine-3'-phosphate
  modified_base 20: mod_base = OTHER; note = 2'-O-methylguanosine-3'-phosphate
  modified_base 21: mod_base = OTHER; note = 2'-O-methylcytidine-3'-phosphorothioate
  modified_base 22: mod_base = OTHER; note = 2'-O-methyladenosine-3'-phosphorothioate
  modified_base 23: mod_base = OTHER; note = 2'-O-methylcytidine-3'-phosphate
ttattgcgagcctcatttagcac

SEQ ID NO: 4290 - RNA, 23 nt, synthetic construct
  source 1..23: mol_type = other RNA
  modified_base 1: mod_base = OTHER; note = Vinyl-phosphonate 2'-O-methyluridine-3'-phosphorothioate
  modified_base 2: mod_base = OTHER; note = 2'-fluoroadenosine-3'-phosphorothioate
  modified_base 3: mod_base = OTHER; note = 2'-O-methylguanosine-3'-phosphate
  modified_base 4: mod_base = OTHER; note = 2'-O-methyladenosine-3'-phosphate
  modified_base 5: mod_base = OTHER; note = 2'-O-methylcytidine-3'-phosphate
  modified_base 6: mod_base = OTHER; note = 2'-fluorocytidine-3'-phosphate
  modified_base 7: mod_base = OTHER; note = 2'-O-methylcytidine-3'-phosphate
  modified_base 8: mod_base = OTHER; note = 2'-fluoroadenosine-3'-phosphate
  modified_base 9: mod_base = OTHER; note = 2'-fluorocytidine-3'-phosphate
  modified_base 10: mod_base = OTHER; note = 2'-O-methylcytidine-3'-phosphate
  modified_base 11: mod_base = OTHER; note = 2'-O-methyladenosine-3'-phosphate
  modified_base 12: mod_base = OTHER; note = 2'-O-methylguanosine-3'-phosphate
  modified_base 13: mod_base = OTHER; note = 2'-O-methyladenosine-3'-phosphate
  modified_base 14: mod_base = OTHER; note = 2'-fluorocytidine-3'-phosphate
  modified_base 15: mod_base = OTHER; note = 2'-O-methylguanosine-3'-phosphate
  modified_base 16: mod_base = OTHER; note = 2'-fluoroadenosine-3'-phosphate
  modified_base 17: mod_base = OTHER; note = 2'-O-methyladenosine-3'-phosphate
  modified_base 18: mod_base = OTHER; note = 2'-O-methylguanosine-3'-phosphate
  modified_base 19: mod_base = OTHER; note = 2'-O-methylcytidine-3'-phosphate
  modified_base 20: mod_base = OTHER; note = 2'-O-methyluridine-3'-phosphate
  modified_base 21: mod_base = OTHER; note = 2'-O-methylguanosine-3'-phosphorothioate
  modified_base 22: mod_base = OTHER; note = 2'-O-methylguanosine-3'-phosphorothioate
  modified_base 23: mod_base = OTHER; note = 2'-O-methylcytidine-3'-phosphate
tagacccaccagacgaagctggc

SEQ ID NO: 4291 - RNA, 23 nt, synthetic construct
  source 1..23: mol_type = other RNA
  modified_base 1: mod_base = OTHER; note = Vinyl-phosphonate 2'-O-methyluridine-3'-phosphorothioate
  modified_base 2: mod_base = OTHER; note = 2'-fluoroadenosine-3'-phosphorothioate
  modified_base 3: mod_base = OTHER; note = 2'-O-methylcytidine-3'-phosphate
  modified_base 4: mod_base = OTHER; note = 2'-O-methyluridine-3'-phosphate
  modified_base 5: mod_base = OTHER; note = 2'-O-methylguanosine-3'-phosphate
  modified_base 6: mod_base = OTHER; note = 2'-fluorocytidine-3'-phosphate
  modified_base 7: mod_base = OTHER; note = 2'-O-methyladenosine-3'-phosphate
  modified_base 8: mod_base = OTHER; note = 2'-fluorouridine-3'-phosphate
  modified_base 9: mod_base = OTHER; note = 2'-fluoroguanosine-3'-phosphate
  modified_base 10: mod_base = OTHER; note = 2'-O-methylcytidine-3'-phosphate
  modified_base 11: mod_base = OTHER; note = 2'-O-methylcytidine-3'-phosphate
  modified_base 12: mod_base = OTHER; note = 2'-O-methyladenosine-3'-phosphate
  modified_base 13: mod_base = OTHER; note = 2'-O-methyladenosine-3'-phosphate
  modified_base 14: mod_base = OTHER; note = 2'-fluorouridine-3'-phosphate
  modified_base 15: mod_base = OTHER; note = 2'-O-methyladenosine-3'-phosphate
  modified_base 16: mod_base = OTHER; note = 2'-fluorocytidine-3'-phosphate
  modified_base 17: mod_base = OTHER; note = 2'-O-methylcytidine-3'-phosphate
  modified_base 18: mod_base = OTHER; note = 2'-O-methyladenosine-3'-phosphate
  modified_base 19: mod_base = OTHER; note = 2'-O-methyluridine-3'-phosphate
  modified_base 20: mod_base = OTHER; note = 2'-O-methyladenosine-3'-phosphate
  modified_base 21: mod_base = OTHER; note = 2'-O-methyluridine-3'-phosphorothioate
  modified_base 22: mod_base = OTHER; note = 2'-O-methyluridine-3'-phosphorothioate
  modified_base 23: mod_base = OTHER; note = 2'-O-methylcytidine-3'-phosphate
tactgcatgccaataccatattc

SEQ ID NO: 4292 - RNA, 23 nt, synthetic construct
  source 1..23: mol_type = other RNA
  modified_base 1: mod_base = OTHER; note = Vinyl-phosphonate 2'-O-methyluridine-3'-phosphorothioate
  modified_base 2: mod_base = OTHER; note = 2'-fluoroguanosine-3'-phosphorothioate
  modified_base 3: mod_base = OTHER; note = 2'-O-methyladenosine-3'-phosphate
  modified_base 4: mod_base = OTHER; note = 2'-O-methyladenosine-3'-phosphate
  modified_base 5: mod_base = OTHER; note = 2'-O-methyluridine-3'-phosphate
  modified_base 6: mod_base = OTHER; note = 2'-fluorouridine-3'-phosphate
  modified_base 7: mod_base = OTHER; note = 2'-O-methylcytidine-3'-phosphate
  modified_base 8: mod_base = OTHER; note = 2'-fluorouridine-3'-phosphate
  modified_base 9: mod_base = OTHER; note = 2'-fluorocytidine-3'-phosphate
  modified_base 10: mod_base = OTHER; note = 2'-O-methylcytidine-3'-phosphate
  modified_base 11: mod_base = OTHER; note = 2'-O-methyladenosine-3'-phosphate
  modified_base 12: mod_base = OTHER; note = 2'-O-methylcytidine-3'-phosphate
  modified_base 13: mod_base = OTHER; note = 2'-O-methylcytidine-3'-phosphate
  modified_base 14: mod_base = OTHER; note = 2'-fluorouridine-3'-phosphate
  modified_base 15: mod_base = OTHER; note = 2'-O-methylguanosine-3'-phosphate
  modified_base 16: mod_base = OTHER; note = 2'-fluorocytidine-3'-phosphate
  modified_base 17: mod_base = OTHER; note = 2'-O-methyladenosine-3'-phosphate
  modified_base 18: mod_base = OTHER; note = 2'-O-methylguanosine-3'-phosphate
  modified_base 19: mod_base = OTHER; note = 2'-O-methyluridine-3'-phosphate
  modified_base 20: mod_base = OTHER; note = 2'-O-methyluridine-3'-phosphate
  modified_base 21: mod_base = OTHER; note = 2'-O-methyluridine-3'-phosphorothioate
  modified_base 22: mod_base = OTHER; note = 2'-O-methyladenosine-3'-phosphorothioate
  modified_base 23: mod_base = OTHER; note = 2'-O-methyluridine-3'-phosphate
tgaattctccacctgcagtttat

SEQ ID NO: 4293 - RNA, 23 nt, synthetic construct
  source 1..23: mol_type = other RNA
  modified_base 1: mod_base = OTHER; note = Vinyl-phosphonate 2'-O-methyluridine-3'-phosphorothioate
  modified_base 2: mod_base = OTHER; note = 2'-fluorouridine -3'-phosphorothioate
  modified_base 3: mod_base = OTHER; note = 2'-O-methyluridine-3'-phosphate
  modified_base 4: mod_base = OTHER; note = 2'-O-methyluridine-3'-phosphate
  modified_base 5: mod_base = OTHER; note = 2'-O-methylguanosine-3'-phosphate
  modified_base 6: mod_base = OTHER; note = 2'-fluoroadenosine-3'-phosphate
  modified_base 7: mod_base = OTHER; note = 2'-O-methyladenosine-3'-phosphate
  modified_base 8: mod_base = OTHER; note = 2'-fluoroguanosine-3'-phosphate
  modified_base 9: mod_base = OTHER; note = 2'-fluoroadenosine-3'-phosphate
  modified_base 10: mod_base = OTHER; note = 2'-O-methylcytidine-3'-phosphate
  modified_base 11: mod_base = OTHER; note = 2'-O-methyladenosine-3'-phosphate
  modified_base 12: mod_base = OTHER; note = 2'-O-methylguanosine-3'-phosphate
  modified_base 13: mod_base = OTHER; note = 2'-O-methylguanosine-3'-phosphate
  modified_base 14: mod_base = OTHER; note = 2'-fluorocytidine-3'-phosphate
  modified_base 15: mod_base = OTHER; note = 2'-O-methyladenosine-3'-phosphate
  modified_base 16: mod_base = OTHER; note = 2'-fluoroguanosine-3'-phosphate
  modified_base 17: mod_base = OTHER; note = 2'-O-methylcytidine-3'-phosphate
  modified_base 18: mod_base = OTHER; note = 2'-O-methylcytidine-3'-phosphate
  modified_base 19: mod_base = OTHER; note = 2'-O-methyladenosine-3'-phosphate
  modified_base 20: mod_base = OTHER; note = 2'-O-methyluridine-3'-phosphate
  modified_base 21: mod_base = OTHER; note = 2'-O-methyladenosine-3'-phosphorothioate
  modified_base 22: mod_base = OTHER; note = 2'-O-methyladenosine-3'-phosphorothioate
  modified_base 23: mod_base = OTHER; note = 2'-O-methylcytidine-3'-phosphate
ttttgaagacaggcagccataac

SEQ ID NO: 4294 - RNA, 23 nt, synthetic construct
  source 1..23: mol_type = other RNA
  modified_base 1: mod_base = OTHER; note = Vinyl-phosphonate 2'-O-methyluridine-3'-phosphorothioate
  modified_base 2: mod_base = OTHER; note = 2'-fluoroguanosine-3'-phosphorothioate
  modified_base 3: mod_base = OTHER; note = 2'-O-methylguanosine-3'-phosphate
  modified_base 4: mod_base = OTHER; note = 2'-O-methyluridine-3'-phosphate
  modified_base 5: mod_base = OTHER; note = 2'-O-methylcytidine-3'-phosphate
  modified_base 6: mod_base = OTHER; note = 2'-fluorocytidine-3'-phosphate
  modified_base 7: mod_base = OTHER; note = 2'-O-methyluridine-3'-phosphate
  modified_base 8: mod_base = OTHER; note = 2'-fluorocytidine-3'-phosphate
  modified_base 9: mod_base = OTHER; note = 2'-fluorouridine-3'-phosphate
  modified_base 10: mod_base = OTHER; note = 2'-O-methyladenosine-3'-phosphate
  modified_base 11: mod_base = OTHER; note = 2'-O-methyluridine-3'-phosphate
  modified_base 12: mod_base = OTHER; note = 2'-O-methyluridine-3'-phosphate
  modified_base 13: mod_base = OTHER; note = 2'-O-methyluridine-3'-phosphate
  modified_base 14: mod_base = OTHER; note = 2'-fluorocytidine-3'-phosphate
  modified_base 15: mod_base = OTHER; note = 2'-O-methyladenosine-3'-phosphate
  modified_base 16: mod_base = OTHER; note = 2'-fluoroguanosine-3'-phosphate
  modified_base 17: mod_base = OTHER; note = 2'-O-methyladenosine-3'-phosphate
  modified_base 18: mod_base = OTHER; note = 2'-O-methyladenosine-3'-phosphate
  modified_base 19: mod_base = OTHER; note = 2'-O-methylcytidine-3'-phosphate
  modified_base 20: mod_base = OTHER; note = 2'-O-methyladenosine-3'-phosphate
  modified_base 21: mod_base = OTHER; note = 2'-O-methylguanosine-3'-phosphorothioate
  modified_base 22: mod_base = OTHER; note = 2'-O-methylguanosine-3'-phosphorothioate
  modified_base 23: mod_base = OTHER; note = 2'-O-methylguanosine-3'-phosphate
tggtcctctatttcagaacaggg

SEQ ID NO: 4295 - RNA, 23 nt, synthetic construct
  source 1..23: mol_type = other RNA
  modified_base 1: mod_base = OTHER; note = Vinyl-phosphonate 2'-O-methyluridine-3'-phosphorothioate
  modified_base 2: mod_base = OTHER; note = 2'-fluorocytidine-3'-phosphorothioate
  modified_base 3: mod_base = OTHER; note = 2'-O-methylcytidine-3'-phosphate
  modified_base 4: mod_base = OTHER; note = 2'-O-methyladenosine-3'-phosphate
  modified_base 5: mod_base = OTHER; note = 2'-O-methylguanosine-3'-phosphate
  modified_base 6: mod_base = OTHER; note = 2'-fluorocytidine-3'-phosphate
  modified_base 7: mod_base = OTHER; note = 2'-O-methylguanosine-3'-phosphate
  modified_base 8: mod_base = OTHER; note = 2'-fluoroguanosine-3'-phosphate
  modified_base 9: mod_base = OTHER; note = 2'-fluorocytidine-3'-phosphate
  modified_base 10: mod_base = OTHER; note = 2'-O-methyluridine-3'-phosphate
  modified_base 11: mod_base = OTHER; note = 2'-O-methyluridine-3'-phosphate
  modified_base 12: mod_base = OTHER; note = 2'-O-methyluridine-3'-phosphate
  modified_base 13: mod_base = OTHER; note = 2'-O-methyladenosine-3'-phosphate
  modified_base 14: mod_base = OTHER; note = 2'-fluoroadenosine-3'-phosphate
  modified_base 15: mod_base = OTHER; note = 2'-O-methyladenosine-3'-phosphate
  modified_base 16: mod_base = OTHER; note = 2'-fluoroadenosine-3'-phosphate
  modified_base 17: mod_base = OTHER; note = 2'-O-methyladenosine-3'-phosphate
  modified_base 18: mod_base = OTHER; note = 2'-O-methyluridine-3'-phosphate
  modified_base 19: mod_base = OTHER; note = 2'-O-methyladenosine-3'-phosphate
  modified_base 20: mod_base = OTHER; note = 2'-O-methylguanosine-3'-phosphate
  modified_base 21: mod_base = OTHER; note = 2'-O-methyladenosine-3'-phosphorothioate
  modified_base 22: mod_base = OTHER; note = 2'-O-methyladenosine-3'-phosphorothioate
  modified_base 23: mod_base = OTHER; note = 2'-O-methyladenosine-3'-phosphate
tccagcggctttaaaaatagaaa

SEQ ID NO: 4296 - RNA, 23 nt, synthetic construct
  source 1..23: mol_type = other RNA
  modified_base 1: mod_base = OTHER; note = Vinyl-phosphonate 2'-O-methyluridine-3'-phosphorothioate
  modified_base 2: mod_base = OTHER; note = 2'-fluorouridine -3'-phosphorothioate
  modified_base 3: mod_base = OTHER; note = 2'-O-methyluridine-3'-phosphate
  modified_base 4: mod_base = OTHER; note = 2'-O-methylcytidine-3'-phosphate
  modified_base 5: mod_base = OTHER; note = 2'-O-methylcytidine-3'-phosphate
  modified_base 6: mod_base = OTHER; note = 2'-fluorouridine-3'-phosphate
  modified_base 7: mod_base = OTHER; note = 2'-O-methylguanosine-3'-phosphate
  modified_base 8: mod_base = OTHER; note = 2'-fluoroadenosine-3'-phosphate
  modified_base 9: mod_base = OTHER; note = 2'-fluoroguanosine-3'-phosphate
  modified_base 10: mod_base = OTHER; note = 2'-O-methylcytidine-3'-phosphate
  modified_base 11: mod_base = OTHER; note = 2'-O-methyluridine-3'-phosphate
  modified_base 12: mod_base = OTHER; note = 2'-O-methyluridine-3'-phosphate
  modified_base 13: mod_base = OTHER; note = 2'-O-methylcytidine-3'-phosphate
  modified_base 14: mod_base = OTHER; note = 2'-fluorouridine-3'-phosphate
  modified_base 15: mod_base = OTHER; note = 2'-O-methylcytidine-3'-phosphate
  modified_base 16: mod_base = OTHER; note = 2'-fluorocytidine-3'-phosphate
  modified_base 17: mod_base = OTHER; note = 2'-O-methyluridine-3'-phosphate
  modified_base 18: mod_base = OTHER; note = 2'-O-methylcytidine-3'-phosphate
  modified_base 19: mod_base = OTHER; note = 2'-O-methyladenosine-3'-phosphate
  modified_base 20: mod_base = OTHER; note = 2'-O-methylguanosine-3'-phosphate
  modified_base 21: mod_base = OTHER; note = 2'-O-methylcytidine-3'-phosphorothioate
  modified_base 22: mod_base = OTHER; note = 2'-O-methyluridine-3'-phosphorothioate
  modified_base 23: mod_base = OTHER; note = 2'-O-methylguanosine-3'-phosphate
tttcctgagcttctcctcagctg

SEQ ID NO: 4297 - RNA, 23 nt, synthetic construct
  source 1..23: mol_type = other RNA
  modified_base 1: mod_base = OTHER; note = Vinyl-phosphonate 2'-O-methyluridine-3'-phosphorothioate
  modified_base 2: mod_base = OTHER; note = 2'-fluoroguanosine-3'-phosphorothioate
  modified_base 3: mod_base = OTHER; note = 2'-O-methyladenosine-3'-phosphate
  modified_base 4: mod_base = OTHER; note = 2'-O-methylcytidine-3'-phosphate
  modified_base 5: mod_base = OTHER; note = 2'-O-methyluridine-3'-phosphate
  modified_base 6: mod_base = OTHER; note = 2'-fluorouridine-3'-phosphate
  modified_base 7: mod_base = OTHER; note = 2'-O-methylguanosine-3'-phosphate
  modified_base 8: mod_base = OTHER; note = 2'-fluorouridine-3'-phosphate
  modified_base 9: mod_base = OTHER; note = 2'-fluoroguanosine-3'-phosphate
  modified_base 10: mod_base = OTHER; note = 2'-O-methylguanosine-3'-phosphate
  modified_base 11: mod_base = OTHER; note = 2'-O-methyluridine-3'-phosphate
  modified_base 12: mod_base = OTHER; note = 2'-O-methylguanosine-3'-phosphate
  modified_base 13: mod_base = OTHER; note = 2'-O-methylguanosine-3'-phosphate
  modified_base 14: mod_base = OTHER; note = 2'-fluoroadenosine-3'-phosphate
  modified_base 15: mod_base = OTHER; note = 2'-O-methyladenosine-3'-phosphate
  modified_base 16: mod_base = OTHER; note = 2'-fluoroguanosine-3'-phosphate
  modified_base 17: mod_base = OTHER; note = 2'-O-methylguanosine-3'-phosphate
  modified_base 18: mod_base = OTHER; note = 2'-O-methylcytidine-3'-phosphate
  modified_base 19: mod_base = OTHER; note = 2'-O-methyluridine-3'-phosphate
  modified_base 20: mod_base = OTHER; note = 2'-O-methyluridine-3'-phosphate
  modified_base 21: mod_base = OTHER; note = 2'-O-methylguanosine-3'-phosphorothioate
  modified_base 22: mod_base = OTHER; note = 2'-O-methylguanosine-3'-phosphorothioate
  modified_base 23: mod_base = OTHER; note = 2'-O-methyladenosine-3'-phosphate
tgacttgtggtggaaggcttgga

SEQ ID NO: 4298 - RNA, 23 nt, synthetic construct
  source 1..23: mol_type = other RNA
  modified_base 1: mod_base = OTHER; note = Vinyl-phosphonate 2'-O-methyluridine-3'-phosphorothioate
  modified_base 2: mod_base = OTHER; note = 2'-fluorouridine -3'-phosphorothioate
  modified_base 3: mod_base = OTHER; note = 2'-O-methylguanosine-3'-phosphate
  modified_base 4: mod_base = OTHER; note = 2'-O-methylguanosine-3'-phosphate
  modified_base 5: mod_base = OTHER; note = 2'-O-methylcytidine-3'-phosphate
  modified_base 6: mod_base = OTHER; note = 2'-fluorocytidine-3'-phosphate
  modified_base 7: mod_base = OTHER; note = 2'-O-methyladenosine-3'-phosphate
  modified_base 8: mod_base = OTHER; note = 2'-fluorocytidine-3'-phosphate
  modified_base 9: mod_base = OTHER; note = 2'-fluorouridine-3'-phosphate
  modified_base 10: mod_base = OTHER; note = 2'-O-methyluridine-3'-phosphate
  modified_base 11: mod_base = OTHER; note = 2'-O-methyluridine-3'-phosphate
  modified_base 12: mod_base = OTHER; note = 2'-O-methylguanosine-3'-phosphate
  modified_base 13: mod_base = OTHER; note = 2'-O-methylguanosine-3'-phosphate
  modified_base 14: mod_base = OTHER; note = 2'-fluorouridine-3'-phosphate
  modified_base 15: mod_base = OTHER; note = 2'-O-methyladenosine-3'-phosphate
  modified_base 16: mod_base = OTHER; note = 2'-fluoroadenosine-3'-phosphate
  modified_base 17: mod_base = OTHER; note = 2'-O-methylcytidine-3'-phosphate
  modified_base 18: mod_base = OTHER; note = 2'-O-methyluridine-3'-phosphate
  modified_base 19: mod_base = OTHER; note = 2'-O-methylguanosine-3'-phosphate
  modified_base 20: mod_base = OTHER; note = 2'-O-methyladenosine-3'-phosphate
  modified_base 21: mod_base = OTHER; note = 2'-O-methyladenosine-3'-phosphorothioate
  modified_base 22: mod_base = OTHER; note = 2'-O-methyladenosine-3'-phosphorothioate
  modified_base 23: mod_base = OTHER; note = 2'-O-methyluridine-3'-phosphate
ttggccactttggtaactgaaat

SEQ ID NO: 4299 - RNA, 23 nt, synthetic construct
  source 1..23: mol_type = other RNA
  modified_base 1: mod_base = OTHER; note = Vinyl-phosphonate 2'-O-methyluridine-3'-phosphorothioate
  modified_base 2: mod_base = OTHER; note = 2'-fluorouridine -3'-phosphorothioate
  modified_base 3: mod_base = OTHER; note = 2'-O-methylcytidine-3'-phosphate
  modified_base 4: mod_base = OTHER; note = 2'-O-methylcytidine-3'-phosphate
  modified_base 5: mod_base = OTHER; note = 2'-O-methylguanosine-3'-phosphate
  modified_base 6: mod_base = OTHER; note = 2'-fluoroguanosine-3'-phosphate
  modified_base 7: mod_base = OTHER; note = 2'-O-methylguanosine-3'-phosphate
  modified_base 8: mod_base = OTHER; note = 2'-fluorouridine-3'-phosphate
  modified_base 9: mod_base = OTHER; note = 2'-fluoroguanosine-3'-phosphate
  modified_base 10: mod_base = OTHER; note = 2'-O-methyladenosine-3'-phosphate
  modified_base 11: mod_base = OTHER; note = 2'-O-methylguanosine-3'-phosphate
  modified_base 12: mod_base = OTHER; note = 2'-O-methylguanosine-3'-phosphate
  modified_base 13: mod_base = OTHER; note = 2'-O-methyladenosine-3'-phosphate
  modified_base 14: mod_base = OTHER; note = 2'-fluoroadenosine-3'-phosphate
  modified_base 15: mod_base = OTHER; note = 2'-O-methylguanosine-3'-phosphate
  modified_base 16: mod_base = OTHER; note = 2'-fluorocytidine-3'-phosphate
  modified_base 17: mod_base = OTHER; note = 2'-O-methyladenosine-3'-phosphate
  modified_base 18: mod_base = OTHER; note = 2'-O-methylguanosine-3'-phosphate
  modified_base 19: mod_base = OTHER; note = 2'-O-methylguanosine-3'-phosphate
  modified_base 20: mod_base = OTHER; note = 2'-O-methyluridine-3'-phosphate
  modified_base 21: mod_base = OTHER; note = 2'-O-methylguanosine-3'-phosphorothioate
  modified_base 22: mod_base = OTHER; note = 2'-O-methyladenosine-3'-phosphorothioate
  modified_base 23: mod_base = OTHER; note = 2'-O-methylguanosine-3'-phosphate
ttccgggtgaggaagcaggtgag

SEQ ID NO: 4300 - RNA, 23 nt, synthetic construct
  source 1..23: mol_type = other RNA
  modified_base 1: mod_base = OTHER; note = Vinyl-phosphonate 2'-O-methyluridine-3'-phosphorothioate
  modified_base 2: mod_base = OTHER; note = 2'-fluorocytidine-3'-phosphorothioate
  modified_base 3: mod_base = OTHER; note = 2'-O-methylcytidine-3'-phosphate
  modified_base 4: mod_base = OTHER; note = 2'-O-methyladenosine-3'-phosphate
  modified_base 5: mod_base = OTHER; note = 2'-O-methylcytidine-3'-phosphate
  modified_base 6: mod_base = OTHER; note = 2'-fluorouridine-3'-phosphate
  modified_base 7: mod_base = OTHER; note = 2'-O-methyladenosine-3'-phosphate
  modified_base 8: mod_base = OTHER; note = 2'-fluorouridine-3'-phosphate
  modified_base 9: mod_base = OTHER; note = 2'-fluoroguanosine-3'-phosphate
  modified_base 10: mod_base = OTHER; note = 2'-O-methyluridine-3'-phosphate
  modified_base 11: mod_base = OTHER; note = 2'-O-methylguanosine-3'-phosphate
  modified_base 12: mod_base = OTHER; note = 2'-O-methylguanosine-3'-phosphate
  modified_base 13: mod_base = OTHER; note = 2'-O-methylguanosine-3'-phosphate
  modified_base 14: mod_base = OTHER; note = 2'-fluorouridine-3'-phosphate
  modified_base 15: mod_base = OTHER; note = 2'-O-methylguanosine-3'-phosphate
  modified_base 16: mod_base = OTHER; note = 2'-fluoroadenosine-3'-phosphate
  modified_base 17: mod_base = OTHER; note = 2'-O-methyluridine-3'-phosphate
  modified_base 18: mod_base = OTHER; note = 2'-O-methyladenosine-3'-phosphate
  modified_base 19: mod_base = OTHER; note = 2'-O-methyladenosine-3'-phosphate
  modified_base 20: mod_base = OTHER; note = 2'-O-methyladenosine-3'-phosphate
  modified_base 21: mod_base = OTHER; note = 2'-O-methyladenosine-3'-phosphorothioate
  modified_base 22: mod_base = OTHER; note = 2'-O-methylguanosine-3'-phosphorothioate
  modified_base 23: mod_base = OTHER; note = 2'-O-methyladenosine-3'-phosphate
tccactatgtgggtgataaaaga

SEQ ID NO: 4301 - RNA, 23 nt, synthetic construct
  source 1..23: mol_type = other RNA
  modified_base 1: mod_base = OTHER; note = Vinyl-phosphonate 2'-O-methyluridine-3'-phosphorothioate
  modified_base 2: mod_base = OTHER; note = 2'-fluorocytidine-3'-phosphorothioate
  modified_base 3: mod_base = OTHER; note = 2'-O-methyladenosine-3'-phosphate
  modified_base 4: mod_base = OTHER; note = 2'-O-methyladenosine-3'-phosphate
  modified_base 5: mod_base = OTHER; note = 2'-O-methylguanosine-3'-phosphate
  modified_base 6: mod_base = OTHER; note = 2'-fluoroguanosine-3'-phosphate
  modified_base 7: mod_base = OTHER; note = 2'-O-methylcytidine-3'-phosphate
  modified_base 8: mod_base = OTHER; note = 2'-fluoroadenosine-3'-phosphate
  modified_base 9: mod_base = OTHER; note = 2'-fluoroadenosine-3'-phosphate
  modified_base 10: mod_base = OTHER; note = 2'-O-methylcytidine-3'-phosphate
  modified_base 11: mod_base = OTHER; note = 2'-O-methylguanosine-3'-phosphate
  modified_base 12: mod_base = OTHER; note = 2'-O-methyladenosine-3'-phosphate
  modified_base 13: mod_base = OTHER; note = 2'-O-methylcytidine-3'-phosphate
  modified_base 14: mod_base = OTHER; note = 2'-fluoroguanosine-3'-phosphate
  modified_base 15: mod_base = OTHER; note = 2'-O-methylguanosine-3'-phosphate
  modified_base 16: mod_base = OTHER; note = 2'-fluorouridine-3'-phosphate
  modified_base 17: mod_base = OTHER; note = 2'-O-methylcytidine-3'-phosphate
  modified_base 18: mod_base = OTHER; note = 2'-O-methyluridine-3'-phosphate
  modified_base 19: mod_base = OTHER; note = 2'-O-methylcytidine-3'-phosphate
  modified_base 20: mod_base = OTHER; note = 2'-O-methylcytidine-3'-phosphate
  modified_base 21: mod_base = OTHER; note = 2'-O-methyluridine-3'-phosphorothioate
  modified_base 22: mod_base = OTHER; note = 2'-O-methylguanosine-3'-phosphorothioate
  modified_base 23: mod_base = OTHER; note = 2'-O-methyladenosine-3'-phosphate
tcaaggcaacgacggtctcctga

SEQ ID NO: 4302 - RNA, 23 nt, synthetic construct
  source 1..23: mol_type = other RNA
  modified_base 1: mod_base = OTHER; note = Vinyl-phosphonate 2'-O-methyluridine-3'-phosphorothioate
  modified_base 2: mod_base = OTHER; note = 2'-fluorouridine -3'-phosphorothioate
  modified_base 3: mod_base = OTHER; note = 2'-O-methylcytidine-3'-phosphate
  modified_base 4: mod_base = OTHER; note = 2'-O-methylguanosine-3'-phosphate
  modified_base 5: mod_base = OTHER; note = 2'-O-methyladenosine-3'-phosphate
  modified_base 6: mod_base = OTHER; note = 2'-fluoroadenosine-3'-phosphate
  modified_base 7: mod_base = OTHER; note = 2'-O-methylcytidine-3'-phosphate
  modified_base 8: mod_base = OTHER; note = 2'-fluorouridine-3'-phosphate
  modified_base 9: mod_base = OTHER; note = 2'-fluorouridine-3'-phosphate
  modified_base 10: mod_base = OTHER; note = 2'-O-methyluridine-3'-phosphate
  modified_base 11: mod_base = OTHER; note = 2'-O-methyluridine-3'-phosphate
  modified_base 12: mod_base = OTHER; note = 2'-O-methylguanosine-3'-phosphate
  modified_base 13: mod_base = OTHER; note = 2'-O-methylcytidine-3'-phosphate
  modified_base 14: mod_base = OTHER; note = 2'-fluorouridine-3'-phosphate
  modified_base 15: mod_base = OTHER; note = 2'-O-methylguanosine-3'-phosphate
  modified_base 16: mod_base = OTHER; note = 2'-fluoroguanosine-3'-phosphate
  modified_base 17: mod_base = OTHER; note = 2'-O-methylguanosine-3'-phosphate
  modified_base 18: mod_base = OTHER; note = 2'-O-methylcytidine-3'-phosphate
  modified_base 19: mod_base = OTHER; note = 2'-O-methylcytidine-3'-phosphate
  modified_base 20: mod_base = OTHER; note = 2'-O-methyladenosine-3'-phosphate
  modified_base 21: mod_base = OTHER; note = 2'-O-methyluridine-3'-phosphorothioate
  modified_base 22: mod_base = OTHER; note = 2'-O-methyluridine-3'-phosphorothioate
  modified_base 23: mod_base = OTHER; note = 2'-O-methyluridine-3'-phosphate
ttcgaacttttgctgggccattt

SEQ ID NO: 4303 - RNA, 23 nt, synthetic construct
  source 1..23: mol_type = other RNA
  modified_base 1: mod_base = OTHER; note = Vinyl-phosphonate 2'-O-methyluridine-3'-phosphorothioate
  modified_base 2: mod_base = OTHER; note = 2'-fluoroadenosine-3'-phosphorothioate
  modified_base 3: mod_base = OTHER; note = 2'-O-methylcytidine-3'-phosphate
  modified_base 4: mod_base = OTHER; note = 2'-O-methylcytidine-3'-phosphate
  modified_base 5: mod_base = OTHER; note = 2'-O-methylguanosine-3'-phosphate
  modified_base 6: mod_base = OTHER; note = 2'-fluorocytidine-3'-phosphate
  modified_base 7: mod_base = OTHER; note = 2'-O-methyladenosine-3'-phosphate
  modified_base 8: mod_base = OTHER; note = 2'-fluorouridine-3'-phosphate
  modified_base 9: mod_base = OTHER; note = 2'-fluoroguanosine-3'-phosphate
  modified_base 10: mod_base = OTHER; note = 2'-O-methylguanosine-3'-phosphate
  modified_base 11: mod_base = OTHER; note = 2'-O-methylcytidine-3'-phosphate
  modified_base 12: mod_base = OTHER; note = 2'-O-methyluridine-3'-phosphate
  modified_base 13: mod_base = OTHER; note = 2'-O-methyluridine-3'-phosphate
  modified_base 14: mod_base = OTHER; note = 2'-fluorouridine-3'-phosphate
  modified_base 15: mod_base = OTHER; note = 2'-O-methylguanosine-3'-phosphate
  modified_base 16: mod_base = OTHER; note = 2'-fluoroguanosine-3'-phosphate
  modified_base 17: mod_base = OTHER; note = 2'-O-methylcytidine-3'-phosphate
  modified_base 18: mod_base = OTHER; note = 2'-O-methylguanosine-3'-phosphate
  modified_base 19: mod_base = OTHER; note = 2'-O-methyluridine-3'-phosphate
  modified_base 20: mod_base = OTHER; note = 2'-O-methylcytidine-3'-phosphate
  modified_base 21: mod_base = OTHER; note = 2'-O-methyluridine-3'-phosphorothioate
  modified_base 22: mod_base = OTHER; note = 2'-O-methylcytidine-3'-phosphorothioate
  modified_base 23: mod_base = OTHER; note = 2'-O-methylguanosine-3'-phosphate
taccgcatggctttggcgtctcg

SEQ ID NO: 4304 - RNA, 23 nt, synthetic construct
  source 1..23: mol_type = other RNA
  modified_base 1: mod_base = OTHER; note = Vinyl-phosphonate 2'-O-methyluridine-3'-phosphorothioate
  modified_base 2: mod_base = OTHER; note = 2'-fluoroguanosine-3'-phosphorothioate
  modified_base 3: mod_base = OTHER; note = 2'-O-methyluridine-3'-phosphate
  modified_base 4: mod_base = OTHER; note = 2'-O-methylguanosine-3'-phosphate
  modified_base 5: mod_base = OTHER; note = 2'-O-methyladenosine-3'-phosphate
  modified_base 6: mod_base = OTHER; note = 2'-fluoroguanosine-3'-phosphate
  modified_base 7: mod_base = OTHER; note = 2'-O-methylguanosine-3'-phosphate
  modified_base 8: mod_base = OTHER; note = 2'-fluorouridine-3'-phosphate
  modified_base 9: mod_base = OTHER; note = 2'-fluoroguanosine-3'-phosphate
  modified_base 10: mod_base = OTHER; note = 2'-O-methylguanosine-3'-phosphate
  modified_base 11: mod_base = OTHER; note = 2'-O-methyluridine-3'-phosphate
  modified_base 12: mod_base = OTHER; note = 2'-O-methylguanosine-3'-phosphate
  modified_base 13: mod_base = OTHER; note = 2'-O-methylcytidine-3'-phosphate
  modified_base 14: mod_base = OTHER; note = 2'-fluoroadenosine-3'-phosphate
  modified_base 15: mod_base = OTHER; note = 2'-O-methyluridine-3'-phosphate
  modified_base 16: mod_base = OTHER; note = 2'-fluorouridine-3'-phosphate
  modified_base 17: mod_base = OTHER; note = 2'-O-methyladenosine-3'-phosphate
  modified_base 18: mod_base = OTHER; note = 2'-O-methylguanosine-3'-phosphate
  modified_base 19: mod_base = OTHER; note = 2'-O-methylcytidine-3'-phosphate
  modified_base 20: mod_base = OTHER; note = 2'-O-methyluridine-3'-phosphate
  modified_base 21: mod_base = OTHER; note = 2'-O-methylguanosine-3'-phosphorothioate
  modified_base 22: mod_base = OTHER; note = 2'-O-methyladenosine-3'-phosphorothioate
  modified_base 23: mod_base = OTHER; note = 2'-O-methylcytidine-3'-phosphate
tgtgaggtggtgcattagctgac

SEQ ID NO: 4305 - RNA, 23 nt, synthetic construct
  source 1..23: mol_type = other RNA
  modified_base 1: mod_base = OTHER; note = Vinyl-phosphonate 2'-O-methyluridine-3'-phosphorothioate
  modified_base 2: mod_base = OTHER; note = 2'-fluorouridine -3'-phosphorothioate
  modified_base 3: mod_base = OTHER; note = 2'-O-methyladenosine-3'-phosphate
  modified_base 4: mod_base = OTHER; note = 2'-O-methyluridine-3'-phosphate
  modified_base 5: mod_base = OTHER; note = 2'-O-methyluridine-3'-phosphate
  modified_base 6: mod_base = OTHER; note = 2'-fluorocytidine-3'-phosphate
  modified_base 7: mod_base = OTHER; note = 2'-O-methylguanosine-3'-phosphate
  modified_base 8: mod_base = OTHER; note = 2'-fluorocytidine-3'-phosphate
  modified_base 9: mod_base = OTHER; note = 2'-fluorocytidine-3'-phosphate
  modified_base 10: mod_base = OTHER; note = 2'-O-methylguanosine-3'-phosphate
  modified_base 11: mod_base = OTHER; note = 2'-O-methyluridine-3'-phosphate
  modified_base 12: mod_base = OTHER; note = 2'-O-methylcytidine-3'-phosphate
  modified_base 13: mod_base = OTHER; note = 2'-O-methyluridine-3'-phosphate
  modified_base 14: mod_base = OTHER; note = 2'-fluoroguanosine-3'-phosphate
  modified_base 15: mod_base = OTHER; note = 2'-O-methylcytidine-3'-phosphate
  modified_base 16: mod_base = OTHER; note = 2'-fluorouridine-3'-phosphate
  modified_base 17: mod_base = OTHER; note = 2'-O-methyluridine-3'-phosphate
  modified_base 18: mod_base = OTHER; note = 2'-O-methyluridine-3'-phosphate
  modified_base 19: mod_base = OTHER; note = 2'-O-methyluridine-3'-phosphate
  modified_base 20: mod_base = OTHER; note = 2'-O-methylcytidine-3'-phosphate
  modified_base 21: mod_base = OTHER; note = 2'-O-methylcytidine-3'-phosphorothioate
  modified_base 22: mod_base = OTHER; note = 2'-O-methyluridine-3'-phosphorothioate
  modified_base 23: mod_base = OTHER; note = 2'-O-methyluridine-3'-phosphate
ttattcgccgtctgcttttcctt

SEQ ID NO: 4306 - RNA, 23 nt, synthetic construct
  source 1..23: mol_type = other RNA
  modified_base 1: mod_base = OTHER; note = Vinyl-phosphonate 2'-O-methyluridine-3'-phosphorothioate
  modified_base 2: mod_base = OTHER; note = 2'-fluoroadenosine-3'-phosphorothioate
  modified_base 3: mod_base = OTHER; note = 2'-O-methylguanosine-3'-phosphate
  modified_base 4: mod_base = OTHER; note = 2'-O-methylcytidine-3'-phosphate
  modified_base 5: mod_base = OTHER; note = 2'-O-methyluridine-3'-phosphate
  modified_base 6: mod_base = OTHER; note = 2'-fluorocytidine-3'-phosphate
  modified_base 7: mod_base = OTHER; note = 2'-O-methyladenosine-3'-phosphate
  modified_base 8: mod_base = OTHER; note = 2'-fluorocytidine-3'-phosphate
  modified_base 9: mod_base = OTHER; note = 2'-fluorouridine-3'-phosphate
  modified_base 10: mod_base = OTHER; note = 2'-O-methyladenosine-3'-phosphate
  modified_base 11: mod_base = OTHER; note = 2'-O-methylcytidine-3'-phosphate
  modified_base 12: mod_base = OTHER; note = 2'-O-methylcytidine-3'-phosphate
  modified_base 13: mod_base = OTHER; note = 2'-O-methylcytidine-3'-phosphate
  modified_base 14: mod_base = OTHER; note = 2'-fluoroadenosine-3'-phosphate
  modified_base 15: mod_base = OTHER; note = 2'-O-methylguanosine-3'-phosphate
  modified_base 16: mod_base = OTHER; note = 2'-fluorocytidine-3'-phosphate
  modified_base 17: mod_base = OTHER; note = 2'-O-methyladenosine-3'-phosphate
  modified_base 18: mod_base = OTHER; note = 2'-O-methyladenosine-3'-phosphate
  modified_base 19: mod_base = OTHER; note = 2'-O-methyladenosine-3'-phosphate
  modified_base 20: mod_base = OTHER; note = 2'-O-methylguanosine-3'-phosphate
  modified_base 21: mod_base = OTHER; note = 2'-O-methylcytidine-3'-phosphorothioate
  modified_base 22: mod_base = OTHER; note = 2'-O-methyladenosine-3'-phosphorothioate
  modified_base 23: mod_base = OTHER; note = 2'-O-methylguanosine-3'-phosphate
tagctcactacccagcaaagcag

SEQ ID NO: 4307 - RNA, 23 nt, synthetic construct
  source 1..23: mol_type = other RNA
acttccttcttcatcttgatcat

SEQ ID NO: 4308 - RNA, 23 nt, synthetic construct
  source 1..23: mol_type = other RNA
ttcactctaaaactgatgttcat

SEQ ID NO: 4309 - RNA, 23 nt, synthetic construct
  source 1..23: mol_type = other RNA
catcttctgtatcactgactcac

SEQ ID NO: 4310 - RNA, 23 nt, synthetic construct
  source 1..23: mol_type = other RNA
gtcagatcttctgactgatccaa

SEQ ID NO: 4311 - RNA, 23 nt, synthetic construct
  source 1..23: mol_type = other RNA
actgacacatttttctccataaa

SEQ ID NO: 4312 - RNA, 23 nt, synthetic construct
  source 1..23: mol_type = other RNA
ctggaaactcatttttacataat

SEQ ID NO: 4313 - RNA, 23 nt, synthetic construct
  source 1..23: mol_type = other RNA
ttatcagcaacttagaaattctg

SEQ ID NO: 4314 - RNA, 23 nt, synthetic construct
  source 1..23: mol_type = other RNA
tccttatatttctctagagtaca

SEQ ID NO: 4315 - RNA, 23 nt, synthetic construct
  source 1..23: mol_type = other RNA
aaaactccaagaatcttttatca

SEQ ID NO: 4316 - RNA, 23 nt, synthetic construct
  source 1..23: mol_type = other RNA
gtcttcaaacattcctgcattag

SEQ ID NO: 4317 - RNA, 23 nt, synthetic construct
  source 1..23: mol_type = other RNA
gatcgttcttctcctcaactagc

SEQ ID NO: 4318 - RNA, 23 nt, synthetic construct
  source 1..23: mol_type = other RNA
ccaaagattaatcctctcacacc

SEQ ID NO: 4319 - RNA, 23 nt, synthetic construct
  source 1..23: mol_type = other RNA
aaactaacctcatcaaagataca

SEQ ID NO: 4320 - RNA, 23 nt, synthetic construct
  source 1..23: mol_type = other RNA
cccaccacttattactaataaaa

SEQ ID NO: 4321 - RNA, 23 nt, synthetic construct
  source 1..23: mol_type = other RNA
gctggtactagaaatattctttt

SEQ ID NO: 4322 - RNA, 23 nt, synthetic construct
  source 1..23: mol_type = other RNA
tagctgtcatttgttcactctaa

SEQ ID NO: 4323 - RNA, 23 nt, synthetic construct
  source 1..23: mol_type = other RNA
ccactcaacaatttatgaactat

SEQ ID NO: 4324 - RNA, 23 nt, synthetic construct
  source 1..23: mol_type = other RNA
agagtatgactcattaatagaaa

SEQ ID NO: 4325 - RNA, 23 nt, synthetic construct
  source 1..23: mol_type = other RNA
tactgctgattttcttaataagc

SEQ ID NO: 4326 - RNA, 23 nt, synthetic construct
  source 1..23: mol_type = other RNA
gttatctttagatccacatctta

SEQ ID NO: 4327 - RNA, 23 nt, synthetic construct
  source 1..23: mol_type = other RNA
atcgagacattccttatcacaat

SEQ ID NO: 4328 - RNA, 23 nt, synthetic construct
  source 1..23: mol_type = other RNA
gttactgaatcagattaatttct

SEQ ID NO: 4329 - RNA, 23 nt, synthetic construct
  source 1..23: mol_type = other RNA
cccttacttaaatccttcactgg

SEQ ID NO: 4330 - RNA, 23 nt, synthetic construct
  source 1..23: mol_type = other RNA
tctcgaaagaatcattcaaactt

SEQ ID NO: 4331 - RNA, 23 nt, synthetic construct
  source 1..23: mol_type = other RNA
agaaatgacctatcactacttat

SEQ ID NO: 4332 - RNA, 23 nt, synthetic construct
  source 1..23: mol_type = other RNA
cacaagtcatttcctctctacgg

SEQ ID NO: 4333 - RNA, 23 nt, synthetic construct
  source 1..23: mol_type = other RNA
gcatgcagtttcttacttatcta

SEQ ID NO: 4334 - RNA, 23 nt, synthetic construct
  source 1..23: mol_type = other RNA
gctcaatgcaatacactgttcag

SEQ ID NO: 4335 - RNA, 23 nt, synthetic construct
  source 1..23: mol_type = other RNA
tatctatgtacctactgacacat

SEQ ID NO: 4336 - RNA, 23 nt, synthetic construct
  source 1..23: mol_type = other RNA
tttgaattccagtcttatcttat

SEQ ID NO: 4337 - RNA, 23 nt, synthetic construct
  source 1..23: mol_type = other RNA
atttgctgtaataccaaaactaa

SEQ ID NO: 4338 - RNA, 23 nt, synthetic construct
  source 1..23: mol_type = other RNA
ttggatcacttctttcaaatcag

SEQ ID NO: 4339 - RNA, 23 nt, synthetic construct
  source 1..23: mol_type = other RNA
aggaactagaaaactattcttaa

SEQ ID NO: 4340 - RNA, 23 nt, synthetic construct
  source 1..23: mol_type = other RNA
tcacatttccatactgtctgtta

SEQ ID NO: 4341 - RNA, 23 nt, synthetic construct
  source 1..23: mol_type = other RNA
tttgatccttcacagtgtcaata

SEQ ID NO: 4342 - RNA, 23 nt, synthetic construct
  source 1..23: mol_type = other RNA
ctgatttctgagaacaagtaaag

SEQ ID NO: 4343 - RNA, 23 nt, synthetic construct
  source 1..23: mol_type = other RNA
accctacttgtgaaatacatttg

SEQ ID NO: 4344 - RNA, 23 nt, synthetic construct
  source 1..23: mol_type = other RNA
agcaactggaattttccaatttt

SEQ ID NO: 4345 - RNA, 23 nt, synthetic construct
  source 1..23: mol_type = other RNA
gctctaatcctgatgagagttat

SEQ ID NO: 4346 - RNA, 23 nt, synthetic construct
  source 1..23: mol_type = other RNA
taagcctcattatcaaaattctg

SEQ ID NO: 4347 - RNA, 23 nt, synthetic construct
  source 1..23: mol_type = other RNA
tcaatttctgatgctttttacta

SEQ ID NO: 4348 - RNA, 23 nt, synthetic construct
  source 1..23: mol_type = other RNA
tgtaccattagatgaaatcttac

SEQ ID NO: 4349 - RNA, 23 nt, synthetic construct
  source 1..23: mol_type = other RNA
tcctgtgaattcttccaaccatg

SEQ ID NO: 4350 - RNA, 23 nt, synthetic construct
  source 1..23: mol_type = other RNA
acctaatactccagatttttatc

SEQ ID NO: 4351 - RNA, 23 nt, synthetic construct
  source 1..23: mol_type = other RNA
aaggacacatacattgaataaat

SEQ ID NO: 4352 - RNA, 23 nt, synthetic construct
  source 1..23: mol_type = other RNA
actttgtcataatgctgctttgc

SEQ ID NO: 4353 - RNA, 23 nt, synthetic construct
  source 1..23: mol_type = other RNA
tgttcatctttctgttaatttcc

SEQ ID NO: 4354 - RNA, 23 nt, synthetic construct
  source 1..23: mol_type = other RNA
cacagtgaaaccattaattttcc

SEQ ID NO: 4355 - RNA, 23 nt, synthetic construct
  source 1..23: mol_type = other RNA
cctaactgcaagactgatttctg

SEQ ID NO: 4356 - RNA, 23 nt, synthetic construct
  source 1..23: mol_type = other RNA
ggagaattcctccttacctcaag

SEQ ID NO: 4357 - RNA, 23 nt, synthetic construct
  source 1..23: mol_type = other RNA
catattacagatcttactttgtt

SEQ ID NO: 4358 - RNA, 23 nt, synthetic construct
  source 1..23: mol_type = other RNA
gcttatctgaaagatatcaattt

SEQ ID NO: 4359 - RNA, 23 nt, synthetic construct
  source 1..23: mol_type = other RNA
acagatctgttctggaaaatcat

SEQ ID NO: 4360 - RNA, 23 nt, synthetic construct
  source 1..23: mol_type = other RNA
cgcccagaatacaacttccttct

SEQ ID NO: 4361 - RNA, 23 nt, synthetic construct
  source 1..23: mol_type = other RNA
gagttgatctttcagtgctaaat

SEQ ID NO: 4362 - RNA, 23 nt, synthetic construct
  source 1..23: mol_type = other RNA
cactaagctttatttattagacg

SEQ ID NO: 4363 - RNA, 23 nt, synthetic construct
  source 1..23: mol_type = other RNA
tcagcttggaatctatatctttc

SEQ ID NO: 4364 - RNA, 23 nt, synthetic construct
  source 1..23: mol_type = other RNA
acttattatttctgaagcctaac

SEQ ID NO: 4365 - RNA, 23 nt, synthetic construct
  source 1..23: mol_type = other RNA
gacctttgttgtatttaacaaaa

SEQ ID NO: 4366 - RNA, 23 nt, synthetic construct
  source 1..23: mol_type = other RNA
tggctctctaactaatcgatcac

SEQ ID NO: 4367 - RNA, 23 nt, synthetic construct
  source 1..23: mol_type = other RNA
ctaaagactacatgacagaaatg

SEQ ID NO: 4368 - RNA, 23 nt, synthetic construct
  source 1..23: mol_type = other RNA
ctcaggattcgtatttttaaaga

SEQ ID NO: 4369 - RNA, 23 nt, synthetic construct
  source 1..23: mol_type = other RNA
acccttgctaagtaattgacata

SEQ ID NO: 4370 - RNA, 23 nt, synthetic construct
  source 1..23: mol_type = other RNA
ctcctatgcactttcacaggaac

SEQ ID NO: 4371 - RNA, 23 nt, synthetic construct
  source 1..23: mol_type = other RNA
aaatgctgaaatatgtttcaaca

SEQ ID NO: 4372 - RNA, 23 nt, synthetic construct
  source 1..23: mol_type = other RNA
ggccttttaattcaaatctactg

SEQ ID NO: 4373 - RNA, 23 nt, synthetic construct
  source 1..23: mol_type = other RNA
atactggacttattggatttaat

SEQ ID NO: 4374 - RNA, 23 nt, synthetic construct
  source 1..23: mol_type = other RNA
aacatctgaatcagatggtacag

SEQ ID NO: 4375 - RNA, 23 nt, synthetic construct
  source 1..23: mol_type = other RNA
gaaattctgatagcaatctgtgt

SEQ ID NO: 4376 - RNA, 23 nt, synthetic construct
  source 1..23: mol_type = other RNA
tttcaagtcaaggatgctatcta

SEQ ID NO: 4377 - RNA, 23 nt, synthetic construct
  source 1..23: mol_type = other RNA
cctcactgaaaaccacaagatat

SEQ ID NO: 4378 - RNA, 23 nt, synthetic construct
  source 1..23: mol_type = other RNA
ctacctgttgaacagtcttcaag

SEQ ID NO: 4379 - RNA, 23 nt, synthetic construct
  source 1..23: mol_type = other RNA
actcaagtgacatatttcagtta

SEQ ID NO: 4380 - RNA, 23 nt, synthetic construct
  source 1..23: mol_type = other RNA
gctcaggaacttcaggattgcta

SEQ ID NO: 4381 - RNA, 23 nt, synthetic construct
  source 1..23: mol_type = other RNA
ctacggagtattagtagcttaat

SEQ ID NO: 4382 - RNA, 23 nt, synthetic construct
  source 1..23: mol_type = other RNA
gcattgtcaatgaattttatgag

SEQ ID NO: 4383 - RNA, 23 nt, synthetic construct
  source 1..23: mol_type = other RNA
gtgaacagcaaacaaatattgaa

SEQ ID NO: 4384 - RNA, 23 nt, synthetic construct
  source 1..23: mol_type = other RNA
tatgaactattttcgtgcattag

SEQ ID NO: 4385 - RNA, 23 nt, synthetic construct
  source 1..23: mol_type = other RNA
gaactggaatacttatttttcat

SEQ ID NO: 4386 - RNA, 23 nt, synthetic construct
  source 1..23: mol_type = other RNA
cgttatcttgcagagatctctgg

SEQ ID NO: 4387 - RNA, 23 nt, synthetic construct
  source 1..23: mol_type = other RNA
tggaagtgttagaatttttgatc

SEQ ID NO: 4388 - RNA, 23 nt, synthetic construct
  source 1..23: mol_type = other RNA
tatcaatttaagatctctggaag

SEQ ID NO: 4389 - RNA, 23 nt, synthetic construct
  source 1..23: mol_type = other RNA
aatggaccatatttacaatgttt

SEQ ID NO: 4390 - RNA, 23 nt, synthetic construct
  source 1..23: mol_type = other RNA
tttagtcattgaagcaatccttg

SEQ ID NO: 4391 - RNA, 23 nt, synthetic construct
  source 1..23: mol_type = other RNA
aaagctgtttaggtttaacaatg

SEQ ID NO: 4392 - RNA, 23 nt, synthetic construct
  source 1..23: mol_type = other RNA
gccaaggcaaatgatgtaaatag

SEQ ID NO: 4393 - RNA, 23 nt, synthetic construct
  source 1..23: mol_type = other RNA
aaatccaattactactggaaact

SEQ ID NO: 4394 - RNA, 23 nt, synthetic construct
  source 1..23: mol_type = other RNA
gcacttacaatatatatatcctg

SEQ ID NO: 4395 - RNA, 23 nt, synthetic construct
  source 1..23: mol_type = other RNA
acatgcagtttggtatctgacaa

SEQ ID NO: 4396 - RNA, 23 nt, synthetic construct
  source 1..23: mol_type = other RNA
taccttatttcaagacactggtt

SEQ ID NO: 4397 - RNA, 23 nt, synthetic construct
  source 1..23: mol_type = other RNA
atgaagggatttattctttagtc

SEQ ID NO: 4398 - RNA, 23 nt, synthetic construct
  source 1..23: mol_type = other RNA
caatccttgctacggatcttaaa

SEQ ID NO: 4399 - RNA, 23 nt, synthetic construct
  source 1..23: mol_type = other RNA
ctactgactatcccgaagcaaag

SEQ ID NO: 4400 - RNA, 23 nt, synthetic construct
  source 1..23: mol_type = other RNA
agtgtatttctgctattatttcc

SEQ ID NO: 4401 - RNA, 23 nt, synthetic construct
  source 1..23: mol_type = other RNA
tatgtaacaataactagcctaaa

SEQ ID NO: 4402 - RNA, 23 nt, synthetic construct
  source 1..23: mol_type = other RNA
ttgttgtttttactctagctcag

SEQ ID NO: 4403 - RNA, 23 nt, synthetic construct
  source 1..23: mol_type = other RNA
ctcaggcagttttatacaatgac

SEQ ID NO: 4404 - RNA, 23 nt, synthetic construct
  source 1..23: mol_type = other RNA
gaaggattctcagtcaggttatg

SEQ ID NO: 4405 - RNA, 23 nt, synthetic construct
  source 1..23: mol_type = other RNA
acattttccatcatgtttaagtg

SEQ ID NO: 4406 - RNA, 23 nt, synthetic construct
  source 1..23: mol_type = other RNA
gctgccacttttgttaccattgt

SEQ ID NO: 4407 - RNA, 23 nt, synthetic construct
  source 1..23: mol_type = other RNA
aaacttgctagtgtgtggatatg

SEQ ID NO: 4408 - RNA, 23 nt, synthetic construct
  source 1..23: mol_type = other RNA
gaaatcttacttgagaaattgcc

SEQ ID NO: 4409 - RNA, 23 nt, synthetic construct
  source 1..23: mol_type = other RNA
aaagttcgagacttgcatttgaa

SEQ ID NO: 4410 - RNA, 23 nt, synthetic construct
  source 1..23: mol_type = other RNA
acccatagaatttcctgatactg

SEQ ID NO: 4411 - RNA, 23 nt, synthetic construct
  source 1..23: mol_type = other RNA
caaggtaattcctttagaatatg

SEQ ID NO: 4412 - RNA, 23 nt, synthetic construct
  source 1..23: mol_type = other RNA
aacttatggaaactcaacaagaa

SEQ ID NO: 4413 - RNA, 23 nt, synthetic construct
  source 1..23: mol_type = other RNA
aaaagcagcattttaaattacga

SEQ ID NO: 4414 - RNA, 23 nt, synthetic construct
  source 1..23: mol_type = other RNA
gctgactctcaactgaccattcc

SEQ ID NO: 4415 - RNA, 23 nt, synthetic construct
  source 1..23: mol_type = other RNA
ctaggtttatccatgaaggactg

SEQ ID NO: 4416 - RNA, 23 nt, synthetic construct
  source 1..23: mol_type = other RNA
tcaccaagaatttggcatttcaa

SEQ ID NO: 4417 - RNA, 23 nt, synthetic construct
  source 1..23: mol_type = other RNA
cttatctagaatatttggcttat

SEQ ID NO: 4418 - RNA, 23 nt, synthetic construct
  source 1..23: mol_type = other RNA
ctctcctgcagaatacatacaag

SEQ ID NO: 4419 - RNA, 23 nt, synthetic construct
  source 1..23: mol_type = other RNA
tctcacaccatttcctggatttt

SEQ ID NO: 4420 - RNA, 23 nt, synthetic construct
  source 1..23: mol_type = other RNA
tcatgtggaattcaagcgctttc

SEQ ID NO: 4421 - RNA, 23 nt, synthetic construct
  source 1..23: mol_type = other RNA
ctattgtgtattatctactatgt

SEQ ID NO: 4422 - RNA, 23 nt, synthetic construct
  source 1..23: mol_type = other RNA
agaatggagtaatgaaaatgatc

SEQ ID NO: 4423 - RNA, 23 nt, synthetic construct
  source 1..23: mol_type = other RNA
acactggtttattggaaatattt

SEQ ID NO: 4424 - RNA, 23 nt, synthetic construct
  source 1..23: mol_type = other RNA
tacaagtgtatgtgtataaagtc

SEQ ID NO: 4425 - RNA, 23 nt, synthetic construct
  source 1..23: mol_type = other RNA
tgtacaagcatgcatattgagat

SEQ ID NO: 4426 - RNA, 23 nt, synthetic construct
  source 1..23: mol_type = other RNA
agtgtgtcttttatgtctttgaa

SEQ ID NO: 4427 - RNA, 23 nt, synthetic construct
  source 1..23: mol_type = other RNA
tgattttctcgcagaattcaatg

SEQ ID NO: 4428 - RNA, 23 nt, synthetic construct
  source 1..23: mol_type = other RNA
aatagcgacagtttgagtaaaag

SEQ ID NO: 4429 - RNA, 23 nt, synthetic construct
  source 1..23: mol_type = other RNA
cactggtgtatgaatactttgtc

SEQ ID NO: 4430 - RNA, 23 nt, synthetic construct
  source 1..23: mol_type = other RNA
aggtgataagtggctaacagaag

SEQ ID NO: 4431 - RNA, 23 nt, synthetic construct
  source 1..23: mol_type = other RNA
tggtaggctaatattttctatta

SEQ ID NO: 4432 - RNA, 23 nt, synthetic construct
  source 1..23: mol_type = other RNA
cgcctcttcatcctcgactgtcc

SEQ ID NO: 4433 - RNA, 23 nt, synthetic construct
  source 1..23: mol_type = other RNA
gaaattgccataagccatattac

SEQ ID NO: 4434 - RNA, 23 nt, synthetic construct
  source 1..23: mol_type = other RNA
cggcgaatattttgtcagctaat

SEQ ID NO: 4435 - RNA, 23 nt, synthetic construct
  source 1..23: mol_type = other RNA
gaatccagtgttgcctttctgag

SEQ ID NO: 4436 - RNA, 23 nt, synthetic construct
  source 1..23: mol_type = other RNA
gaaaagtctatgcctgtctaaaa

SEQ ID NO: 4437 - RNA, 23 nt, synthetic construct
  source 1..23: mol_type = other RNA
atggacatcagaagtttgaattc

SEQ ID NO: 4438 - RNA, 23 nt, synthetic construct
  source 1..23: mol_type = other RNA
tgggcgaattgcttatatttctt

SEQ ID NO: 4439 - RNA, 23 nt, synthetic construct
  source 1..23: mol_type = other RNA
cacacactatgtgtaaaccagtc

SEQ ID NO: 4440 - RNA, 23 nt, synthetic construct
  source 1..23: mol_type = other RNA
atcaggtgaagaagaaaacattt

SEQ ID NO: 4441 - RNA, 23 nt, synthetic construct
  source 1..23: mol_type = other RNA
tagtgagctcttatttttcactg

SEQ ID NO: 4442 - RNA, 23 nt, synthetic construct
  source 1..23: mol_type = other RNA
gtaaagctgatgggaataaactg

SEQ ID NO: 4443 - RNA, 23 nt, synthetic construct
  source 1..23: mol_type = other RNA
gcgtgtcgttaggagaaactgca

SEQ ID NO: 4444 - RNA, 23 nt, synthetic construct
  source 1..23: mol_type = other RNA
ttgggacttaaaacaatggtata

SEQ ID NO: 4445 - RNA, 23 nt, synthetic construct
  source 1..23: mol_type = other RNA
ttctgatggtagaattaaccatg

SEQ ID NO: 4446 - RNA, 23 nt, synthetic construct
  source 1..23: mol_type = other RNA
ctactatgtgtgttttatttctg

SEQ ID NO: 4447 - RNA, 23 nt, synthetic construct
  source 1..23: mol_type = other RNA
gactgataatttatatttgcact

SEQ ID NO: 4448 - RNA, 23 nt, synthetic construct
  source 1..23: mol_type = other RNA
tagtccttaaattatttaaccct

SEQ ID NO: 4449 - RNA, 23 nt, synthetic construct
  source 1..23: mol_type = other RNA
ctcgcaatatggtgtcagatctt

SEQ ID NO: 4450 - RNA, 23 nt, synthetic construct
  source 1..23: mol_type = other RNA
tcttcgaagagctgctctaatcc

SEQ ID NO: 4451 - RNA, 23 nt, synthetic construct
  source 1..23: mol_type = other RNA
tatttctgctgagagtattcagg

SEQ ID NO: 4452 - RNA, 23 nt, synthetic construct
  source 1..23: mol_type = other RNA
tattgaacaggaagtatcactgg

SEQ ID NO: 4453 - RNA, 23 nt, synthetic construct
  source 1..23: mol_type = other RNA
gttgccttgtatttccagagaac

SEQ ID NO: 4454 - RNA, 23 nt, synthetic construct
  source 1..23: mol_type = other RNA
cagttactatggcagttgcaaaa

SEQ ID NO: 4455 - RNA, 23 nt, synthetic construct
  source 1..23: mol_type = other RNA
ccatggctgaattttaaagctgt

SEQ ID NO: 4456 - RNA, 23 nt, synthetic construct
  source 1..23: mol_type = other RNA
cagtccattcatggatcgttctt

SEQ ID NO: 4457 - RNA, 23 nt, synthetic construct
  source 1..23: mol_type = other RNA
cctgtgtaactcctatgatgctg

SEQ ID NO: 4458 - RNA, 23 nt, synthetic construct
  source 1..23: mol_type = other RNA
gctggcagtttcccactcctatg

SEQ ID NO: 4459 - RNA, 23 nt, synthetic construct
  source 1..23: mol_type = other RNA
tacctcaagcagatgagattcag

SEQ ID NO: 4460 - RNA, 23 nt, synthetic construct
  source 1..23: mol_type = other RNA
ttatgttgttttctcaaaagcag

SEQ ID NO: 4461 - RNA, 23 nt, synthetic construct
  source 1..23: mol_type = other RNA
ctgagggatttctgctcaatgca

SEQ ID NO: 4462 - RNA, 23 nt, synthetic construct
  source 1..23: mol_type = other RNA
gtgccttcttcttcctcacctgc

SEQ ID NO: 4463 - RNA, 23 nt, synthetic construct
  source 1..23: mol_type = other RNA
tattgagattgaatcacatttcc

SEQ ID NO: 4464 - RNA, 23 nt, synthetic construct
  source 1..23: mol_type = other RNA
cactgttcagtgctattctccca

SEQ ID NO: 4465 - RNA, 23 nt, synthetic construct
  source 1..23: mol_type = other RNA
ttcctggcttacagcagatccac

SEQ ID NO: 4466 - RNA, 23 nt, synthetic construct
  source 1..23: mol_type = other RNA
aagacagcagaaaattatttcag

SEQ ID NO: 4467 - RNA, 23 nt, synthetic construct
  source 1..23: mol_type = other RNA
tattgggtttctttagtttatgt

SEQ ID NO: 4468 - RNA, 23 nt, synthetic construct
  source 1..23: mol_type = other RNA
ctcaccatgtaggtctcagaaga

SEQ ID NO: 4469 - RNA, 23 nt, synthetic construct
  source 1..23: mol_type = other RNA
tggttgtggaacaggaaatgaaa

SEQ ID NO: 4470 - RNA, 23 nt, synthetic construct
  source 1..23: mol_type = other RNA
ttggagaacatatcatattttgg

SEQ ID NO: 4471 - RNA, 23 nt, synthetic construct
  source 1..23: mol_type = other RNA
agcagccaaaatgatggcaaaat

SEQ ID NO: 4472 - RNA, 23 nt, synthetic construct
  source 1..23: mol_type = other RNA
ttccaatttttgaacttgtagaa

SEQ ID NO: 4473 - RNA, 23 nt, synthetic construct
  source 1..23: mol_type = other RNA
aaataggaatagtttgccaactc

SEQ ID NO: 4474 - RNA, 23 nt, synthetic construct
  source 1..23: mol_type = other RNA
tctttgaatgttttggagaaaag

SEQ ID NO: 4475 - RNA, 23 nt, synthetic construct
  source 1..23: mol_type = other RNA
gtgtcaatatttaatgaatcact

SEQ ID NO: 4476 - RNA, 23 nt, synthetic construct
  source 1..23: mol_type = other RNA
tgtgagaatatattaaatgcaca

SEQ ID NO: 4477 - RNA, 23 nt, synthetic construct
  source 1..23: mol_type = other RNA
cttaacaagggactaaataggaa

SEQ ID NO: 4478 - RNA, 23 nt, synthetic construct
  source 1..23: mol_type = other RNA
gcggcttcttcttccacctctgc

SEQ ID NO: 4479 - RNA, 23 nt, synthetic construct
  source 1..23: mol_type = other RNA
aattggaacatgtggttatcttt

SEQ ID NO: 4480 - RNA, 23 nt, synthetic construct
  source 1..23: mol_type = other RNA
tccagagaacagatgattctttg

SEQ ID NO: 4481 - RNA, 23 nt, synthetic construct
  source 1..23: mol_type = other RNA
gtctgttattttattgggtttta

SEQ ID NO: 4482 - RNA, 23 nt, synthetic construct
  source 1..23: mol_type = other RNA
agatgaagaagcaaatcttggtc

SEQ ID NO: 4483 - RNA, 23 nt, synthetic construct
  source 1..23: mol_type = other RNA
attttggaatcatgcaattttgc

SEQ ID NO: 4484 - RNA, 23 nt, synthetic construct
  source 1..23: mol_type = other RNA
tacaatgttttgtaaacttgcta

SEQ ID NO: 4485 - RNA, 23 nt, synthetic construct
  source 1..23: mol_type = other RNA
tgggatcgtaataatggcaaaag

SEQ ID NO: 4486 - RNA, 23 nt, synthetic construct
  source 1..23: mol_type = other RNA
gggtgctttctcaggttcctgta

SEQ ID NO: 4487 - RNA, 23 nt, synthetic construct
  source 1..23: mol_type = other RNA
taatgatactgaaagtggtgatg

SEQ ID NO: 4488 - RNA, 23 nt, synthetic construct
  source 1..23: mol_type = other RNA
tatcactggacctgattttagta

SEQ ID NO: 4489 - RNA, 23 nt, synthetic construct
  source 1..23: mol_type = other RNA
aggaactttttgcttttatgaaa

SEQ ID NO: 4490 - RNA, 23 nt, synthetic construct
  source 1..23: mol_type = other RNA
atgaacacagcacagatttgtta

SEQ ID NO: 4491 - RNA, 23 nt, synthetic construct
  source 1..23: mol_type = other RNA
agatatggaaggaaatcgtagag

SEQ ID NO: 4492 - RNA, 23 nt, synthetic construct
  source 1..23: mol_type = other RNA
atgctatctaaatgggcctttta

SEQ ID NO: 4493 - RNA, 23 nt, synthetic construct
  source 1..23: mol_type = other RNA
tccaaaaccaccaagaaggaaaa

SEQ ID NO: 4494 - RNA, 23 nt, synthetic construct
  source 1..23: mol_type = other RNA
tgccacagatgtgctacatgcag

SEQ ID NO: 4495 - RNA, 23 nt, synthetic construct
  source 1..23: mol_type = other RNA
ataaagtcatacatgtacaagca

SEQ ID NO: 4496 - RNA, 23 nt, synthetic construct
  source 1..23: mol_type = other RNA
gttagaagcagaagaggataatg

SEQ ID NO: 4497 - RNA, 23 nt, synthetic construct
  source 1..23: mol_type = other RNA
agcgtgtgttcgcacagcttgag

SEQ ID NO: 4498 - RNA, 23 nt, synthetic construct
  source 1..23: mol_type = other RNA
gagctggtgttttgtccagtctg

SEQ ID NO: 4499 - RNA, 23 nt, synthetic construct
  source 1..23: mol_type = other RNA
aaatggaaaacaatctaaatcca

SEQ ID NO: 4500 - RNA, 23 nt, synthetic construct
  source 1..23: mol_type = other RNA
tgcattagaaaatggctatcgag

SEQ ID NO: 4501 - RNA, 23 nt, synthetic construct
  source 1..23: mol_type = other RNA
aaatggacagaaggcattgtcaa

SEQ ID NO: 4502 - RNA, 23 nt, synthetic construct
  source 1..23: mol_type = other RNA
tacagattgctgcagtggaaaat

SEQ ID NO: 4503 - RNA, 23 nt, synthetic construct
  source 1..23: mol_type = other RNA
ggaggtggaaatggagttgatct

SEQ ID NO: 4504 - RNA, 23 nt, synthetic construct
  source 1..23: mol_type = other RNA
ctctgggcaatgcacctaatact

SEQ ID NO: 4505 - RNA, 23 nt, synthetic construct
  source 1..23: mol_type = other RNA
taatttccctctgcctaaagact

SEQ ID NO: 4506 - RNA, 23 nt, synthetic construct
  source 1..23: mol_type = other RNA
gccgcttctgcaacgtggagctg

SEQ ID NO: 4507 - RNA, 23 nt, synthetic construct
  source 1..23: mol_type = other RNA
atagattcatattgtatttccca

SEQ ID NO: 4508 - RNA, 23 nt, synthetic construct
  source 1..23: mol_type = other RNA
ggaggacaaatgcatttctagtg

SEQ ID NO: 4509 - RNA, 23 nt, synthetic construct
  source 1..23: mol_type = other RNA
tattagacgtgttgagtgagtgc

SEQ ID NO: 4510 - RNA, 23 nt, synthetic construct
  source 1..23: mol_type = other RNA
agctgtggacatcaaatgctgaa

SEQ ID NO: 4511 - RNA, 23 nt, synthetic construct
  source 1..23: mol_type = other RNA
acaggccttaatactgtgagagg

SEQ ID NO: 4512 - RNA, 23 nt, synthetic construct
  source 1..23: mol_type = other RNA
gcagaaatcattgcctagtgttc

SEQ ID NO: 4513 - RNA, 23 nt, synthetic construct
  source 1..23: mol_type = other RNA
agtgagtgctgagttccttgctg

SEQ ID NO: 4514 - RNA, 23 nt, synthetic construct
  source 1..23: mol_type = other RNA
ctgccatgcatgattatgatcac

SEQ ID NO: 4515 - RNA, 23 nt, synthetic construct
  source 1..23: mol_type = other RNA
gatgctgctggtttgctaccagg

SEQ ID NO: 4516 - RNA, 23 nt, synthetic construct
  source 1..23: mol_type = other RNA
ggcagatgaagaggaatagcgac

SEQ ID NO: 4517 - RNA, 23 nt, synthetic construct
  source 1..23: mol_type = other RNA
aaatccaggtgcatcaatttctg

SEQ ID NO: 4518 - RNA, 23 nt, synthetic construct
  source 1..23: mol_type = other RNA
ttaataagccaagcgttatcttg

SEQ ID NO: 4519 - RNA, 23 nt, synthetic construct
  source 1..23: mol_type = other RNA
gtgagaggatccttgctctgctg

SEQ ID NO: 4520 - RNA, 23 nt, synthetic construct
  source 1..23: mol_type = other RNA
tgatgatgaagacggtgaagaat

SEQ ID NO: 4521 - RNA, 23 nt, synthetic construct
  source 1..23: mol_type = other RNA
attcgtaagtgtaagaaagaatg

SEQ ID NO: 4522 - RNA, 23 nt, synthetic construct
  source 1..23: mol_type = other RNA
caatctgtgtaacagctgtggac

SEQ ID NO: 4523 - RNA, 23 nt, synthetic construct
  source 1..23: mol_type = other RNA
atatttaaaattcccactcaaca

SEQ ID NO: 4524 - RNA, 23 nt, synthetic construct
  source 1..23: mol_type = other RNA
tggaccagtgtctactggctctc

SEQ ID NO: 4525 - RNA, 23 nt, synthetic construct
  source 1..23: mol_type = other RNA
agcgctttcgttttttagtcatt

SEQ ID NO: 4526 - RNA, 23 nt, synthetic construct
  source 1..23: mol_type = other RNA
catccgtgttgacccatgttgca

SEQ ID NO: 4527 - RNA, 23 nt, synthetic construct
  source 1..23: mol_type = other RNA
agatacagaagatgaagaaatgg

SEQ ID NO: 4528 - RNA, 23 nt, synthetic construct
  source 1..23: mol_type = other RNA
tctctcccgagctgaaacttaaa

SEQ ID NO: 4529 - RNA, 23 nt, synthetic construct
  source 1..23: mol_type = other RNA
tgtgcatcaaactggcagatata

SEQ ID NO: 4530 - RNA, 23 nt, synthetic construct
  source 1..23: mol_type = other RNA
agttgcaaaatattcaggagacc

SEQ ID NO: 4531 - RNA, 23 nt, synthetic construct
  source 1..23: mol_type = other RNA
tcacaatcgtatacatgccacag

SEQ ID NO: 4532 - RNA, 23 nt, synthetic construct
  source 1..23: mol_type = other RNA
ttaatagaaaagatgagcaactg

SEQ ID NO: 4533 - RNA, 23 nt, synthetic construct
  source 1..23: mol_type = other RNA
cttatcttatgttccatggctga

SEQ ID NO: 4534 - RNA, 23 nt, synthetic construct
  source 1..23: mol_type = other RNA
ggctacgtgaagagctgcgtgag

SEQ ID NO: 4535 - RNA, 23 nt, synthetic construct
  source 1..23: mol_type = other RNA
tagaattgatggctctatacgtg

SEQ ID NO: 4536 - RNA, 23 nt, synthetic construct
  source 1..23: mol_type = other RNA
gattcaggtaattgaagaggcag

SEQ ID NO: 4537 - RNA, 23 nt, synthetic construct
  source 1..23: mol_type = other RNA
tgaaggactgagtgacctttgtt

SEQ ID NO: 4538 - RNA, 23 nt, synthetic construct
  source 1..23: mol_type = other RNA
cccgagagtctgaggaacggcta

SEQ ID NO: 4539 - RNA, 23 nt, synthetic construct
  source 1..23: mol_type = other RNA
tgattctttgggattgggactta

SEQ ID NO: 4540 - RNA, 23 nt, synthetic construct
  source 1..23: mol_type = other RNA
gctaccaggtcagtggttagaag

SEQ ID NO: 4541 - RNA, 23 nt, synthetic construct
  source 1..23: mol_type = other RNA
gtattcaggtttgccatggacat

SEQ ID NO: 4542 - RNA, 23 nt, synthetic construct
  source 1..23: mol_type = other RNA
cggcagctaaactggtcctggag

SEQ ID NO: 4543 - RNA, 23 nt, synthetic construct
  source 1..23: mol_type = other RNA
atagtaatggcatagaatggagt

SEQ ID NO: 4544 - RNA, 23 nt, synthetic construct
  source 1..23: mol_type = other RNA
ataattgcaagaaaatggaccat

SEQ ID NO: 4545 - RNA, 23 nt, synthetic construct
  source 1..23: mol_type = other RNA
tccggcactgcgttctggtgctg

SEQ ID NO: 4546 - RNA, 23 nt, synthetic construct
  source 1..23: mol_type = other RNA
aaagtcatattgaagaagcccag

SEQ ID NO: 4547 - RNA, 23 nt, synthetic construct
  source 1..23: mol_type = other RNA
aatcatcatgctgcgtcagcttg

SEQ ID NO: 4548 - RNA, 23 nt, synthetic construct
  source 1..23: mol_type = other RNA
gaaaatgatcgcctcttggtatg

SEQ ID NO: 4549 - RNA, 23 nt, synthetic construct
  source 1..23: mol_type = other RNA
acatttgaagatataaagagcag

SEQ ID NO: 4550 - RNA, 23 nt, synthetic construct
  source 1..23: mol_type = other RNA
tgggtctccttcaccagcctcgg

SEQ ID NO: 4551 - RNA, 23 nt, synthetic construct
  source 1..23: mol_type = other RNA
aggaaacagagaagaaagacagc

SEQ ID NO: 4552 - RNA, 23 nt, synthetic construct
  source 1..23: mol_type = other RNA
atttctagtggctacaaatgccc

SEQ ID NO: 4553 - RNA, 23 nt, synthetic construct
  source 1..23: mol_type = other RNA
tgggagagaaatcaggaaggatt

SEQ ID NO: 4554 - RNA, 23 nt, synthetic construct
  source 1..23: mol_type = other RNA
aaatatagtgagccctaaaggac

SEQ ID NO: 4555 - RNA, 23 nt, synthetic construct
  source 1..23: mol_type = other RNA
tggctgcctttgtcctcgccctg

SEQ ID NO: 4556 - RNA, 23 nt, synthetic construct
  source 1..23: mol_type = other RNA
atggcaaaagacctcaccaagaa

SEQ ID NO: 4557 - RNA, 23 nt, synthetic construct
  source 1..23: mol_type = other RNA
tcttcagcatcgcctgtgccttc

SEQ ID NO: 4558 - RNA, 23 nt, synthetic construct
  source 1..23: mol_type = other RNA
gtgctaaatgaggctcgcaatat

SEQ ID NO: 4559 - RNA, 23 nt, synthetic construct
  source 1..23: mol_type = other RNA
gccagcttcgtctggtgggtctc

SEQ ID NO: 4560 - RNA, 23 nt, synthetic construct
  source 1..23: mol_type = other RNA
gaatatggtattggcatgcagtt

SEQ ID NO: 4561 - RNA, 23 nt, synthetic construct
  source 1..23: mol_type = other RNA
ataaactgcaggtggagaattcc

SEQ ID NO: 4562 - RNA, 23 nt, synthetic construct
  source 1..23: mol_type = other RNA
gttatggctgcctgtcttcaaac

SEQ ID NO: 4563 - RNA, 23 nt, synthetic construct
  source 1..23: mol_type = other RNA
ccctgttctgaaatagaggaccc

SEQ ID NO: 4564 - RNA, 23 nt, synthetic construct
  source 1..23: mol_type = other RNA
tttctatttttaaagccgctggt

SEQ ID NO: 4565 - RNA, 23 nt, synthetic construct
  source 1..23: mol_type = other RNA
cagctgaggagaagctcaggaac

SEQ ID NO: 4566 - RNA, 23 nt, synthetic construct
  source 1..23: mol_type = other RNA
tccaagccttccaccacaagtca

SEQ ID NO: 4567 - RNA, 23 nt, synthetic construct
  source 1..23: mol_type = other RNA
atttcagttaccaaagtggccag

SEQ ID NO: 4568 - RNA, 23 nt, synthetic construct
  source 1..23: mol_type = other RNA
ctcacctgcttcctcacccggac

SEQ ID NO: 4569 - RNA, 23 nt, synthetic construct
  source 1..23: mol_type = other RNA
tcttttatcacccacatagtggg

SEQ ID NO: 4570 - RNA, 23 nt, synthetic construct
  source 1..23: mol_type = other RNA
tcaggagaccgtcgttgccttgt

SEQ ID NO: 4571 - RNA, 23 nt, synthetic construct
  source 1..23: mol_type = other RNA
aaatggcccagcaaaagttcgag

SEQ ID NO: 4572 - RNA, 23 nt, synthetic construct
  source 1..23: mol_type = other RNA
cgagacgccaaagccatgcggtc

SEQ ID NO: 4573 - RNA, 23 nt, synthetic construct
  source 1..23: mol_type = other RNA
gtcagctaatgcaccacctcact

SEQ ID NO: 4574 - RNA, 23 nt, synthetic construct
  source 1..23: mol_type = other RNA
aaggaaaagcagacggcgaatat

SEQ ID NO: 4575 - RNA, 23 nt, synthetic construct
  source 1..23: mol_type = other RNA
ctgctttgctgggtagtgagctc

SEQ ID NO: 4576 - RNA, 21 nt, synthetic construct
  source 1..21: mol_type = other RNA
aaatgaaacagattctgatga

SEQ ID NO: 4577 - RNA, 23 nt, synthetic construct
  source 1..23: mol_type = other RNA
tcatcagaatctgtttcatttcc

SEQ ID NO: 4578 - RNA, 21 nt, synthetic construct
  source 1..21: mol_type = other RNA
  modified_base 1: mod_base = OTHER; note = 2'-O-methyluridine-3'-phosphorothioate
  modified_base 2: mod_base = OTHER; note = 2'-O-methyluridine-3'-phosphorothioate
  modified_base 3: mod_base = OTHER; note = 2'-O-methylcytidine-3'-phosphate
  modified_base 4: mod_base = OTHER; note = 2'-O-methylcytidine-3'-phosphate
  modified_base 5: mod_base = OTHER; note = 2'-O-methyluridine-3'-phosphate
  modified_base 6: mod_base = OTHER; note = 2'-O-methyluridine-3'-phosphate
  modified_base 7: mod_base = OTHER; note = 2'-fluorocytidine-3'-phosphate
  modified_base 8: mod_base = OTHER; note = 2'-O-methyluridine-3'-phosphate
  modified_base 9: mod_base = OTHER; note = 2'-fluorouridine-3'-phosphate
  modified_base 10: mod_base = OTHER; note = 2'-fluorocytidine-3'-phosphate
  modified_base 11: mod_base = OTHER; note = 2'-fluoroadenosine-3'-phosphate
  modified_base 12: mod_base = OTHER; note = 2'-O-methyluridine-3'-phosphate
  modified_base 13: mod_base = OTHER; note = 2'-O-methylcytidine-3'-phosphate
  modified_base 14: mod_base = OTHER; note = 2'-O-methyluridine-3'-phosphate
  modified_base 15: mod_base = OTHER; note = 2'-O-methyluridine-3'-phosphate
  modified_base 16: mod_base = OTHER; note = 2'-O-methylguanosine-3'-phosphate
  modified_base 17: mod_base = OTHER; note = 2'-O-methyladenosine-3'-phosphate
  modified_base 18: mod_base = OTHER; note = 2'-O-methyluridine-3'-phosphate
  modified_base 19: mod_base = OTHER; note = 2'-O-methylcytidine-3'-phosphorothioate
  modified_base 20: mod_base = OTHER; note = 2'-O-methyladenosine-3'-phosphorothioate
  modified_base 21: mod_base = OTHER; note = 2'-O-methyladenosine-3'-phosphate
ttccttcttcatcttgatcaa

SEQ ID NO: 4579 - RNA, 21 nt, synthetic construct
  source 1..21: mol_type = other RNA
  modified_base 1: mod_base = OTHER; note = 2'-O-methylcytidine-3'-phosphorothioate
  modified_base 2: mod_base = OTHER; note = 2'-O-methyladenosine-3'-phosphorothioate
  modified_base 3: mod_base = OTHER; note = 2'-O-methylcytidine-3'-phosphate
  modified_base 4: mod_base = OTHER; note = 2'-O-methyluridine-3'-phosphate
  modified_base 5: mod_base = OTHER; note = 2'-O-methylcytidine-3'-phosphate
  modified_base 6: mod_base = OTHER; note = 2'-O-methyluridine-3'-phosphate
  modified_base 7: mod_base = OTHER; note = 2'-fluoroadenosine-3'-phosphate
  modified_base 8: mod_base = OTHER; note = 2'-O-methyladenosine-3'-phosphate
  modified_base 9: mod_base = OTHER; note = 2'-fluoroadenosine-3'-phosphate
  modified_base 10: mod_base = OTHER; note = 2'-fluoroadenosine-3'-phosphate
  modified_base 11: mod_base = OTHER; note = 2'-fluorocytidine-3'-phosphate
  modified_base 12: mod_base = OTHER; note = 2'-O-methyluridine-3'-phosphate
  modified_base 13: mod_base = OTHER; note = 2'-O-methylguanosine-3'-phosphate
  modified_base 14: mod_base = OTHER; note = 2'-O-methyladenosine-3'-phosphate
  modified_base 15: mod_base = OTHER; note = 2'-O-methyluridine-3'-phosphate
  modified_base 16: mod_base = OTHER; note = 2'-O-methylguanosine-3'-phosphate
  modified_base 17: mod_base = OTHER; note = 2'-O-methyluridine-3'-phosphate
  modified_base 18: mod_base = OTHER; note = 2'-O-methyluridine-3'-phosphate
  modified_base 19: mod_base = OTHER; note = 2'-O-methylcytidine-3'-phosphorothioate
  modified_base 20: mod_base = OTHER; note = 2'-O-methyladenosine-3'-phosphorothioate
  modified_base 21: mod_base = OTHER; note = 2'-O-methyladenosine-3'-phosphate
cactctaaaactgatgttcaa

SEQ ID NO: 4580 - RNA, 21 nt, synthetic construct
  source 1..21: mol_type = other RNA
  modified_base 1: mod_base = OTHER; note = 2'-O-methyluridine-3'-phosphorothioate
  modified_base 2: mod_base = OTHER; note = 2'-O-methylcytidine-3'-phosphorothioate
  modified_base 3: mod_base = OTHER; note = 2'-O-methyluridine-3'-phosphate
  modified_base 4: mod_base = OTHER; note = 2'-O-methyluridine-3'-phosphate
  modified_base 5: mod_base = OTHER; note = 2'-O-methylcytidine-3'-phosphate
  modified_base 6: mod_base = OTHER; note = 2'-O-methyluridine-3'-phosphate
  modified_base 7: mod_base = OTHER; note = 2'-fluoroguanosine-3'-phosphate
  modified_base 8: mod_base = OTHER; note = 2'-O-methyluridine-3'-phosphate
  modified_base 9: mod_base = OTHER; note = 2'-fluoroadenosine-3'-phosphate
  modified_base 10: mod_base = OTHER; note = 2'-fluorouridine-3'-phosphate
  modified_base 11: mod_base = OTHER; note = 2'-fluorocytidine-3'-phosphate
  modified_base 12: mod_base = OTHER; note = 2'-O-methyladenosine-3'-phosphate
  modified_base 13: mod_base = OTHER; note = 2'-O-methylcytidine-3'-phosphate
  modified_base 14: mod_base = OTHER; note = 2'-O-methyluridine-3'-phosphate
  modified_base 15: mod_base = OTHER; note = 2'-O-methylguanosine-3'-phosphate
  modified_base 16: mod_base = OTHER; note = 2'-O-methyladenosine-3'-phosphate
  modified_base 17: mod_base = OTHER; note = 2'-O-methylcytidine-3'-phosphate
  modified_base 18: mod_base = OTHER; note = 2'-O-methyluridine-3'-phosphate
  modified_base 19: mod_base = OTHER; note = 2'-O-methylcytidine-3'-phosphorothioate
  modified_base 20: mod_base = OTHER; note = 2'-O-methyladenosine-3'-phosphorothioate
  modified_base 21: mod_base = OTHER; note = 2'-O-methyladenosine-3'-phosphate
tcttctgtatcactgactcaa

SEQ ID NO: 4581 - RNA, 21 nt, synthetic construct
  source 1..21: mol_type = other RNA
  modified_base 1: mod_base = OTHER; note = 2'-O-methylcytidine-3'-phosphorothioate
  modified_base 2: mod_base = OTHER; note = 2'-O-methyladenosine-3'-phosphorothioate
  modified_base 3: mod_base = OTHER; note = 2'-O-methylguanosine-3'-phosphate
  modified_base 4: mod_base = OTHER; note = 2'-O-methyladenosine-3'-phosphate
  modified_base 5: mod_base = OTHER; note = 2'-O-methyluridine-3'-phosphate
  modified_base 6: mod_base = OTHER; note = 2'-O-methylcytidine-3'-phosphate
  modified_base 7: mod_base = OTHER; note = 2'-fluorouridine-3'-phosphate
  modified_base 8: mod_base = OTHER; note = 2'-O-methyluridine-3'-phosphate
  modified_base 9: mod_base = OTHER; note = 2'-fluorocytidine-3'-phosphate
  modified_base 10: mod_base = OTHER; note = 2'-fluorouridine-3'-phosphate
  modified_base 11: mod_base = OTHER; note = 2'-fluoroguanosine-3'-phosphate
  modified_base 12: mod_base = OTHER; note = 2'-O-methyladenosine-3'-phosphate
  modified_base 13: mod_base = OTHER; note = 2'-O-methylcytidine-3'-phosphate
  modified_base 14: mod_base = OTHER; note = 2'-O-methyluridine-3'-phosphate
  modified_base 15: mod_base = OTHER; note = 2'-O-methylguanosine-3'-phosphate
  modified_base 16: mod_base = OTHER; note = 2'-O-methyladenosine-3'-phosphate
  modified_base 17: mod_base = OTHER; note = 2'-O-methyluridine-3'-phosphate
  modified_base 18: mod_base = OTHER; note = 2'-O-methylcytidine-3'-phosphate
  modified_base 19: mod_base = OTHER; note = 2'-O-methylcytidine-3'-phosphorothioate
  modified_base 20: mod_base = OTHER; note = 2'-O-methyladenosine-3'-phosphorothioate
  modified_base 21: mod_base = OTHER; note = 2'-O-methyladenosine-3'-phosphate
cagatcttctgactgatccaa

SEQ ID NO: 4582 - RNA, 21 nt, synthetic construct
  source 1..21: mol_type = other RNA
  modified_base 1: mod_base = OTHER; note = 2'-O-methyluridine-3'-phosphorothioate
  modified_base 2: mod_base = OTHER; note = 2'-O-methylguanosine-3'-phosphorothioate
  modified_base 3: mod_base = OTHER; note = 2'-O-methyladenosine-3'-phosphate
  modified_base 4: mod_base = OTHER; note = 2'-O-methylcytidine-3'-phosphate
  modified_base 5: mod_base = OTHER; note = 2'-O-methyladenosine-3'-phosphate
  modified_base 6: mod_base = OTHER; note = 2'-O-methylcytidine-3'-phosphate
  modified_base 7: mod_base = OTHER; note = 2'-fluoroadenosine-3'-phosphate
  modified_base 8: mod_base = OTHER; note = 2'-O-methyluridine-3'-phosphate
  modified_base 9: mod_base = OTHER; note = 2'-fluorouridine-3'-phosphate
  modified_base 10: mod_base = OTHER; note = 2'-fluorouridine-3'-phosphate
  modified_base 11: mod_base = OTHER; note = 2'-fluorouridine-3'-phosphate
  modified_base 12: mod_base = OTHER; note = 2'-O-methyluridine-3'-phosphate
  modified_base 13: mod_base = OTHER; note = 2'-O-methylcytidine-3'-phosphate
  modified_base 14: mod_base = OTHER; note = 2'-O-methyluridine-3'-phosphate
  modified_base 15: mod_base = OTHER; note = 2'-O-methylcytidine-3'-phosphate
  modified_base 16: mod_base = OTHER; note = 2'-O-methylcytidine-3'-phosphate
  modified_base 17: mod_base = OTHER; note = 2'-O-methyladenosine-3'-phosphate
  modified_base 18: mod_base = OTHER; note = 2'-O-methyluridine-3'-phosphate
  modified_base 19: mod_base = OTHER; note = 2'-O-methyladenosine-3'-phosphorothioate
  modified_base 20: mod_base = OTHER; note = 2'-O-methyladenosine-3'-phosphorothioate
  modified_base 21: mod_base = OTHER; note = 2'-O-methyladenosine-3'-phosphate
tgacacatttttctccataaa

SEQ ID NO: 4583 - RNA, 21 nt, synthetic construct
  source 1..21: mol_type = other RNA
  modified_base 1: mod_base = OTHER; note = 2'-O-methylguanosine-3'-phosphorothioate
  modified_base 2: mod_base = OTHER; note = 2'-O-methylguanosine-3'-phosphorothioate
  modified_base 3: mod_base = OTHER; note = 2'-O-methyladenosine-3'-phosphate
  modified_base 4: mod_base = OTHER; note = 2'-O-methyladenosine-3'-phosphate
  modified_base 5: mod_base = OTHER; note = 2'-O-methyladenosine-3'-phosphate
  modified_base 6: mod_base = OTHER; note = 2'-O-methylcytidine-3'-phosphate
  modified_base 7: mod_base = OTHER; note = 2'-fluorouridine-3'-phosphate
  modified_base 8: mod_base = OTHER; note = 2'-O-methylcytidine-3'-phosphate
  modified_base 9: mod_base = OTHER; note = 2'-fluoroadenosine-3'-phosphate
  modified_base 10: mod_base = OTHER; note = 2'-fluorouridine-3'-phosphate
  modified_base 11: mod_base = OTHER; note = 2'-fluorouridine-3'-phosphate
  modified_base 12: mod_base = OTHER; note = 2'-O-methyluridine-3'-phosphate
  modified_base 13: mod_base = OTHER; note = 2'-O-methyluridine-3'-phosphate
  modified_base 14: mod_base = OTHER; note = 2'-O-methyluridine-3'-phosphate
  modified_base 15: mod_base = OTHER; note = 2'-O-methyladenosine-3'-phosphate
  modified_base 16: mod_base = OTHER; note = 2'-O-methylcytidine-3'-phosphate
  modified_base 17: mod_base = OTHER; note = 2'-O-methyladenosine-3'-phosphate
  modified_base 18: mod_base = OTHER; note = 2'-O-methyluridine-3'-phosphate
  modified_base 19: mod_base = OTHER; note = 2'-O-methyladenosine-3'-phosphorothioate
  modified_base 20: mod_base = OTHER; note = 2'-O-methyladenosine-3'-phosphorothioate
  modified_base 21: mod_base = OTHER; note = 2'-O-methyladenosine-3'-phosphate
ggaaactcatttttacataaa

SEQ ID NO: 4584 - RNA, 21 nt, synthetic construct
  source 1..21: mol_type = other RNA
  modified_base 1: mod_base = OTHER; note = 2'-O-methyladenosine-3'-phosphorothioate
  modified_base 2: mod_base = OTHER; note = 2'-O-methyluridine-3'-phosphorothioate
  modified_base 3: mod_base = OTHER; note = 2'-O-methylcytidine-3'-phosphate
  modified_base 4: mod_base = OTHER; note = 2'-O-methyladenosine-3'-phosphate
  modified_base 5: mod_base = OTHER; note = 2'-O-methylguanosine-3'-phosphate
  modified_base 6: mod_base = OTHER; note = 2'-O-methylcytidine-3'-phosphate
  modified_base 7: mod_base = OTHER; note = 2'-fluoroadenosine-3'-phosphate
  modified_base 8: mod_base = OTHER; note = 2'-O-methyladenosine-3'-phosphate
  modified_base 9: mod_base = OTHER; note = 2'-fluorocytidine-3'-phosphate
  modified_base 10: mod_base = OTHER; note = 2'-fluorouridine-3'-phosphate
  modified_base 11: mod_base = OTHER; note = 2'-fluorouridine-3'-phosphate
  modified_base 12: mod_base = OTHER; note = 2'-O-methyladenosine-3'-phosphate
  modified_base 13: mod_base = OTHER; note = 2'-O-methylguanosine-3'-phosphate
  modified_base 14: mod_base = OTHER; note = 2'-O-methyladenosine-3'-phosphate
  modified_base 15: mod_base = OTHER; note = 2'-O-methyladenosine-3'-phosphate
  modified_base 16: mod_base = OTHER; note = 2'-O-methyladenosine-3'-phosphate
  modified_base 17: mod_base = OTHER; note = 2'-O-methyluridine-3'-phosphate
  modified_base 18: mod_base = OTHER; note = 2'-O-methyluridine-3'-phosphate
  modified_base 19: mod_base = OTHER; note = 2'-O-methylcytidine-3'-phosphorothioate
  modified_base 20: mod_base = OTHER; note = 2'-O-methyluridine-3'-phosphorothioate
  modified_base 21: mod_base = OTHER; note = 2'-O-methyladenosine-3'-phosphate
atcagcaacttagaaattcta

SEQ ID NO: 4585 - RNA, 21 nt, synthetic construct
  source 1..21: mol_type = other RNA
  modified_base 1: mod_base = OTHER; note = 2'-O-methylcytidine-3'-phosphorothioate
  modified_base 2: mod_base = OTHER; note = 2'-O-methyluridine-3'-phosphorothioate
  modified_base 3: mod_base = OTHER; note = 2'-O-methyluridine-3'-phosphate
  modified_base 4: mod_base = OTHER; note = 2'-O-methyladenosine-3'-phosphate
  modified_base 5: mod_base = OTHER; note = 2'-O-methyluridine-3'-phosphate
  modified_base 6: mod_base = OTHER; note = 2'-O-methyladenosine-3'-phosphate
  modified_base 7: mod_base = OTHER; note = 2'-fluorouridine-3'-phosphate
  modified_base 8: mod_base = OTHER; note = 2'-O-methyluridine-3'-phosphate
  modified_base 9: mod_base = OTHER; note = 2'-fluorouridine-3'-phosphate
  modified_base 10: mod_base = OTHER; note = 2'-fluorocytidine-3'-phosphate
  modified_base 11: mod_base = OTHER; note = 2'-fluorouridine-3'-phosphate
  modified_base 12: mod_base = OTHER; note = 2'-O-methylcytidine-3'-phosphate
  modified_base 13: mod_base = OTHER; note = 2'-O-methyluridine-3'-phosphate
  modified_base 14: mod_base = OTHER; note = 2'-O-methyladenosine-3'-phosphate
  modified_base 15: mod_base = OTHER; note = 2'-O-methylguanosine-3'-phosphate
  modified_base 16: mod_base = OTHER; note = 2'-O-methyladenosine-3'-phosphate
  modified_base 17: mod_base = OTHER; note = 2'-O-methylguanosine-3'-phosphate
  modified_base 18: mod_base = OTHER; note = 2'-O-methyluridine-3'-phosphate
  modified_base 19: mod_base = OTHER; note = 2'-O-methyladenosine-3'-phosphorothioate
  modified_base 20: mod_base = OTHER; note = 2'-O-methylcytidine-3'-phosphorothioate
  modified_base 21: mod_base = OTHER; note = 2'-O-methyladenosine-3'-phosphate
cttatatttctctagagtaca

SEQ ID NO: 4586 - RNA, 21 nt, synthetic construct
  source 1..21: mol_type = other RNA
  modified_base 1: mod_base = OTHER; note = 2'-O-methyladenosine-3'-phosphorothioate
  modified_base 2: mod_base = OTHER; note = 2'-O-methyladenosine-3'-phosphorothioate
  modified_base 3: mod_base = OTHER; note = 2'-O-methylcytidine-3'-phosphate
  modified_base 4: mod_base = OTHER; note = 2'-O-methyluridine-3'-phosphate
  modified_base 5: mod_base = OTHER; note = 2'-O-methylcytidine-3'-phosphate
  modified_base 6: mod_base = OTHER; note = 2'-O-methylcytidine-3'-phosphate
  modified_base 7: mod_base = OTHER; note = 2'-fluoroadenosine-3'-phosphate
  modified_base 8: mod_base = OTHER; note = 2'-O-methyladenosine-3'-phosphate
  modified_base 9: mod_base = OTHER; note = 2'-fluoroguanosine-3'-phosphate
  modified_base 10: mod_base = OTHER; note = 2'-fluoroadenosine-3'-phosphate
  modified_base 11: mod_base = OTHER; note = 2'-fluoroadenosine-3'-phosphate
  modified_base 12: mod_base = OTHER; note = 2'-O-methyluridine-3'-phosphate
  modified_base 13: mod_base = OTHER; note = 2'-O-methylcytidine-3'-phosphate
  modified_base 14: mod_base = OTHER; note = 2'-O-methyluridine-3'-phosphate
  modified_base 15: mod_base = OTHER; note = 2'-O-methyluridine-3'-phosphate
  modified_base 16: mod_base = OTHER; note = 2'-O-methyluridine-3'-phosphate
  modified_base 17: mod_base = OTHER; note = 2'-O-methyluridine-3'-phosphate
  modified_base 18: mod_base = OTHER; note = 2'-O-methyladenosine-3'-phosphate
  modified_base 19: mod_base = OTHER; note = 2'-O-methyluridine-3'-phosphorothioate
  modified_base 20: mod_base = OTHER; note = 2'-O-methylcytidine-3'-phosphorothioate
  modified_base 21: mod_base = OTHER; note = 2'-O-methyladenosine-3'-phosphate
aactccaagaatcttttatca

SEQ ID NO: 4587 - RNA, 21 nt, synthetic construct
  source 1..21: mol_type = other RNA
  modified_base 1: mod_base = OTHER; note = 2'-O-methylcytidine-3'-phosphorothioate
  modified_base 2: mod_base = OTHER; note = 2'-O-methyluridine-3'-phosphorothioate
  modified_base 3: mod_base = OTHER; note = 2'-O-methyluridine-3'-phosphate
  modified_base 4: mod_base = OTHER; note = 2'-O-methylcytidine-3'-phosphate
  modified_base 5: mod_base = OTHER; note = 2'-O-methyladenosine-3'-phosphate
  modified_base 6: mod_base = OTHER; note = 2'-O-methyladenosine-3'-phosphate
  modified_base 7: mod_base = OTHER; note = 2'-fluoroadenosine-3'-phosphate
  modified_base 8: mod_base = OTHER; note = 2'-O-methylcytidine-3'-phosphate
  modified_base 9: mod_base = OTHER; note = 2'-fluoroadenosine-3'-phosphate
  modified_base 10: mod_base = OTHER; note = 2'-fluorouridine-3'-phosphate
  modified_base 11: mod_base = OTHER; note = 2'-fluorouridine-3'-phosphate
  modified_base 12: mod_base = OTHER; note = 2'-O-methylcytidine-3'-phosphate
  modified_base 13: mod_base = OTHER; note = 2'-O-methylcytidine-3'-phosphate
  modified_base 14: mod_base = OTHER; note = 2'-O-methyluridine-3'-phosphate
  modified_base 15: mod_base = OTHER; note = 2'-O-methylguanosine-3'-phosphate
  modified_base 16: mod_base = OTHER; note = 2'-O-methylcytidine-3'-phosphate
  modified_base 17: mod_base = OTHER; note = 2'-O-methyladenosine-3'-phosphate
  modified_base 18: mod_base = OTHER; note = 2'-O-methyluridine-3'-phosphate
  modified_base 19: mod_base = OTHER; note = 2'-O-methyluridine-3'-phosphorothioate
  modified_base 20: mod_base = OTHER; note = 2'-O-methyladenosine-3'-phosphorothioate
  modified_base 21: mod_base = OTHER; note = 2'-O-methyladenosine-3'-phosphate
cttcaaacattcctgcattaa

SEQ ID NO: 4588 - RNA, 21 nt, synthetic construct
  source 1..21: mol_type = other RNA
  modified_base 1: mod_base = OTHER; note = 2'-O-methyluridine-3'-phosphorothioate
  modified_base 2: mod_base = OTHER; note = 2'-O-methylcytidine-3'-phosphorothioate
  modified_base 3: mod_base = OTHER; note = 2'-O-methylguanosine-3'-phosphate
  modified_base 4: mod_base = OTHER; note = 2'-O-methyluridine-3'-phosphate
  modified_base 5: mod_base = OTHER; note = 2'-O-methyluridine-3'-phosphate
  modified_base 6: mod_base = OTHER; note = 2'-O-methylcytidine-3'-phosphate
  modified_base 7: mod_base = OTHER; note = 2'-fluorouridine-3'-phosphate
  modified_base 8: mod_base = OTHER; note = 2'-O-methyluridine-3'-phosphate
  modified_base 9: mod_base = OTHER; note = 2'-fluorocytidine-3'-phosphate
  modified_base 10: mod_base = OTHER; note = 2'-fluorouridine-3'-phosphate
  modified_base 11: mod_base = OTHER; note = 2'-fluorocytidine-3'-phosphate
  modified_base 12: mod_base = OTHER; note = 2'-O-methylcytidine-3'-phosphate
  modified_base 13: mod_base = OTHER; note = 2'-O-methyluridine-3'-phosphate
  modified_base 14: mod_base = OTHER; note = 2'-O-methylcytidine-3'-phosphate
  modified_base 15: mod_base = OTHER; note = 2'-O-methyladenosine-3'-phosphate
  modified_base 16: mod_base = OTHER; note = 2'-O-methyladenosine-3'-phosphate
  modified_base 17: mod_base = OTHER; note = 2'-O-methylcytidine-3'-phosphate
  modified_base 18: mod_base = OTHER; note = 2'-O-methyluridine-3'-phosphate
  modified_base 19: mod_base = OTHER; note = 2'-O-methyladenosine-3'-phosphorothioate
  modified_base 20: mod_base = OTHER; note = 2'-O-methylguanosine-3'-phosphorothioate
  modified_base 21: mod_base = OTHER; note = 2'-O-methyladenosine-3'-phosphate
tcgttcttctcctcaactaga

SEQ ID NO: 4589 - RNA, 21 nt, synthetic construct
  source 1..21: mol_type = other RNA
  modified_base 1: mod_base = OTHER; note = 2'-O-methyladenosine-3'-phosphorothioate
  modified_base 2: mod_base = OTHER; note = 2'-O-methyladenosine-3'-phosphorothioate
  modified_base 3: mod_base = OTHER; note = 2'-O-methyladenosine-3'-phosphate
  modified_base 4: mod_base = OTHER; note = 2'-O-methylguanosine-3'-phosphate
  modified_base 5: mod_base = OTHER; note = 2'-O-methyladenosine-3'-phosphate
  modified_base 6: mod_base = OTHER; note = 2'-O-methyluridine-3'-phosphate
  modified_base 7: mod_base = OTHER; note = 2'-fluorouridine-3'-phosphate
  modified_base 8: mod_base = OTHER; note = 2'-O-methyladenosine-3'-phosphate
  modified_base 9: mod_base = OTHER; note = 2'-fluoroadenosine-3'-phosphate
  modified_base 10: mod_base = OTHER; note = 2'-fluorouridine-3'-phosphate
  modified_base 11: mod_base = OTHER; note = 2'-fluorocytidine-3'-phosphate
  modified_base 12: mod_base = OTHER; note = 2'-O-methylcytidine-3'-phosphate
  modified_base 13: mod_base = OTHER; note = 2'-O-methyluridine-3'-phosphate
  modified_base 14: mod_base = OTHER; note = 2'-O-methylcytidine-3'-phosphate
  modified_base 15: mod_base = OTHER; note = 2'-O-methyluridine-3'-phosphate
  modified_base 16: mod_base = OTHER; note = 2'-O-methylcytidine-3'-phosphate
  modified_base 17: mod_base = OTHER; note = 2'-O-methyladenosine-3'-phosphate
  modified_base 18: mod_base = OTHER; note = 2'-O-methylcytidine-3'-phosphate
  modified_base 19: mod_base = OTHER; note = 2'-O-methyladenosine-3'-phosphorothioate
  modified_base 20: mod_base = OTHER; note = 2'-O-methylcytidine-3'-phosphorothioate
  modified_base 21: mod_base = OTHER; note = 2'-O-methyladenosine-3'-phosphate
aaagattaatcctctcacaca

SEQ ID NO: 4590 - RNA, 21 nt, synthetic construct
  source 1..21: mol_type = other RNA
  modified_base 1: mod_base = OTHER; note = 2'-O-methyladenosine-3'-phosphorothioate
  modified_base 2: mod_base = OTHER; note = 2'-O-methylcytidine-3'-phosphorothioate
  modified_base 3: mod_base = OTHER; note = 2'-O-methyluridine-3'-phosphate
  modified_base 4: mod_base = OTHER; note = 2'-O-methyladenosine-3'-phosphate
  modified_base 5: mod_base = OTHER; note = 2'-O-methyladenosine-3'-phosphate
  modified_base 6: mod_base = OTHER; note = 2'-O-methylcytidine-3'-phosphate
  modified_base 7: mod_base = OTHER; note = 2'-fluorocytidine-3'-phosphate
  modified_base 8: mod_base = OTHER; note = 2'-O-methyluridine-3'-phosphate
  modified_base 9: mod_base = OTHER; note = 2'-fluorocytidine-3'-phosphate
  modified_base 10: mod_base = OTHER; note = 2'-fluoroadenosine-3'-phosphate
  modified_base 11: mod_base = OTHER; note = 2'-fluorouridine-3'-phosphate
  modified_base 12: mod_base = OTHER; note = 2'-O-methylcytidine-3'-phosphate
  modified_base 13: mod_base = OTHER; note = 2'-O-methyladenosine-3'-phosphate
  modified_base 14: mod_base = OTHER; note = 2'-O-methyladenosine-3'-phosphate
  modified_base 15: mod_base = OTHER; note = 2'-O-methyladenosine-3'-phosphate
  modified_base 16: mod_base = OTHER; note = 2'-O-methylguanosine-3'-phosphate
  modified_base 17: mod_base = OTHER; note = 2'-O-methyladenosine-3'-phosphate
  modified_base 18: mod_base = OTHER; note = 2'-O-methyluridine-3'-phosphate
  modified_base 19: mod_base = OTHER; note = 2'-O-methyladenosine-3'-phosphorothioate
  modified_base 20: mod_base = OTHER; note = 2'-O-methylcytidine-3'-phosphorothioate
  modified_base 21: mod_base = OTHER; note = 2'-O-methyladenosine-3'-phosphate
actaacctcatcaaagataca

SEQ ID NO: 4591 - RNA, 21 nt, synthetic construct
  source 1..21: mol_type = other RNA
  modified_base 1: mod_base = OTHER; note = 2'-O-methylcytidine-3'-phosphorothioate
  modified_base 2: mod_base = OTHER; note = 2'-O-methyladenosine-3'-phosphorothioate
  modified_base 3: mod_base = OTHER; note = 2'-O-methylcytidine-3'-phosphate
  modified_base 4: mod_base = OTHER; note = 2'-O-methylcytidine-3'-phosphate
  modified_base 5: mod_base = OTHER; note = 2'-O-methyladenosine-3'-phosphate
  modified_base 6: mod_base = OTHER; note = 2'-O-methylcytidine-3'-phosphate
  modified_base 7: mod_base = OTHER; note = 2'-fluorouridine-3'-phosphate
  modified_base 8: mod_base = OTHER; note = 2'-O-methyluridine-3'-phosphate
  modified_base 9: mod_base = OTHER; note = 2'-fluoroadenosine-3'-phosphate
  modified_base 10: mod_base = OTHER; note = 2'-fluorouridine-3'-phosphate
  modified_base 11: mod_base = OTHER; note = 2'-fluorouridine-3'-phosphate
  modified_base 12: mod_base = OTHER; note = 2'-O-methyladenosine-3'-phosphate
  modified_base 13: mod_base = OTHER; note = 2'-O-methylcytidine-3'-phosphate
  modified_base 14: mod_base = OTHER; note = 2'-O-methyluridine-3'-phosphate
  modified_base 15: mod_base = OTHER; note = 2'-O-methyladenosine-3'-phosphate
  modified_base 16: mod_base = OTHER; note = 2'-O-methyladenosine-3'-phosphate
  modified_base 17: mod_base = OTHER; note = 2'-O-methyluridine-3'-phosphate
  modified_base 18: mod_base = OTHER; note = 2'-O-methyladenosine-3'-phosphate
  modified_base 19: mod_base = OTHER; note = 2'-O-methyladenosine-3'-phosphorothioate
  modified_base 20: mod_base = OTHER; note = 2'-O-methyladenosine-3'-phosphorothioate
  modified_base 21: mod_base = OTHER; note = 2'-O-methyladenosine-3'-phosphate
caccacttattactaataaaa

SEQ ID NO: 4592 - RNA, 21 nt, synthetic construct
  source 1..21: mol_type = other RNA
  modified_base 1: mod_base = OTHER; note = 2'-O-methyluridine-3'-phosphorothioate
  modified_base 2: mod_base = OTHER; note = 2'-O-methylguanosine-3'-phosphorothioate
  modified_base 3: mod_base = OTHER; note = 2'-O-methylguanosine-3'-phosphate
  modified_base 4: mod_base = OTHER; note = 2'-O-methyluridine-3'-phosphate
  modified_base 5: mod_base = OTHER; note = 2'-O-methyladenosine-3'-phosphate
  modified_base 6: mod_base = OTHER; note = 2'-O-methylcytidine-3'-phosphate
  modified_base 7: mod_base = OTHER; note = 2'-fluorouridine-3'-phosphate
  modified_base 8: mod_base = OTHER; note = 2'-O-methyladenosine-3'-phosphate
  modified_base 9: mod_base = OTHER; note = 2'-fluoroguanosine-3'-phosphate
  modified_base 10: mod_base = OTHER; note = 2'-fluoroadenosine-3'-phosphate
  modified_base 11: mod_base = OTHER; note = 2'-fluoroadenosine-3'-phosphate
  modified_base 12: mod_base = OTHER; note = 2'-O-methyladenosine-3'-phosphate
  modified_base 13: mod_base = OTHER; note = 2'-O-methyluridine-3'-phosphate
  modified_base 14: mod_base = OTHER; note = 2'-O-methyladenosine-3'-phosphate
  modified_base 15: mod_base = OTHER; note = 2'-O-methyluridine-3'-phosphate
  modified_base 16: mod_base = OTHER; note = 2'-O-methyluridine-3'-phosphate
  modified_base 17: mod_base = OTHER; note = 2'-O-methylcytidine-3'-phosphate
  modified_base 18: mod_base = OTHER; note = 2'-O-methyluridine-3'-phosphate
  modified_base 19: mod_base = OTHER; note = 2'-O-methyluridine-3'-phosphorothioate
  modified_base 20: mod_base = OTHER; note = 2'-O-methyluridine-3'-phosphorothioate
  modified_base 21: mod_base = OTHER; note = 2'-O-methyladenosine-3'-phosphate
tggtactagaaatattcttta

SEQ ID NO: 4593 - RNA, 21 nt, synthetic construct
  source 1..21: mol_type = other RNA
  modified_base 1: mod_base = OTHER; note = 2'-O-methylguanosine-3'-phosphorothioate
  modified_base 2: mod_base = OTHER; note = 2'-O-methylcytidine-3'-phosphorothioate
  modified_base 3: mod_base = OTHER; note = 2'-O-methyluridine-3'-phosphate
  modified_base 4: mod_base = OTHER; note = 2'-O-methylguanosine-3'-phosphate
  modified_base 5: mod_base = OTHER; note = 2'-O-methyluridine-3'-phosphate
  modified_base 6: mod_base = OTHER; note = 2'-O-methylcytidine-3'-phosphate
  modified_base 7: mod_base = OTHER; note = 2'-fluoroadenosine-3'-phosphate
  modified_base 8: mod_base = OTHER; note = 2'-O-methyluridine-3'-phosphate
  modified_base 9: mod_base = OTHER; note = 2'-fluorouridine-3'-phosphate
  modified_base 10: mod_base = OTHER; note = 2'-fluorouridine-3'-phosphate
  modified_base 11: mod_base = OTHER; note = 2'-fluoroguanosine-3'-phosphate
  modified_base 12: mod_base = OTHER; note = 2'-O-methyluridine-3'-phosphate
  modified_base 13: mod_base = OTHER; note = 2'-O-methyluridine-3'-phosphate
  modified_base 14: mod_base = OTHER; note = 2'-O-methylcytidine-3'-phosphate
  modified_base 15: mod_base = OTHER; note = 2'-O-methyladenosine-3'-phosphate
  modified_base 16: mod_base = OTHER; note = 2'-O-methylcytidine-3'-phosphate
  modified_base 17: mod_base = OTHER; note = 2'-O-methyluridine-3'-phosphate
  modified_base 18: mod_base = OTHER; note = 2'-O-methylcytidine-3'-phosphate
  modified_base 19: mod_base = OTHER; note = 2'-O-methyluridine-3'-phosphorothioate
  modified_base 20: mod_base = OTHER; note = 2'-O-methyladenosine-3'-phosphorothioate
  modified_base 21: mod_base = OTHER; note = 2'-O-methyladenosine-3'-phosphate
gctgtcatttgttcactctaa

SEQ ID NO: 4594 - RNA, 21 nt, synthetic construct
  source 1..21: mol_type = other RNA
  modified_base 1: mod_base = OTHER; note = 2'-O-methyladenosine-3'-phosphorothioate
  modified_base 2: mod_base = OTHER; note = 2'-O-methylcytidine-3'-phosphorothioate
  modified_base 3: mod_base = OTHER; note = 2'-O-methyluridine-3'-phosphate
  modified_base 4: mod_base = OTHER; note = 2'-O-methylcytidine-3'-phosphate
  modified_base 5: mod_base = OTHER; note = 2'-O-methyladenosine-3'-phosphate
  modified_base 6: mod_base = OTHER; note = 2'-O-methyladenosine-3'-phosphate
  modified_base 7: mod_base = OTHER; note = 2'-fluorocytidine-3'-phosphate
  modified_base 8: mod_base = OTHER; note = 2'-O-methyladenosine-3'-phosphate
  modified_base 9: mod_base = OTHER; note = 2'-fluoroadenosine-3'-phosphate
  modified_base 10: mod_base = OTHER; note = 2'-fluorouridine-3'-phosphate
  modified_base 11: mod_base = OTHER; note = 2'-fluorouridine-3'-phosphate
  modified_base 12: mod_base = OTHER; note = 2'-O-methyluridine-3'-phosphate
  modified_base 13: mod_base = OTHER; note = 2'-O-methyladenosine-3'-phosphate
  modified_base 14: mod_base = OTHER; note = 2'-O-methyluridine-3'-phosphate
  modified_base 15: mod_base = OTHER; note = 2'-O-methylguanosine-3'-phosphate
  modified_base 16: mod_base = OTHER; note = 2'-O-methyladenosine-3'-phosphate
  modified_base 17: mod_base = OTHER; note = 2'-O-methyladenosine-3'-phosphate
  modified_base 18: mod_base = OTHER; note = 2'-O-methylcytidine-3'-phosphate
  modified_base 19: mod_base = OTHER; note = 2'-O-methyluridine-3'-phosphorothioate
  modified_base 20: mod_base = OTHER; note = 2'-O-methyladenosine-3'-phosphorothioate
  modified_base 21: mod_base = OTHER; note = 2'-O-methyladenosine-3'-phosphate
actcaacaatttatgaactaa

SEQ ID NO: 4595 - RNA, 21 nt, synthetic construct
  source 1..21: mol_type = other RNA
  modified_base 1: mod_base = OTHER; note = 2'-O-methyladenosine-3'-phosphorothioate
  modified_base 2: mod_base = OTHER; note = 2'-O-methylguanosine-3'-phosphorothioate
  modified_base 3: mod_base = OTHER; note = 2'-O-methyluridine-3'-phosphate
  modified_base 4: mod_base = OTHER; note = 2'-O-methyladenosine-3'-phosphate
  modified_base 5: mod_base = OTHER; note = 2'-O-methyluridine-3'-phosphate
  modified_base 6: mod_base = OTHER; note = 2'-O-methylguanosine-3'-phosphate
  modified_base 7: mod_base = OTHER; note = 2'-fluoroadenosine-3'-phosphate
  modified_base 8: mod_base = OTHER; note = 2'-O-methylcytidine-3'-phosphate
  modified_base 9: mod_base = OTHER; note = 2'-fluorouridine-3'-phosphate
  modified_base 10: mod_base = OTHER; note = 2'-fluorocytidine-3'-phosphate
  modified_base 11: mod_base = OTHER; note = 2'-fluoroadenosine-3'-phosphate
  modified_base 12: mod_base = OTHER; note = 2'-O-methyluridine-3'-phosphate
  modified_base 13: mod_base = OTHER; note = 2'-O-methyluridine-3'-phosphate
  modified_base 14: mod_base = OTHER; note = 2'-O-methyladenosine-3'-phosphate
  modified_base 15: mod_base = OTHER; note = 2'-O-methyladenosine-3'-phosphate
  modified_base 16: mod_base = OTHER; note = 2'-O-methyluridine-3'-phosphate
  modified_base 17: mod_base = OTHER; note = 2'-O-methyladenosine-3'-phosphate
  modified_base 18: mod_base = OTHER; note = 2'-O-methylguanosine-3'-phosphate
  modified_base 19: mod_base = OTHER; note = 2'-O-methyladenosine-3'-phosphorothioate
  modified_base 20: mod_base = OTHER; note = 2'-O-methyladenosine-3'-phosphorothioate
  modified_base 21: mod_base = OTHER; note = 2'-O-methyladenosine-3'-phosphate
agtatgactcattaatagaaa

SEQ ID NO: 4596 - RNA, 21 nt, synthetic construct
  source 1..21: mol_type = other RNA
  modified_base 1: mod_base = OTHER; note = 2'-O-methylcytidine-3'-phosphorothioate
  modified_base 2: mod_base = OTHER; note = 2'-O-methyluridine-3'-phosphorothioate
  modified_base 3: mod_base = OTHER; note = 2'-O-methylguanosine-3'-phosphate
  modified_base 4: mod_base = OTHER; note = 2'-O-methylcytidine-3'-phosphate
  modified_base 5: mod_base = OTHER; note = 2'-O-methyluridine-3'-phosphate
  modified_base 6: mod_base = OTHER; note = 2'-O-methylguanosine-3'-phosphate
  modified_base 7: mod_base = OTHER; note = 2'-fluoroadenosine-3'-phosphate
  modified_base 8: mod_base = OTHER; note = 2'-O-methyluridine-3'-phosphate
  modified_base 9: mod_base = OTHER; note = 2'-fluorouridine-3'-phosphate
  modified_base 10: mod_base = OTHER; note = 2'-fluorouridine-3'-phosphate
  modified_base 11: mod_base = OTHER; note = 2'-fluorouridine-3'-phosphate
  modified_base 12: mod_base = OTHER; note = 2'-O-methylcytidine-3'-phosphate
  modified_base 13: mod_base = OTHER; note = 2'-O-methyluridine-3'-phosphate
  modified_base 14: mod_base = OTHER; note = 2'-O-methyluridine-3'-phosphate
  modified_base 15: mod_base = OTHER; note = 2'-O-methyladenosine-3'-phosphate
  modified_base 16: mod_base = OTHER; note = 2'-O-methyladenosine-3'-phosphate
  modified_base 17: mod_base = OTHER; note = 2'-O-methyluridine-3'-phosphate
  modified_base 18: mod_base = OTHER; note = 2'-O-methyladenosine-3'-phosphate
  modified_base 19: mod_base = OTHER; note = 2'-O-methyladenosine-3'-phosphorothioate
  modified_base 20: mod_base = OTHER; note = 2'-O-methylguanosine-3'-phosphorothioate
  modified_base 21: mod_base = OTHER; note = 2'-O-methyladenosine-3'-phosphate
ctgctgattttcttaataaga

SEQ ID NO: 4597 - RNA, 21 nt, synthetic construct
  source 1..21: mol_type = other RNA
  modified_base 1: mod_base = OTHER; note = 2'-O-methyluridine-3'-phosphorothioate
  modified_base 2: mod_base = OTHER; note = 2'-O-methyladenosine-3'-phosphorothioate
  modified_base 3: mod_base = OTHER; note = 2'-O-methyluridine-3'-phosphate
  modified_base 4: mod_base = OTHER; note = 2'-O-methylcytidine-3'-phosphate
  modified_base 5: mod_base = OTHER; note = 2'-O-methyluridine-3'-phosphate
  modified_base 6: mod_base = OTHER; note = 2'-O-methyluridine-3'-phosphate
  modified_base 7: mod_base = OTHER; note = 2'-fluorouridine-3'-phosphate
  modified_base 8: mod_base = OTHER; note = 2'-O-methyladenosine-3'-phosphate
  modified_base 9: mod_base = OTHER; note = 2'-fluoroguanosine-3'-phosphate
  modified_base 10: mod_base = OTHER; note = 2'-fluoroadenosine-3'-phosphate
  modified_base 11: mod_base = OTHER; note = 2'-fluorouridine-3'-phosphate
  modified_base 12: mod_base = OTHER; note = 2'-O-methylcytidine-3'-phosphate
  modified_base 13: mod_base = OTHER; note = 2'-O-methylcytidine-3'-phosphate
  modified_base 14: mod_base = OTHER; note = 2'-O-methyladenosine-3'-phosphate
  modified_base 15: mod_base = OTHER; note = 2'-O-methylcytidine-3'-phosphate
  modified_base 16: mod_base = OTHER; note = 2'-O-methyladenosine-3'-phosphate
  modified_base 17: mod_base = OTHER; note = 2'-O-methyluridine-3'-phosphate
  modified_base 18: mod_base = OTHER; note = 2'-O-methylcytidine-3'-phosphate
  modified_base 19: mod_base = OTHER; note = 2'-O-methyluridine-3'-phosphorothioate
  modified_base 20: mod_base = OTHER; note = 2'-O-methyluridine-3'-phosphorothioate
  modified_base 21: mod_base = OTHER; note = 2'-O-methyladenosine-3'-phosphate
tatctttagatccacatctta

SEQ ID NO: 4598 - RNA, 21 nt, synthetic construct
  source 1..21: mol_type = other RNA
  modified_base 1: mod_base = OTHER; note = 2'-O-methylcytidine-3'-phosphorothioate
  modified_base 2: mod_base = OTHER; note = 2'-O-methylguanosine-3'-phosphorothioate
  modified_base 3: mod_base = OTHER; note = 2'-O-methyladenosine-3'-phosphate
  modified_base 4: mod_base = OTHER; note = 2'-O-methylguanosine-3'-phosphate
  modified_base 5: mod_base = OTHER; note = 2'-O-methyladenosine-3'-phosphate
  modified_base 6: mod_base = OTHER; note = 2'-O-methylcytidine-3'-phosphate
  modified_base 7: mod_base = OTHER; note = 2'-fluoroadenosine-3'-phosphate
  modified_base 8: mod_base = OTHER; note = 2'-O-methyluridine-3'-phosphate
  modified_base 9: mod_base = OTHER; note = 2'-fluorouridine-3'-phosphate
  modified_base 10: mod_base = OTHER; note = 2'-fluorocytidine-3'-phosphate
  modified_base 11: mod_base = OTHER; note = 2'-fluorocytidine-3'-phosphate
  modified_base 12: mod_base = OTHER; note = 2'-O-methyluridine-3'-phosphate
  modified_base 13: mod_base = OTHER; note = 2'-O-methyluridine-3'-phosphate
  modified_base 14: mod_base = OTHER; note = 2'-O-methyladenosine-3'-phosphate
  modified_base 15: mod_base = OTHER; note = 2'-O-methyluridine-3'-phosphate
  modified_base 16: mod_base = OTHER; note = 2'-O-methylcytidine-3'-phosphate
  modified_base 17: mod_base = OTHER; note = 2'-O-methyladenosine-3'-phosphate
  modified_base 18: mod_base = OTHER; note = 2'-O-methylcytidine-3'-phosphate
  modified_base 19: mod_base = OTHER; note = 2'-O-methyladenosine-3'-phosphorothioate
  modified_base 20: mod_base = OTHER; note = 2'-O-methyladenosine-3'-phosphorothioate
  modified_base 21: mod_base = OTHER; note = 2'-O-methyladenosine-3'-phosphate
cgagacattccttatcacaaa

SEQ ID NO: 4599 - RNA, 21 nt, synthetic construct
  source 1..21: mol_type = other RNA
  modified_base 1: mod_base = OTHER; note = 2'-O-methyluridine-3'-phosphorothioate
  modified_base 2: mod_base = OTHER; note = 2'-O-methyladenosine-3'-phosphorothioate
  modified_base 3: mod_base = OTHER; note = 2'-O-methylcytidine-3'-phosphate
  modified_base 4: mod_base = OTHER; note = 2'-O-methyluridine-3'-phosphate
  modified_base 5: mod_base = OTHER; note = 2'-O-methylguanosine-3'-phosphate
  modified_base 6: mod_base = OTHER; note = 2'-O-methyladenosine-3'-phosphate
  modified_base 7: mod_base = OTHER; note = 2'-fluoroadenosine-3'-phosphate
  modified_base 8: mod_base = OTHER; note = 2'-O-methyluridine-3'-phosphate
  modified_base 9: mod_base = OTHER; note = 2'-fluorocytidine-3'-phosphate
  modified_base 10: mod_base = OTHER; note = 2'-fluoroadenosine-3'-phosphate
  modified_base 11: mod_base = OTHER; note = 2'-fluoroguanosine-3'-phosphate
  modified_base 12: mod_base = OTHER; note = 2'-O-methyladenosine-3'-phosphate
  modified_base 13: mod_base = OTHER; note = 2'-O-methyluridine-3'-phosphate
  modified_base 14: mod_base = OTHER; note = 2'-O-methyluridine-3'-phosphate
  modified_base 15: mod_base = OTHER; note = 2'-O-methyladenosine-3'-phosphate
  modified_base 16: mod_base = OTHER; note = 2'-O-methyladenosine-3'-phosphate
  modified_base 17: mod_base = OTHER; note = 2'-O-methyluridine-3'-phosphate
  modified_base 18: mod_base = OTHER; note = 2'-O-methyluridine-3'-phosphate
  modified_base 19: mod_base = OTHER; note = 2'-O-methyluridine-3'-phosphorothioate
  modified_base 20: mod_base = OTHER; note = 2'-O-methylcytidine-3'-phosphorothioate
  modified_base 21: mod_base = OTHER; note = 2'-O-methyladenosine-3'-phosphate
tactgaatcagattaatttca

SEQ ID NO: 4600 - RNA, 21 nt, synthetic construct
  source 1..21: mol_type = other RNA
  modified_base 1: mod_base = OTHER; note = 2'-O-methylcytidine-3'-phosphorothioate
  modified_base 2: mod_base = OTHER; note = 2'-O-methyluridine-3'-phosphorothioate
  modified_base 3: mod_base = OTHER; note = 2'-O-methyluridine-3'-phosphate
  modified_base 4: mod_base = OTHER; note = 2'-O-methyladenosine-3'-phosphate
  modified_base 5: mod_base = OTHER; note = 2'-O-methylcytidine-3'-phosphate
  modified_base 6: mod_base = OTHER; note = 2'-O-methyluridine-3'-phosphate
  modified_base 7: mod_base = OTHER; note = 2'-fluorouridine-3'-phosphate
  modified_base 8: mod_base = OTHER; note = 2'-O-methyladenosine-3'-phosphate
  modified_base 9: mod_base = OTHER; note = 2'-fluoroadenosine-3'-phosphate
  modified_base 10: mod_base = OTHER; note = 2'-fluoroadenosine-3'-phosphate
  modified_base 11: mod_base = OTHER; note = 2'-fluorouridine-3'-phosphate
  modified_base 12: mod_base = OTHER; note = 2'-O-methylcytidine-3'-phosphate
  modified_base 13: mod_base = OTHER; note = 2'-O-methylcytidine-3'-phosphate
  modified_base 14: mod_base = OTHER; note = 2'-O-methyluridine-3'-phosphate
  modified_base 15: mod_base = OTHER; note = 2'-O-methyluridine-3'-phosphate
  modified_base 16: mod_base = OTHER; note = 2'-O-methylcytidine-3'-phosphate
  modified_base 17: mod_base = OTHER; note = 2'-O-methyladenosine-3'-phosphate
  modified_base 18: mod_base = OTHER; note = 2'-O-methylcytidine-3'-phosphate
  modified_base 19: mod_base = OTHER; note = 2'-O-methyluridine-3'-phosphorothioate
  modified_base 20: mod_base = OTHER; note = 2'-O-methylguanosine-3'-phosphorothioate
  modified_base 21: mod_base = OTHER; note = 2'-O-methyladenosine-3'-phosphate
cttacttaaatccttcactga

SEQ ID NO: 4601 - RNA, 21 nt, synthetic construct
  source 1..21: mol_type = other RNA
  modified_base 1: mod_base = OTHER; note = 2'-O-methyluridine-3'-phosphorothioate
  modified_base 2: mod_base = OTHER; note = 2'-O-methylcytidine-3'-phosphorothioate
  modified_base 3: mod_base = OTHER; note = 2'-O-methylguanosine-3'-phosphate
  modified_base 4: mod_base = OTHER; note = 2'-O-methyladenosine-3'-phosphate
  modified_base 5: mod_base = OTHER; note = 2'-O-methyladenosine-3'-phosphate
  modified_base 6: mod_base = OTHER; note = 2'-O-methyladenosine-3'-phosphate
  modified_base 7: mod_base = OTHER; note = 2'-fluoroguanosine-3'-phosphate
  modified_base 8: mod_base = OTHER; note = 2'-O-methyladenosine-3'-phosphate
  modified_base 9: mod_base = OTHER; note = 2'-fluoroadenosine-3'-phosphate
  modified_base 10: mod_base = OTHER; note = 2'-fluorouridine-3'-phosphate
  modified_base 11: mod_base = OTHER; note = 2'-fluorocytidine-3'-phosphate
  modified_base 12: mod_base = OTHER; note = 2'-O-methyladenosine-3'-phosphate
  modified_base 13: mod_base = OTHER; note = 2'-O-methyluridine-3'-phosphate
  modified_base 14: mod_base = OTHER; note = 2'-O-methyluridine-3'-phosphate
  modified_base 15: mod_base = OTHER; note = 2'-O-methylcytidine-3'-phosphate
  modified_base 16: mod_base = OTHER; note = 2'-O-methyladenosine-3'-phosphate
  modified_base 17: mod_base = OTHER; note = 2'-O-methyladenosine-3'-phosphate
  modified_base 18: mod_base = OTHER; note = 2'-O-methyladenosine-3'-phosphate
  modified_base 19: mod_base = OTHER; note = 2'-O-methylcytidine-3'-phosphorothioate
  modified_base 20: mod_base = OTHER; note = 2'-O-methyluridine-3'-phosphorothioate
  modified_base 21: mod_base = OTHER; note = 2'-O-methyladenosine-3'-phosphate
tcgaaagaatcattcaaacta

SEQ ID NO: 4602 - RNA, 21 nt, synthetic construct
  source 1..21: mol_type = other RNA
  modified_base 1: mod_base = OTHER; note = 2'-O-methyladenosine-3'-phosphorothioate
  modified_base 2: mod_base = OTHER; note = 2'-O-methyladenosine-3'-phosphorothioate
  modified_base 3: mod_base = OTHER; note = 2'-O-methyladenosine-3'-phosphate
  modified_base 4: mod_base = OTHER; note = 2'-O-methyluridine-3'-phosphate
  modified_base 5: mod_base = OTHER; note = 2'-O-methylguanosine-3'-phosphate
  modified_base 6: mod_base = OTHER; note = 2'-O-methyladenosine-3'-phosphate
  modified_base 7: mod_base = OTHER; note = 2'-fluorocytidine-3'-phosphate
  modified_base 8: mod_base = OTHER; note = 2'-O-methylcytidine-3'-phosphate
  modified_base 9: mod_base = OTHER; note = 2'-fluorouridine-3'-phosphate
  modified_base 10: mod_base = OTHER; note = 2'-fluoroadenosine-3'-phosphate
  modified_base 11: mod_base = OTHER; note = 2'-fluorouridine-3'-phosphate
  modified_base 12: mod_base = OTHER; note = 2'-O-methylcytidine-3'-phosphate
  modified_base 13: mod_base = OTHER; note = 2'-O-methyladenosine-3'-phosphate
  modified_base 14: mod_base = OTHER; note = 2'-O-methylcytidine-3'-phosphate
  modified_base 15: mod_base = OTHER; note = 2'-O-methyluridine-3'-phosphate
  modified_base 16: mod_base = OTHER; note = 2'-O-methyladenosine-3'-phosphate
  modified_base 17: mod_base = OTHER; note = 2'-O-methylcytidine-3'-phosphate
  modified_base 18: mod_base = OTHER; note = 2'-O-methyluridine-3'-phosphate
  modified_base 19: mod_base = OTHER; note = 2'-O-methyluridine-3'-phosphorothioate
  modified_base 20: mod_base = OTHER; note = 2'-O-methyladenosine-3'-phosphorothioate
  modified_base 21: mod_base = OTHER; note = 2'-O-methyladenosine-3'-phosphate
aaatgacctatcactacttaa

SEQ ID NO: 4603 - RNA, 21 nt, synthetic construct
  source 1..21: mol_type = other RNA
  modified_base 1: mod_base = OTHER; note = 2'-O-methylcytidine-3'-phosphorothioate
  modified_base 2: mod_base = OTHER; note = 2'-O-methyladenosine-3'-phosphorothioate
  modified_base 3: mod_base = OTHER; note = 2'-O-methyladenosine-3'-phosphate
  modified_base 4: mod_base = OTHER; note = 2'-O-methylguanosine-3'-phosphate
  modified_base 5: mod_base = OTHER; note = 2'-O-methyluridine-3'-phosphate
  modified_base 6: mod_base = OTHER; note = 2'-O-methylcytidine-3'-phosphate
  modified_base 7: mod_base = OTHER; note = 2'-fluoroadenosine-3'-phosphate
  modified_base 8: mod_base = OTHER; note = 2'-O-methyluridine-3'-phosphate
  modified_base 9: mod_base = OTHER; note = 2'-fluorouridine-3'-phosphate
  modified_base 10: mod_base = OTHER; note = 2'-fluorouridine-3'-phosphate
  modified_base 11: mod_base = OTHER; note = 2'-fluorocytidine-3'-phosphate
  modified_base 12: mod_base = OTHER; note = 2'-O-methylcytidine-3'-phosphate
  modified_base 13: mod_base = OTHER; note = 2'-O-methyluridine-3'-phosphate
  modified_base 14: mod_base = OTHER; note = 2'-O-methylcytidine-3'-phosphate
  modified_base 15: mod_base = OTHER; note = 2'-O-methyluridine-3'-phosphate
  modified_base 16: mod_base = OTHER; note = 2'-O-methylcytidine-3'-phosphate
  modified_base 17: mod_base = OTHER; note = 2'-O-methyluridine-3'-phosphate
  modified_base 18: mod_base = OTHER; note = 2'-O-methyladenosine-3'-phosphate
  modified_base 19: mod_base = OTHER; note = 2'-O-methylcytidine-3'-phosphorothioate
  modified_base 20: mod_base = OTHER; note = 2'-O-methylguanosine-3'-phosphorothioate
  modified_base 21: mod_base = OTHER; note = 2'-O-methyladenosine-3'-phosphate
caagtcatttcctctctacga

SEQ ID NO: 4604 - RNA, 21 nt, synthetic construct
  source 1..21: mol_type = other RNA
  modified_base 1: mod_base = OTHER; note = 2'-O-methyladenosine-3'-phosphorothioate
  modified_base 2: mod_base = OTHER; note = 2'-O-methyluridine-3'-phosphorothioate
  modified_base 3: mod_base = OTHER; note = 2'-O-methylguanosine-3'-phosphate
  modified_base 4: mod_base = OTHER; note = 2'-O-methylcytidine-3'-phosphate
  modified_base 5: mod_base = OTHER; note = 2'-O-methyladenosine-3'-phosphate
  modified_base 6: mod_base = OTHER; note = 2'-O-methylguanosine-3'-phosphate
  modified_base 7: mod_base = OTHER; note = 2'-fluorouridine-3'-phosphate
  modified_base 8: mod_base = OTHER; note = 2'-O-methyluridine-3'-phosphate
  modified_base 9: mod_base = OTHER; note = 2'-fluorouridine-3'-phosphate
  modified_base 10: mod_base = OTHER; note = 2'-fluorocytidine-3'-phosphate
  modified_base 11: mod_base = OTHER; note = 2'-fluorouridine-3'-phosphate
  modified_base 12: mod_base = OTHER; note = 2'-O-methyluridine-3'-phosphate
  modified_base 13: mod_base = OTHER; note = 2'-O-methyladenosine-3'-phosphate
  modified_base 14: mod_base = OTHER; note = 2'-O-methylcytidine-3'-phosphate
  modified_base 15: mod_base = OTHER; note = 2'-O-methyluridine-3'-phosphate
  modified_base 16: mod_base = OTHER; note = 2'-O-methyluridine-3'-phosphate
  modified_base 17: mod_base = OTHER; note = 2'-O-methyladenosine-3'-phosphate
  modified_base 18: mod_base = OTHER; note = 2'-O-methyluridine-3'-phosphate
  modified_base 19: mod_base = OTHER; note = 2'-O-methylcytidine-3'-phosphorothioate
  modified_base 20: mod_base = OTHER; note = 2'-O-methyluridine-3'-phosphorothioate
  modified_base 21: mod_base = OTHER; note = 2'-O-methyladenosine-3'-phosphate
atgcagtttcttacttatcta

SEQ ID NO: 4605 - RNA, 21 nt, synthetic construct
  source 1..21: mol_type = other RNA
  modified_base 1: mod_base = OTHER; note = 2'-O-methyluridine-3'-phosphorothioate
  modified_base 2: mod_base = OTHER; note = 2'-O-methylcytidine-3'-phosphorothioate
  modified_base 3: mod_base = OTHER; note = 2'-O-methyladenosine-3'-phosphate
  modified_base 4: mod_base = OTHER; note = 2'-O-methyladenosine-3'-phosphate
  modified_base 5: mod_base = OTHER; note = 2'-O-methyluridine-3'-phosphate
  modified_base 6: mod_base = OTHER; note = 2'-O-methylguanosine-3'-phosphate
  modified_base 7: mod_base = OTHER; note = 2'-fluorocytidine-3'-phosphate
  modified_base 8: mod_base = OTHER; note = 2'-O-methyladenosine-3'-phosphate
  modified_base 9: mod_base = OTHER; note = 2'-fluoroadenosine-3'-phosphate
  modified_base 10: mod_base = OTHER; note = 2'-fluorouridine-3'-phosphate
  modified_base 11: mod_base = OTHER; note = 2'-fluoroadenosine-3'-phosphate
  modified_base 12: mod_base = OTHER; note = 2'-O-methylcytidine-3'-phosphate
  modified_base 13: mod_base = OTHER; note = 2'-O-methyladenosine-3'-phosphate
  modified_base 14: mod_base = OTHER; note = 2'-O-methylcytidine-3'-phosphate
  modified_base 15: mod_base = OTHER; note = 2'-O-methyluridine-3'-phosphate
  modified_base 16: mod_base = OTHER; note = 2'-O-methylguanosine-3'-phosphate
  modified_base 17: mod_base = OTHER; note = 2'-O-methyluridine-3'-phosphate
  modified_base 18: mod_base = OTHER; note = 2'-O-methyluridine-3'-phosphate
  modified_base 19: mod_base = OTHER; note = 2'-O-methylcytidine-3'-phosphorothioate
  modified_base 20: mod_base = OTHER; note = 2'-O-methyladenosine-3'-phosphorothioate
  modified_base 21: mod_base = OTHER; note = 2'-O-methyladenosine-3'-phosphate
tcaatgcaatacactgttcaa

SEQ ID NO: 4606 - RNA, 21 nt, synthetic construct
  source 1..21: mol_type = other RNA
  modified_base 1: mod_base = OTHER; note = 2'-O-methyluridine-3'-phosphorothioate
  modified_base 2: mod_base = OTHER; note = 2'-O-methylcytidine-3'-phosphorothioate
  modified_base 3: mod_base = OTHER; note = 2'-O-methyluridine-3'-phosphate
  modified_base 4: mod_base = OTHER; note = 2'-O-methyladenosine-3'-phosphate
  modified_base 5: mod_base = OTHER; note = 2'-O-methyluridine-3'-phosphate
  modified_base 6: mod_base = OTHER; note = 2'-O-methylguanosine-3'-phosphate
  modified_base 7: mod_base = OTHER; note = 2'-fluorouridine-3'-phosphate
  modified_base 8: mod_base = OTHER; note = 2'-O-methyladenosine-3'-phosphate
  modified_base 9: mod_base = OTHER; note = 2'-fluorocytidine-3'-phosphate
  modified_base 10: mod_base = OTHER; note = 2'-fluorocytidine-3'-phosphate
  modified_base 11: mod_base = OTHER; note = 2'-fluorouridine-3'-phosphate
  modified_base 12: mod_base = OTHER; note = 2'-O-methyladenosine-3'-phosphate
  modified_base 13: mod_base = OTHER; note = 2'-O-methylcytidine-3'-phosphate
  modified_base 14: mod_base = OTHER; note = 2'-O-methyluridine-3'-phosphate
  modified_base 15: mod_base = OTHER; note = 2'-O-methylguanosine-3'-phosphate
  modified_base 16: mod_base = OTHER; note = 2'-O-methyladenosine-3'-phosphate
  modified_base 17: mod_base = OTHER; note = 2'-O-methylcytidine-3'-phosphate
  modified_base 18: mod_base = OTHER; note = 2'-O-methyladenosine-3'-phosphate
  modified_base 19: mod_base = OTHER; note = 2'-O-methylcytidine-3'-phosphorothioate
  modified_base 20: mod_base = OTHER; note = 2'-O-methyladenosine-3'-phosphorothioate
  modified_base 21: mod_base = OTHER; note = 2'-O-methyladenosine-3'-phosphate
tctatgtacctactgacacaa

SEQ ID NO: 4607 - RNA, 21 nt, synthetic construct
  source 1..21: mol_type = other RNA
  modified_base 1: mod_base = OTHER; note = 2'-O-methyluridine-3'-phosphorothioate
  modified_base 2: mod_base = OTHER; note = 2'-O-methylguanosine-3'-phosphorothioate
  modified_base 3: mod_base = OTHER; note = 2'-O-methyladenosine-3'-phosphate
  modified_base 4: mod_base = OTHER; note = 2'-O-methyladenosine-3'-phosphate
  modified_base 5: mod_base = OTHER; note = 2'-O-methyluridine-3'-phosphate
  modified_base 6: mod_base = OTHER; note = 2'-O-methyluridine-3'-phosphate
  modified_base 7: mod_base = OTHER; note = 2'-fluorocytidine-3'-phosphate
  modified_base 8: mod_base = OTHER; note = 2'-O-methylcytidine-3'-phosphate
  modified_base 9: mod_base = OTHER; note = 2'-fluoroadenosine-3'-phosphate
  modified_base 10: mod_base = OTHER; note = 2'-fluoroguanosine-3'-phosphate
  modified_base 11: mod_base = OTHER; note = 2'-fluorouridine-3'-phosphate
  modified_base 12: mod_base = OTHER; note = 2'-O-methylcytidine-3'-phosphate
  modified_base 13: mod_base = OTHER; note = 2'-O-methyluridine-3'-phosphate
  modified_base 14: mod_base = OTHER; note = 2'-O-methyluridine-3'-phosphate
  modified_base 15: mod_base = OTHER; note = 2'-O-methyladenosine-3'-phosphate
  modified_base 16: mod_base = OTHER; note = 2'-O-methyluridine-3'-phosphate
  modified_base 17: mod_base = OTHER; note = 2'-O-methylcytidine-3'-phosphate
  modified_base 18: mod_base = OTHER; note = 2'-O-methyluridine-3'-phosphate
  modified_base 19: mod_base = OTHER; note = 2'-O-methyluridine-3'-phosphorothioate
  modified_base 20: mod_base = OTHER; note = 2'-O-methyladenosine-3'-phosphorothioate
  modified_base 21: mod_base = OTHER; note = 2'-O-methyladenosine-3'-phosphate
tgaattccagtcttatcttaa

SEQ ID NO: 4608 - RNA, 21 nt, synthetic construct
  source 1..21: mol_type = other RNA
  modified_base 1: mod_base = OTHER; note = 2'-O-methyluridine-3'-phosphorothioate
  modified_base 2: mod_base = OTHER; note = 2'-O-methyluridine-3'-phosphorothioate
  modified_base 3: mod_base = OTHER; note = 2'-O-methylguanosine-3'-phosphate
  modified_base 4: mod_base = OTHER; note = 2'-O-methylcytidine-3'-phosphate
  modified_base 5: mod_base = OTHER; note = 2'-O-methyluridine-3'-phosphate
  modified_base 6: mod_base = OTHER; note = 2'-O-methylguanosine-3'-phosphate
  modified_base 7: mod_base = OTHER; note = 2'-fluorouridine-3'-phosphate
  modified_base 8: mod_base = OTHER; note = 2'-O-methyladenosine-3'-phosphate
  modified_base 9: mod_base = OTHER; note = 2'-fluoroadenosine-3'-phosphate
  modified_base 10: mod_base = OTHER; note = 2'-fluorouridine-3'-phosphate
  modified_base 11: mod_base = OTHER; note = 2'-fluoroadenosine-3'-phosphate
  modified_base 12: mod_base = OTHER; note = 2'-O-methylcytidine-3'-phosphate
  modified_base 13: mod_base = OTHER; note = 2'-O-methylcytidine-3'-phosphate
  modified_base 14: mod_base = OTHER; note = 2'-O-methyladenosine-3'-phosphate
  modified_base 15: mod_base = OTHER; note = 2'-O-methyladenosine-3'-phosphate
  modified_base 16: mod_base = OTHER; note = 2'-O-methyladenosine-3'-phosphate
  modified_base 17: mod_base = OTHER; note = 2'-O-methyladenosine-3'-phosphate
  modified_base 18: mod_base = OTHER; note = 2'-O-methylcytidine-3'-phosphate
  modified_base 19: mod_base = OTHER; note = 2'-O-methyluridine-3'-phosphorothioate
  modified_base 20: mod_base = OTHER; note = 2'-O-methyladenosine-3'-phosphorothioate
  modified_base 21: mod_base = OTHER; note = 2'-O-methyladenosine-3'-phosphate
ttgctgtaataccaaaactaa

SEQ ID NO: 4609 - RNA, 21 nt, synthetic construct
  source 1..21: mol_type = other RNA
  modified_base 1: mod_base = OTHER; note = 2'-O-methylguanosine-3'-phosphorothioate
  modified_base 2: mod_base = OTHER; note = 2'-O-methylguanosine-3'-phosphorothioate
  modified_base 3: mod_base = OTHER; note = 2'-O-methyladenosine-3'-phosphate
  modified_base 4: mod_base = OTHER; note = 2'-O-methyluridine-3'-phosphate
  modified_base 5: mod_base = OTHER; note = 2'-O-methylcytidine-3'-phosphate
  modified_base 6: mod_base = OTHER; note = 2'-O-methyladenosine-3'-phosphate
  modified_base 7: mod_base = OTHER; note = 2'-fluorocytidine-3'-phosphate
  modified_base 8: mod_base = OTHER; note = 2'-O-methyluridine-3'-phosphate
  modified_base 9: mod_base = OTHER; note = 2'-fluorouridine-3'-phosphate
  modified_base 10: mod_base = OTHER; note = 2'-fluorocytidine-3'-phosphate
  modified_base 11: mod_base = OTHER; note = 2'-fluorouridine-3'-phosphate
  modified_base 12: mod_base = OTHER; note = 2'-O-methyluridine-3'-phosphate
  modified_base 13: mod_base = OTHER; note = 2'-O-methyluridine-3'-phosphate
  modified_base 14: mod_base = OTHER; note = 2'-O-methylcytidine-3'-phosphate
  modified_base 15: mod_base = OTHER; note = 2'-O-methyladenosine-3'-phosphate
  modified_base 16: mod_base = OTHER; note = 2'-O-methyladenosine-3'-phosphate
  modified_base 17: mod_base = OTHER; note = 2'-O-methyladenosine-3'-phosphate
  modified_base 18: mod_base = OTHER; note = 2'-O-methyluridine-3'-phosphate
  modified_base 19: mod_base = OTHER; note = 2'-O-methylcytidine-3'-phosphorothioate
  modified_base 20: mod_base = OTHER; note = 2'-O-methyladenosine-3'-phosphorothioate
  modified_base 21: mod_base = OTHER; note = 2'-O-methyladenosine-3'-phosphate
ggatcacttctttcaaatcaa

SEQ ID NO: 4610 - RNA, 21 nt, synthetic construct
  source 1..21: mol_type = other RNA
  modified_base 1: mod_base = OTHER; note = 2'-O-methylguanosine-3'-phosphorothioate
  modified_base 2: mod_base = OTHER; note = 2'-O-methyladenosine-3'-phosphorothioate
  modified_base 3: mod_base = OTHER; note = 2'-O-methyladenosine-3'-phosphate
  modified_base 4: mod_base = OTHER; note = 2'-O-methylcytidine-3'-phosphate
  modified_base 5: mod_base = OTHER; note = 2'-O-methyluridine-3'-phosphate
  modified_base 6: mod_base = OTHER; note = 2'-O-methyladenosine-3'-phosphate
  modified_base 7: mod_base = OTHER; note = 2'-fluoroguanosine-3'-phosphate
  modified_base 8: mod_base = OTHER; note = 2'-O-methyladenosine-3'-phosphate
  modified_base 9: mod_base = OTHER; note = 2'-fluoroadenosine-3'-phosphate
  modified_base 10: mod_base = OTHER; note = 2'-fluoroadenosine-3'-phosphate
  modified_base 11: mod_base = OTHER; note = 2'-fluoroadenosine-3'-phosphate
  modified_base 12: mod_base = OTHER; note = 2'-O-methylcytidine-3'-phosphate
  modified_base 13: mod_base = OTHER; note = 2'-O-methyluridine-3'-phosphate
  modified_base 14: mod_base = OTHER; note = 2'-O-methyladenosine-3'-phosphate
  modified_base 15: mod_base = OTHER; note = 2'-O-methyluridine-3'-phosphate
  modified_base 16: mod_base = OTHER; note = 2'-O-methyluridine-3'-phosphate
  modified_base 17: mod_base = OTHER; note = 2'-O-methylcytidine-3'-phosphate
  modified_base 18: mod_base = OTHER; note = 2'-O-methyluridine-3'-phosphate
  modified_base 19: mod_base = OTHER; note = 2'-O-methyluridine-3'-phosphorothioate
  modified_base 20: mod_base = OTHER; note = 2'-O-methyladenosine-3'-phosphorothioate
  modified_base 21: mod_base = OTHER; note = 2'-O-methyladenosine-3'-phosphate
gaactagaaaactattcttaa

SEQ ID NO: 4611 - RNA, 21 nt, synthetic construct
  source 1..21: mol_type = other RNA
  modified_base 1: mod_base = OTHER; note = 2'-O-methyladenosine-3'-phosphorothioate
  modified_base 2: mod_base = OTHER; note = 2'-O-methylcytidine-3'-phosphorothioate
  modified_base 3: mod_base = OTHER; note = 2'-O-methyladenosine-3'-phosphate
  modified_base 4: mod_base = OTHER; note = 2'-O-methyluridine-3'-phosphate
  modified_base 5: mod_base = OTHER; note = 2'-O-methyluridine-3'-phosphate
  modified_base 6: mod_base = OTHER; note = 2'-O-methyluridine-3'-phosphate
  modified_base 7: mod_base = OTHER; note = 2'-fluorocytidine-3'-phosphate
  modified_base 8: mod_base = OTHER; note = 2'-O-methylcytidine-3'-phosphate
  modified_base 9: mod_base = OTHER; note = 2'-fluoroadenosine-3'-phosphate
  modified_base 10: mod_base = OTHER; note = 2'-fluorouridine-3'-phosphate
  modified_base 11: mod_base = OTHER; note = 2'-fluoroadenosine-3'-phosphate
  modified_base 12: mod_base = OTHER; note = 2'-O-methylcytidine-3'-phosphate
  modified_base 13: mod_base = OTHER; note = 2'-O-methyluridine-3'-phosphate
  modified_base 14: mod_base = OTHER; note = 2'-O-methylguanosine-3'-phosphate
  modified_base 15: mod_base = OTHER; note = 2'-O-methyluridine-3'-phosphate
  modified_base 16: mod_base = OTHER; note = 2'-O-methylcytidine-3'-phosphate
  modified_base 17: mod_base = OTHER; note = 2'-O-methyluridine-3'-phosphate
  modified_base 18: mod_base = OTHER; note = 2'-O-methylguanosine-3'-phosphate
  modified_base 19: mod_base = OTHER; note = 2'-O-methyluridine-3'-phosphorothioate
  modified_base 20: mod_base = OTHER; note = 2'-O-methyluridine-3'-phosphorothioate
  modified_base 21: mod_base = OTHER; note = 2'-O-methyladenosine-3'-phosphate
acatttccatactgtctgtta

SEQ ID NO: 4612 - RNA, 21 nt, synthetic construct
  source 1..21: mol_type = other RNA
  modified_base 1: mod_base = OTHER; note = 2'-O-methyluridine-3'-phosphorothioate
  modified_base 2: mod_base = OTHER; note = 2'-O-methylguanosine-3'-phosphorothioate
  modified_base 3: mod_base = OTHER; note = 2'-O-methyladenosine-3'-phosphate
  modified_base 4: mod_base = OTHER; note = 2'-O-methyluridine-3'-phosphate
  modified_base 5: mod_base = OTHER; note = 2'-O-methylcytidine-3'-phosphate
  modified_base 6: mod_base = OTHER; note = 2'-O-methylcytidine-3'-phosphate
  modified_base 7: mod_base = OTHER; note = 2'-fluorouridine-3'-phosphate
  modified_base 8: mod_base = OTHER; note = 2'-O-methyluridine-3'-phosphate
  modified_base 9: mod_base = OTHER; note = 2'-fluorocytidine-3'-phosphate
  modified_base 10: mod_base = OTHER; note = 2'-fluoroadenosine-3'-phosphate
  modified_base 11: mod_base = OTHER; note = 2'-fluorocytidine-3'-phosphate
  modified_base 12: mod_base = OTHER; note = 2'-O-methyladenosine-3'-phosphate
  modified_base 13: mod_base = OTHER; note = 2'-O-methylguanosine-3'-phosphate
  modified_base 14: mod_base = OTHER; note = 2'-O-methyluridine-3'-phosphate
  modified_base 15: mod_base = OTHER; note = 2'-O-methylguanosine-3'-phosphate
  modified_base 16: mod_base = OTHER; note = 2'-O-methyluridine-3'-phosphate
  modified_base 17: mod_base = OTHER; note = 2'-O-methylcytidine-3'-phosphate
  modified_base 18: mod_base = OTHER; note = 2'-O-methyladenosine-3'-phosphate
  modified_base 19: mod_base = OTHER; note = 2'-O-methyladenosine-3'-phosphorothioate
  modified_base 20: mod_base = OTHER; note = 2'-O-methyluridine-3'-phosphorothioate
  modified_base 21: mod_base = OTHER; note = 2'-O-methyladenosine-3'-phosphate
tgatccttcacagtgtcaata

SEQ ID NO: 4613 - RNA, 21 nt, synthetic construct
  source 1..21: mol_type = other RNA
  modified_base 1: mod_base = OTHER; note = 2'-O-methylguanosine-3'-phosphorothioate
  modified_base 2: mod_base = OTHER; note = 2'-O-methyladenosine-3'-phosphorothioate
  modified_base 3: mod_base = OTHER; note = 2'-O-methyluridine-3'-phosphate
  modified_base 4: mod_base = OTHER; note = 2'-O-methyluridine-3'-phosphate
  modified_base 5: mod_base = OTHER; note = 2'-O-methyluridine-3'-phosphate
  modified_base 6: mod_base = OTHER; note = 2'-O-methylcytidine-3'-phosphate
  modified_base 7: mod_base = OTHER; note = 2'-fluorouridine-3'-phosphate
  modified_base 8: mod_base = OTHER; note = 2'-O-methylguanosine-3'-phosphate
  modified_base 9: mod_base = OTHER; note = 2'-fluoroadenosine-3'-phosphate
  modified_base 10: mod_base = OTHER; note = 2'-fluoroguanosine-3'-phosphate
  modified_base 11: mod_base = OTHER; note = 2'-fluoroadenosine-3'-phosphate
  modified_base 12: mod_base = OTHER; note = 2'-O-methyladenosine-3'-phosphate
  modified_base 13: mod_base = OTHER; note = 2'-O-methylcytidine-3'-phosphate
  modified_base 14: mod_base = OTHER; note = 2'-O-methyladenosine-3'-phosphate
  modified_base 15: mod_base = OTHER; note = 2'-O-methyladenosine-3'-phosphate
  modified_base 16: mod_base = OTHER; note = 2'-O-methylguanosine-3'-phosphate
  modified_base 17: mod_base = OTHER; note = 2'-O-methyluridine-3'-phosphate
  modified_base 18: mod_base = OTHER; note = 2'-O-methyladenosine-3'-phosphate
  modified_base 19: mod_base = OTHER; note = 2'-O-methyladenosine-3'-phosphorothioate
  modified_base 20: mod_base = OTHER; note = 2'-O-methyladenosine-3'-phosphorothioate
  modified_base 21: mod_base = OTHER; note = 2'-O-methyladenosine-3'-phosphate
gatttctgagaacaagtaaaa

SEQ ID NO: 4614 - RNA, 21 nt, synthetic construct
  source 1..21: mol_type = other RNA
  modified_base 1: mod_base = OTHER; note = 2'-O-methylcytidine-3'-phosphorothioate
  modified_base 2: mod_base = OTHER; note = 2'-O-methylcytidine-3'-phosphorothioate
  modified_base 3: mod_base = OTHER; note = 2'-O-methyluridine-3'-phosphate
  modified_base 4: mod_base = OTHER; note = 2'-O-methyladenosine-3'-phosphate
  modified_base 5: mod_base = OTHER; note = 2'-O-methylcytidine-3'-phosphate
  modified_base 6: mod_base = OTHER; note = 2'-O-methyluridine-3'-phosphate
  modified_base 7: mod_base = OTHER; note = 2'-fluorouridine-3'-phosphate
  modified_base 8: mod_base = OTHER; note = 2'-O-methylguanosine-3'-phosphate
  modified_base 9: mod_base = OTHER; note = 2'-fluorouridine-3'-phosphate
  modified_base 10: mod_base = OTHER; note = 2'-fluoroguanosine-3'-phosphate
  modified_base 11: mod_base = OTHER; note = 2'-fluoroadenosine-3'-phosphate
  modified_base 12: mod_base = OTHER; note = 2'-O-methyladenosine-3'-phosphate
  modified_base 13: mod_base = OTHER; note = 2'-O-methyladenosine-3'-phosphate
  modified_base 14: mod_base = OTHER; note = 2'-O-methyluridine-3'-phosphate
  modified_base 15: mod_base = OTHER; note = 2'-O-methyladenosine-3'-phosphate
  modified_base 16: mod_base = OTHER; note = 2'-O-methylcytidine-3'-phosphate
  modified_base 17: mod_base = OTHER; note = 2'-O-methyladenosine-3'-phosphate
  modified_base 18: mod_base = OTHER; note = 2'-O-methyluridine-3'-phosphate
  modified_base 19: mod_base = OTHER; note = 2'-O-methyluridine-3'-phosphorothioate
  modified_base 20: mod_base = OTHER; note = 2'-O-methyluridine-3'-phosphorothioate
  modified_base 21: mod_base = OTHER; note = 2'-O-methyladenosine-3'-phosphate
cctacttgtgaaatacattta

SEQ ID NO: 4615 - RNA, 21 nt, synthetic construct
  source 1..21: mol_type = other RNA
  modified_base 1: mod_base = OTHER; note = 2'-O-methylcytidine-3'-phosphorothioate
  modified_base 2: mod_base = OTHER; note = 2'-O-methyladenosine-3'-phosphorothioate
  modified_base 3: mod_base = OTHER; note = 2'-O-methyladenosine-3'-phosphate
  modified_base 4: mod_base = OTHER; note = 2'-O-methylcytidine-3'-phosphate
  modified_base 5: mod_base = OTHER; note = 2'-O-methyluridine-3'-phosphate
  modified_base 6: mod_base = OTHER; note = 2'-O-methylguanosine-3'-phosphate
  modified_base 7: mod_base = OTHER; note = 2'-fluoroguanosine-3'-phosphate
  modified_base 8: mod_base = OTHER; note = 2'-O-methyladenosine-3'-phosphate
  modified_base 9: mod_base = OTHER; note = 2'-fluoroadenosine-3'-phosphate
  modified_base 10: mod_base = OTHER; note = 2'-fluorouridine-3'-phosphate
  modified_base 11: mod_base = OTHER; note = 2'-fluorouridine-3'-phosphate
  modified_base 12: mod_base = OTHER; note = 2'-O-methyluridine-3'-phosphate
  modified_base 13: mod_base = OTHER; note = 2'-O-methyluridine-3'-phosphate
  modified_base 14: mod_base = OTHER; note = 2'-O-methylcytidine-3'-phosphate
  modified_base 15: mod_base = OTHER; note = 2'-O-methylcytidine-3'-phosphate
  modified_base 16: mod_base = OTHER; note = 2'-O-methyladenosine-3'-phosphate
  modified_base 17: mod_base = OTHER; note = 2'-O-methyladenosine-3'-phosphate
  modified_base 18: mod_base = OTHER; note = 2'-O-methyluridine-3'-phosphate
  modified_base 19: mod_base = OTHER; note = 2'-O-methyluridine-3'-phosphorothioate
  modified_base 20: mod_base = OTHER; note = 2'-O-methyluridine-3'-phosphorothioate
  modified_base 21: mod_base = OTHER; note = 2'-O-methyladenosine-3'-phosphate
caactggaattttccaattta

SEQ ID NO: 4616 - RNA, 21 nt, synthetic construct
  source 1..21: mol_type = other RNA
  modified_base 1: mod_base = OTHER; note = 2'-O-methyluridine-3'-phosphorothioate
  modified_base 2: mod_base = OTHER; note = 2'-O-methylcytidine-3'-phosphorothioate
  modified_base 3: mod_base = OTHER; note = 2'-O-methyluridine-3'-phosphate
  modified_base 4: mod_base = OTHER; note = 2'-O-methyladenosine-3'-phosphate
  modified_base 5: mod_base = OTHER; note = 2'-O-methyladenosine-3'-phosphate
  modified_base 6: mod_base = OTHER; note = 2'-O-methyluridine-3'-phosphate
  modified_base 7: mod_base = OTHER; note = 2'-fluorocytidine-3'-phosphate
  modified_base 8: mod_base = OTHER; note = 2'-O-methylcytidine-3'-phosphate
  modified_base 9: mod_base = OTHER; note = 2'-fluorouridine-3'-phosphate
  modified_base 10: mod_base = OTHER; note = 2'-fluoroguanosine-3'-phosphate
  modified_base 11: mod_base = OTHER; note = 2'-fluoroadenosine-3'-phosphate
  modified_base 12: mod_base = OTHER; note = 2'-O-methyluridine-3'-phosphate
  modified_base 13: mod_base = OTHER; note = 2'-O-methylguanosine-3'-phosphate
  modified_base 14: mod_base = OTHER; note = 2'-O-methyladenosine-3'-phosphate
  modified_base 15: mod_base = OTHER; note = 2'-O-methylguanosine-3'-phosphate
  modified_base 16: mod_base = OTHER; note = 2'-O-methyladenosine-3'-phosphate
  modified_base 17: mod_base = OTHER; note = 2'-O-methylguanosine-3'-phosphate
  modified_base 18: mod_base = OTHER; note = 2'-O-methyluridine-3'-phosphate
  modified_base 19: mod_base = OTHER; note = 2'-O-methyluridine-3'-phosphorothioate
  modified_base 20: mod_base = OTHER; note = 2'-O-methyladenosine-3'-phosphorothioate
  modified_base 21: mod_base = OTHER; note = 2'-O-methyladenosine-3'-phosphate
tctaatcctgatgagagttaa

SEQ ID NO: 4617 - RNA, 21 nt, synthetic construct
  source 1..21: mol_type = other RNA
  modified_base 1: mod_base = OTHER; note = 2'-O-methyladenosine-3'-phosphorothioate
  modified_base 2: mod_base = OTHER; note = 2'-O-methylguanosine-3'-phosphorothioate
  modified_base 3: mod_base = OTHER; note = 2'-O-methylcytidine-3'-phosphate
  modified_base 4: mod_base = OTHER; note = 2'-O-methylcytidine-3'-phosphate
  modified_base 5: mod_base = OTHER; note = 2'-O-methyluridine-3'-phosphate
  modified_base 6: mod_base = OTHER; note = 2'-O-methylcytidine-3'-phosphate
  modified_base 7: mod_base = OTHER; note = 2'-fluoroadenosine-3'-phosphate
  modified_base 8: mod_base = OTHER; note = 2'-O-methyluridine-3'-phosphate
  modified_base 9: mod_base = OTHER; note = 2'-fluorouridine-3'-phosphate
  modified_base 10: mod_base = OTHER; note = 2'-fluoroadenosine-3'-phosphate
  modified_base 11: mod_base = OTHER; note = 2'-fluorouridine-3'-phosphate
  modified_base 12: mod_base = OTHER; note = 2'-O-methylcytidine-3'-phosphate
  modified_base 13: mod_base = OTHER; note = 2'-O-methyladenosine-3'-phosphate
  modified_base 14: mod_base = OTHER; note = 2'-O-methyladenosine-3'-phosphate
  modified_base 15: mod_base = OTHER; note = 2'-O-methyladenosine-3'-phosphate
  modified_base 16: mod_base = OTHER; note = 2'-O-methyladenosine-3'-phosphate
  modified_base 17: mod_base = OTHER; note = 2'-O-methyluridine-3'-phosphate
  modified_base 18: mod_base = OTHER; note = 2'-O-methyluridine-3'-phosphate
  modified_base 19: mod_base = OTHER; note = 2'-O-methylcytidine-3'-phosphorothioate
  modified_base 20: mod_base = OTHER; note = 2'-O-methyluridine-3'-phosphorothioate
  modified_base 21: mod_base = OTHER; note = 2'-O-methyladenosine-3'-phosphate
agcctcattatcaaaattcta

SEQ ID NO: 4618 - RNA, 21 nt, synthetic construct
  source 1..21: mol_type = other RNA
  modified_base 1: mod_base = OTHER; note = 2'-O-methyladenosine-3'-phosphorothioate
  modified_base 2: mod_base = OTHER; note = 2'-O-methyladenosine-3'-phosphorothioate
  modified_base 3: mod_base = OTHER; note = 2'-O-methyluridine-3'-phosphate
  modified_base 4: mod_base = OTHER; note = 2'-O-methyluridine-3'-phosphate
  modified_base 5: mod_base = OTHER; note = 2'-O-methyluridine-3'-phosphate
  modified_base 6: mod_base = OTHER; note = 2'-O-methylcytidine-3'-phosphate
  modified_base 7: mod_base = OTHER; note = 2'-fluorouridine-3'-phosphate
  modified_base 8: mod_base = OTHER; note = 2'-O-methylguanosine-3'-phosphate
  modified_base 9: mod_base = OTHER; note = 2'-fluoroadenosine-3'-phosphate
  modified_base 10: mod_base = OTHER; note = 2'-fluorouridine-3'-phosphate
  modified_base 11: mod_base = OTHER; note = 2'-fluoroguanosine-3'-phosphate
  modified_base 12: mod_base = OTHER; note = 2'-O-methylcytidine-3'-phosphate
  modified_base 13: mod_base = OTHER; note = 2'-O-methyluridine-3'-phosphate
  modified_base 14: mod_base = OTHER; note = 2'-O-methyluridine-3'-phosphate
  modified_base 15: mod_base = OTHER; note = 2'-O-methyluridine-3'-phosphate
  modified_base 16: mod_base = OTHER; note = 2'-O-methyluridine-3'-phosphate
  modified_base 17: mod_base = OTHER; note = 2'-O-methyluridine-3'-phosphate
  modified_base 18: mod_base = OTHER; note = 2'-O-methyladenosine-3'-phosphate
  modified_base 19: mod_base = OTHER; note = 2'-O-methylcytidine-3'-phosphorothioate
  modified_base 20: mod_base = OTHER; note = 2'-O-methyluridine-3'-phosphorothioate
  modified_base 21: mod_base = OTHER; note = 2'-O-methyladenosine-3'-phosphate
aatttctgatgctttttacta

SEQ ID NO: 4619 - RNA, 21 nt, synthetic construct
  source 1..21: mol_type = other RNA
  modified_base 1: mod_base = OTHER; note = 2'-O-methyluridine-3'-phosphorothioate
  modified_base 2: mod_base = OTHER; note = 2'-O-methyladenosine-3'-phosphorothioate
  modified_base 3: mod_base = OTHER; note = 2'-O-methylcytidine-3'-phosphate
  modified_base 4: mod_base = OTHER; note = 2'-O-methylcytidine-3'-phosphate
  modified_base 5: mod_base = OTHER; note = 2'-O-methyladenosine-3'-phosphate
  modified_base 6: mod_base = OTHER; note = 2'-O-methyluridine-3'-phosphate
  modified_base 7: mod_base = OTHER; note = 2'-fluorouridine-3'-phosphate
  modified_base 8: mod_base = OTHER; note = 2'-O-methyladenosine-3'-phosphate
  modified_base 9: mod_base = OTHER; note = 2'-fluoroguanosine-3'-phosphate
  modified_base 10: mod_base = OTHER; note = 2'-fluoroadenosine-3'-phosphate
  modified_base 11: mod_base = OTHER; note = 2'-fluorouridine-3'-phosphate
  modified_base 12: mod_base = OTHER; note = 2'-O-methylguanosine-3'-phosphate
  modified_base 13: mod_base = OTHER; note = 2'-O-methyladenosine-3'-phosphate
  modified_base 14: mod_base = OTHER; note = 2'-O-methyladenosine-3'-phosphate
  modified_base 15: mod_base = OTHER; note = 2'-O-methyladenosine-3'-phosphate
  modified_base 16: mod_base = OTHER; note = 2'-O-methyluridine-3'-phosphate
  modified_base 17: mod_base = OTHER; note = 2'-O-methylcytidine-3'-phosphate
  modified_base 18: mod_base = OTHER; note = 2'-O-methyluridine-3'-phosphate
  modified_base 19: mod_base = OTHER; note = 2'-O-methyluridine-3'-phosphorothioate
  modified_base 20: mod_base = OTHER; note = 2'-O-methyladenosine-3'-phosphorothioate
  modified_base 21: mod_base = OTHER; note = 2'-O-methyladenosine-3'-phosphate
taccattagatgaaatcttaa

SEQ ID NO: 4620 - RNA, 21 nt, synthetic construct
  source 1..21: mol_type = other RNA
  modified_base 1: mod_base = OTHER; note = 2'-O-methylcytidine-3'-phosphorothioate
  modified_base 2: mod_base = OTHER; note = 2'-O-methyluridine-3'-phosphorothioate
  modified_base 3: mod_base = OTHER; note = 2'-O-methylguanosine-3'-phosphate
  modified_base 4: mod_base = OTHER; note = 2'-O-methyluridine-3'-phosphate
  modified_base 5: mod_base = OTHER; note = 2'-O-methylguanosine-3'-phosphate
  modified_base 6: mod_base = OTHER; note = 2'-O-methyladenosine-3'-phosphate
  modified_base 7: mod_base = OTHER; note = 2'-fluoroadenosine-3'-phosphate
  modified_base 8: mod_base = OTHER; note = 2'-O-methyluridine-3'-phosphate
  modified_base 9: mod_base = OTHER; note = 2'-fluorouridine-3'-phosphate
  modified_base 10: mod_base = OTHER; note = 2'-fluorocytidine-3'-phosphate
  modified_base 11: mod_base = OTHER; note = 2'-fluorouridine-3'-phosphate
  modified_base 12: mod_base = OTHER; note = 2'-O-methyluridine-3'-phosphate
  modified_base 13: mod_base = OTHER; note = 2'-O-methylcytidine-3'-phosphate
  modified_base 14: mod_base = OTHER; note = 2'-O-methylcytidine-3'-phosphate
  modified_base 15: mod_base = OTHER; note = 2'-O-methyladenosine-3'-phosphate
  modified_base 16: mod_base = OTHER; note = 2'-O-methyladenosine-3'-phosphate
  modified_base 17: mod_base = OTHER; note = 2'-O-methylcytidine-3'-phosphate
  modified_base 18: mod_base = OTHER; note = 2'-O-methylcytidine-3'-phosphate
  modified_base 19: mod_base = OTHER; note = 2'-O-methyladenosine-3'-phosphorothioate
  modified_base 20: mod_base = OTHER; note = 2'-O-methyluridine-3'-phosphorothioate
  modified_base 21: mod_base = OTHER; note = 2'-O-methyladenosine-3'-phosphate
ctgtgaattcttccaaccata

SEQ ID NO: 4621 - RNA, 21 nt, synthetic construct
  source 1..21: mol_type = other RNA
  modified_base 1: mod_base = OTHER; note = 2'-O-methylcytidine-3'-phosphorothioate
  modified_base 2: mod_base = OTHER; note = 2'-O-methyluridine-3'-phosphorothioate
  modified_base 3: mod_base = OTHER; note = 2'-O-methyladenosine-3'-phosphate
  modified_base 4: mod_base = OTHER; note = 2'-O-methyladenosine-3'-phosphate
  modified_base 5: mod_base = OTHER; note = 2'-O-methyluridine-3'-phosphate
  modified_base 6: mod_base = OTHER; note = 2'-O-methyladenosine-3'-phosphate
  modified_base 7: mod_base = OTHER; note = 2'-fluorocytidine-3'-phosphate
  modified_base 8: mod_base = OTHER; note = 2'-O-methyluridine-3'-phosphate
  modified_base 9: mod_base = OTHER; note = 2'-fluorocytidine-3'-phosphate
  modified_base 10: mod_base = OTHER; note = 2'-fluorocytidine-3'-phosphate
  modified_base 11: mod_base = OTHER; note = 2'-fluoroadenosine-3'-phosphate
  modified_base 12: mod_base = OTHER; note = 2'-O-methylguanosine-3'-phosphate
  modified_base 13: mod_base = OTHER; note = 2'-O-methyladenosine-3'-phosphate
  modified_base 14: mod_base = OTHER; note = 2'-O-methyluridine-3'-phosphate
  modified_base 15: mod_base = OTHER; note = 2'-O-methyluridine-3'-phosphate
  modified_base 16: mod_base = OTHER; note = 2'-O-methyluridine-3'-phosphate
  modified_base 17: mod_base = OTHER; note = 2'-O-methyluridine-3'-phosphate
  modified_base 18: mod_base = OTHER; note = 2'-O-methyluridine-3'-phosphate
  modified_base 19: mod_base = OTHER; note = 2'-O-methyladenosine-3'-phosphorothioate
  modified_base 20: mod_base = OTHER; note = 2'-O-methyluridine-3'-phosphorothioate
  modified_base 21: mod_base = OTHER; note = 2'-O-methyladenosine-3'-phosphate
ctaatactccagatttttata

SEQ ID NO: 4622 - RNA, 21 nt, synthetic construct
  source 1..21: mol_type = other RNA
  modified_base 1: mod_base = OTHER; note = 2'-O-methylguanosine-3'-phosphorothioate
  modified_base 2: mod_base = OTHER; note = 2'-O-methylguanosine-3'-phosphorothioate
  modified_base 3: mod_base = OTHER; note = 2'-O-methyladenosine-3'-phosphate
  modified_base 4: mod_base = OTHER; note = 2'-O-methylcytidine-3'-phosphate
  modified_base 5: mod_base = OTHER; note = 2'-O-methyladenosine-3'-phosphate
  modified_base 6: mod_base = OTHER; note = 2'-O-methylcytidine-3'-phosphate
  modified_base 7: mod_base = OTHER; note = 2'-fluoroadenosine-3'-phosphate
  modified_base 8: mod_base = OTHER; note = 2'-O-methyluridine-3'-phosphate
  modified_base 9: mod_base = OTHER; note = 2'-fluoroadenosine-3'-phosphate
  modified_base 10: mod_base = OTHER; note = 2'-fluorocytidine-3'-phosphate
  modified_base 11: mod_base = OTHER; note = 2'-fluoroadenosine-3'-phosphate
  modified_base 12: mod_base = OTHER; note = 2'-O-methyluridine-3'-phosphate
  modified_base 13: mod_base = OTHER; note = 2'-O-methyluridine-3'-phosphate
  modified_base 14: mod_base = OTHER; note = 2'-O-methylguanosine-3'-phosphate
  modified_base 15: mod_base = OTHER; note = 2'-O-methyladenosine-3'-phosphate
  modified_base 16: mod_base = OTHER; note = 2'-O-methyladenosine-3'-phosphate
  modified_base 17: mod_base = OTHER; note = 2'-O-methyluridine-3'-phosphate
  modified_base 18: mod_base = OTHER; note = 2'-O-methyladenosine-3'-phosphate
  modified_base 19: mod_base = OTHER; note = 2'-O-methyladenosine-3'-phosphorothioate
  modified_base 20: mod_base = OTHER; note = 2'-O-methyladenosine-3'-phosphorothioate
  modified_base 21: mod_base = OTHER; note = 2'-O-methyladenosine-3'-phosphate
ggacacatacattgaataaaa

SEQ ID NO: 4623 - RNA, 21 nt, synthetic construct
  source 1..21: mol_type = other RNA
  modified_base 1: mod_base = OTHER; note = 2'-O-methyluridine-3'-phosphorothioate
  modified_base 2: mod_base = OTHER; note = 2'-O-methyluridine-3'-phosphorothioate
  modified_base 3: mod_base = OTHER; note = 2'-O-methyluridine-3'-phosphate
  modified_base 4: mod_base = OTHER; note = 2'-O-methylguanosine-3'-phosphate
  modified_base 5: mod_base = OTHER; note = 2'-O-methyluridine-3'-phosphate
  modified_base 6: mod_base = OTHER; note = 2'-O-methylcytidine-3'-phosphate
  modified_base 7: mod_base = OTHER; note = 2'-fluoroadenosine-3'-phosphate
  modified_base 8: mod_base = OTHER; note = 2'-O-methyluridine-3'-phosphate
  modified_base 9: mod_base = OTHER; note = 2'-fluoroadenosine-3'-phosphate
  modified_base 10: mod_base = OTHER; note = 2'-fluoroadenosine-3'-phosphate
  modified_base 11: mod_base = OTHER; note = 2'-fluorouridine-3'-phosphate
  modified_base 12: mod_base = OTHER; note = 2'-O-methylguanosine-3'-phosphate
  modified_base 13: mod_base = OTHER; note = 2'-O-methylcytidine-3'-phosphate
  modified_base 14: mod_base = OTHER; note = 2'-O-methyluridine-3'-phosphate
  modified_base 15: mod_base = OTHER; note = 2'-O-methylguanosine-3'-phosphate
  modified_base 16: mod_base = OTHER; note = 2'-O-methylcytidine-3'-phosphate
  modified_base 17: mod_base = OTHER; note = 2'-O-methyluridine-3'-phosphate
  modified_base 18: mod_base = OTHER; note = 2'-O-methyluridine-3'-phosphate
  modified_base 19: mod_base = OTHER; note = 2'-O-methyluridine-3'-phosphorothioate
  modified_base 20: mod_base = OTHER; note = 2'-O-methylguanosine-3'-phosphorothioate
  modified_base 21: mod_base = OTHER; note = 2'-O-methyladenosine-3'-phosphate
tttgtcataatgctgctttga

SEQ ID NO: 4624 - RNA, 21 nt, synthetic construct
  source 1..21: mol_type = other RNA
  modified_base 1: mod_base = OTHER; note = 2'-O-methyluridine-3'-phosphorothioate
  modified_base 2: mod_base = OTHER; note = 2'-O-methyluridine-3'-phosphorothioate
  modified_base 3: mod_base = OTHER; note = 2'-O-methylcytidine-3'-phosphate
  modified_base 4: mod_base = OTHER; note = 2'-O-methyladenosine-3'-phosphate
  modified_base 5: mod_base = OTHER; note = 2'-O-methyluridine-3'-phosphate
  modified_base 6: mod_base = OTHER; note = 2'-O-methylcytidine-3'-phosphate
  modified_base 7: mod_base = OTHER; note = 2'-fluorouridine-3'-phosphate
  modified_base 8: mod_base = OTHER; note = 2'-O-methyluridine-3'-phosphate
  modified_base 9: mod_base = OTHER; note = 2'-fluorouridine-3'-phosphate
  modified_base 10: mod_base = OTHER; note = 2'-fluorocytidine-3'-phosphate
  modified_base 11: mod_base = OTHER; note = 2'-fluorouridine-3'-phosphate
  modified_base 12: mod_base = OTHER; note = 2'-O-methylguanosine-3'-phosphate
  modified_base 13: mod_base = OTHER; note = 2'-O-methyluridine-3'-phosphate
  modified_base 14: mod_base = OTHER; note = 2'-O-methyluridine-3'-phosphate
  modified_base 15: mod_base = OTHER; note = 2'-O-methyladenosine-3'-phosphate
  modified_base 16: mod_base = OTHER; note = 2'-O-methyladenosine-3'-phosphate
  modified_base 17: mod_base = OTHER; note = 2'-O-methyluridine-3'-phosphate
  modified_base 18: mod_base = OTHER; note = 2'-O-methyluridine-3'-phosphate
  modified_base 19: mod_base = OTHER; note = 2'-O-methyluridine-3'-phosphorothioate
  modified_base 20: mod_base = OTHER; note = 2'-O-methylcytidine-3'-phosphorothioate
  modified_base 21: mod_base = OTHER; note = 2'-O-methyladenosine-3'-phosphate
ttcatctttctgttaatttca

SEQ ID NO: 4625 - RNA, 21 nt, synthetic construct
  source 1..21: mol_type = other RNA
  modified_base 1: mod_base = OTHER; note = 2'-O-methylcytidine-3'-phosphorothioate
  modified_base 2: mod_base = OTHER; note = 2'-O-methyladenosine-3'-phosphorothioate
  modified_base 3: mod_base = OTHER; note = 2'-O-methylguanosine-3'-phosphate
  modified_base 4: mod_base = OTHER; note = 2'-O-methyluridine-3'-phosphate
  modified_base 5: mod_base = OTHER; note = 2'-O-methylguanosine-3'-phosphate
  modified_base 6: mod_base = OTHER; note = 2'-O-methyladenosine-3'-phosphate
  modified_base 7: mod_base = OTHER; note = 2'-fluoroadenosine-3'-phosphate
  modified_base 8: mod_base = OTHER; note = 2'-O-methyladenosine-3'-phosphate
  modified_base 9: mod_base = OTHER; note = 2'-fluorocytidine-3'-phosphate
  modified_base 10: mod_base = OTHER; note = 2'-fluorocytidine-3'-phosphate
  modified_base 11: mod_base = OTHER; note = 2'-fluoroadenosine-3'-phosphate
  modified_base 12: mod_base = OTHER; note = 2'-O-methyluridine-3'-phosphate
  modified_base 13: mod_base = OTHER; note = 2'-O-methyluridine-3'-phosphate
  modified_base 14: mod_base = OTHER; note = 2'-O-methyladenosine-3'-phosphate
  modified_base 15: mod_base = OTHER; note = 2'-O-methyladenosine-3'-phosphate
  modified_base 16: mod_base = OTHER; note = 2'-O-methyluridine-3'-phosphate
  modified_base 17: mod_base = OTHER; note = 2'-O-methyluridine-3'-phosphate
  modified_base 18: mod_base = OTHER; note = 2'-O-methyluridine-3'-phosphate
  modified_base 19: mod_base = OTHER; note = 2'-O-methyluridine-3'-phosphorothioate
  modified_base 20: mod_base = OTHER; note = 2'-O-methylcytidine-3'-phosphorothioate
  modified_base 21: mod_base = OTHER; note = 2'-O-methyladenosine-3'-phosphate
cagtgaaaccattaattttca

SEQ ID NO: 4626 - RNA, 21 nt, synthetic construct
  source 1..21: mol_type = other RNA
  modified_base 1: mod_base = OTHER; note = 2'-O-methyluridine-3'-phosphorothioate
  modified_base 2: mod_base = OTHER; note = 2'-O-methyladenosine-3'-phosphorothioate
  modified_base 3: mod_base = OTHER; note = 2'-O-methyladenosine-3'-phosphate
  modified_base 4: mod_base = OTHER; note = 2'-O-methylcytidine-3'-phosphate
  modified_base 5: mod_base = OTHER; note = 2'-O-methyluridine-3'-phosphate
  modified_base 6: mod_base = OTHER; note = 2'-O-methylguanosine-3'-phosphate
  modified_base 7: mod_base = OTHER; note = 2'-fluorocytidine-3'-phosphate
  modified_base 8: mod_base = OTHER; note = 2'-O-methyladenosine-3'-phosphate
  modified_base 9: mod_base = OTHER; note = 2'-fluoroadenosine-3'-phosphate
  modified_base 10: mod_base = OTHER; note = 2'-fluoroguanosine-3'-phosphate
  modified_base 11: mod_base = OTHER; note = 2'-fluoroadenosine-3'-phosphate
  modified_base 12: mod_base = OTHER; note = 2'-O-methylcytidine-3'-phosphate
  modified_base 13: mod_base = OTHER; note = 2'-O-methyluridine-3'-phosphate
  modified_base 14: mod_base = OTHER; note = 2'-O-methylguanosine-3'-phosphate
  modified_base 15: mod_base = OTHER; note = 2'-O-methyladenosine-3'-phosphate
  modified_base 16: mod_base = OTHER; note = 2'-O-methyluridine-3'-phosphate
  modified_base 17: mod_base = OTHER; note = 2'-O-methyluridine-3'-phosphate
  modified_base 18: mod_base = OTHER; note = 2'-O-methyluridine-3'-phosphate
  modified_base 19: mod_base = OTHER; note = 2'-O-methylcytidine-3'-phosphorothioate
  modified_base 20: mod_base = OTHER; note = 2'-O-methyluridine-3'-phosphorothioate
  modified_base 21: mod_base = OTHER; note = 2'-O-methyladenosine-3'-phosphate
taactgcaagactgatttcta

SEQ ID NO: 4627 - RNA, 21 nt, synthetic construct
  source 1..21: mol_type = other RNA
  modified_base 1: mod_base = OTHER; note = 2'-O-methyladenosine-3'-phosphorothioate
  modified_base 2: mod_base = OTHER; note = 2'-O-methylguanosine-3'-phosphorothioate
  modified_base 3: mod_base = OTHER; note = 2'-O-methyladenosine-3'-phosphate
  modified_base 4: mod_base = OTHER; note = 2'-O-methyladenosine-3'-phosphate
  modified_base 5: mod_base = OTHER; note = 2'-O-methyluridine-3'-phosphate
  modified_base 6: mod_base = OTHER; note = 2'-O-methyluridine-3'-phosphate
  modified_base 7: mod_base = OTHER; note = 2'-fluorocytidine-3'-phosphate
  modified_base 8: mod_base = OTHER; note = 2'-O-methylcytidine-3'-phosphate
  modified_base 9: mod_base = OTHER; note = 2'-fluorouridine-3'-phosphate
  modified_base 10: mod_base = OTHER; note = 2'-fluorocytidine-3'-phosphate
  modified_base 11: mod_base = OTHER; note = 2'-fluorocytidine-3'-phosphate
  modified_base 12: mod_base = OTHER; note = 2'-O-methyluridine-3'-phosphate
  modified_base 13: mod_base = OTHER; note = 2'-O-methyluridine-3'-phosphate
  modified_base 14: mod_base = OTHER; note = 2'-O-methyladenosine-3'-phosphate
  modified_base 15: mod_base = OTHER; note = 2'-O-methylcytidine-3'-phosphate
  modified_base 16: mod_base = OTHER; note = 2'-O-methylcytidine-3'-phosphate
  modified_base 17: mod_base = OTHER; note = 2'-O-methyluridine-3'-phosphate
  modified_base 18: mod_base = OTHER; note = 2'-O-methylcytidine-3'-phosphate
  modified_base 19: mod_base = OTHER; note = 2'-O-methyladenosine-3'-phosphorothioate
  modified_base 20: mod_base = OTHER; note = 2'-O-methyladenosine-3'-phosphorothioate
  modified_base 21: mod_base = OTHER; note = 2'-O-methyladenosine-3'-phosphate
agaattcctccttacctcaaa

SEQ ID NO: 4628 - RNA, 21 nt, synthetic construct
  source 1..21: mol_type = other RNA
  modified_base 1: mod_base = OTHER; note = 2'-O-methyluridine-3'-phosphorothioate
  modified_base 2: mod_base = OTHER; note = 2'-O-methyladenosine-3'-phosphorothioate
  modified_base 3: mod_base = OTHER; note = 2'-O-methyluridine-3'-phosphate
  modified_base 4: mod_base = OTHER; note = 2'-O-methyluridine-3'-phosphate
  modified_base 5: mod_base = OTHER; note = 2'-O-methyladenosine-3'-phosphate
  modified_base 6: mod_base = OTHER; note = 2'-O-methylcytidine-3'-phosphate
  modified_base 7: mod_base = OTHER; note = 2'-fluoroadenosine-3'-phosphate
  modified_base 8: mod_base = OTHER; note = 2'-O-methylguanosine-3'-phosphate
  modified_base 9: mod_base = OTHER; note = 2'-fluoroadenosine-3'-phosphate
  modified_base 10: mod_base = OTHER; note = 2'-fluorouridine-3'-phosphate
  modified_base 11: mod_base = OTHER; note = 2'-fluorocytidine-3'-phosphate
  modified_base 12: mod_base = OTHER; note = 2'-O-methyluridine-3'-phosphate
  modified_base 13: mod_base = OTHER; note = 2'-O-methyluridine-3'-phosphate
  modified_base 14: mod_base = OTHER; note = 2'-O-methyladenosine-3'-phosphate
  modified_base 15: mod_base = OTHER; note = 2'-O-methylcytidine-3'-phosphate
  modified_base 16: mod_base = OTHER; note = 2'-O-methyluridine-3'-phosphate
  modified_base 17: mod_base = OTHER; note = 2'-O-methyluridine-3'-phosphate
  modified_base 18: mod_base = OTHER; note = 2'-O-methyluridine-3'-phosphate
  modified_base 19: mod_base = OTHER; note = 2'-O-methylguanosine-3'-phosphorothioate
  modified_base 20: mod_base = OTHER; note = 2'-O-methyluridine-3'-phosphorothioate
  modified_base 21: mod_base = OTHER; note = 2'-O-methyladenosine-3'-phosphate
tattacagatcttactttgta

SEQ ID NO: 4629 - RNA, 21 nt, synthetic construct
  source 1..21: mol_type = other RNA
  modified_base 1: mod_base = OTHER; note = 2'-O-methyluridine-3'-phosphorothioate
  modified_base 2: mod_base = OTHER; note = 2'-O-methyluridine-3'-phosphorothioate
  modified_base 3: mod_base = OTHER; note = 2'-O-methyladenosine-3'-phosphate
  modified_base 4: mod_base = OTHER; note = 2'-O-methyluridine-3'-phosphate
  modified_base 5: mod_base = OTHER; note = 2'-O-methylcytidine-3'-phosphate
  modified_base 6: mod_base = OTHER; note = 2'-O-methyluridine-3'-phosphate
  modified_base 7: mod_base = OTHER; note = 2'-fluoroguanosine-3'-phosphate
  modified_base 8: mod_base = OTHER; note = 2'-O-methyladenosine-3'-phosphate
  modified_base 9: mod_base = OTHER; note = 2'-fluoroadenosine-3'-phosphate
  modified_base 10: mod_base = OTHER; note = 2'-fluoroadenosine-3'-phosphate
  modified_base 11: mod_base = OTHER; note = 2'-fluoroguanosine-3'-phosphate
  modified_base 12: mod_base = OTHER; note = 2'-O-methyladenosine-3'-phosphate
  modified_base 13: mod_base = OTHER; note = 2'-O-methyluridine-3'-phosphate
  modified_base 14: mod_base = OTHER; note = 2'-O-methyladenosine-3'-phosphate
  modified_base 15: mod_base = OTHER; note = 2'-O-methyluridine-3'-phosphate
  modified_base 16: mod_base = OTHER; note = 2'-O-methylcytidine-3'-phosphate
  modified_base 17: mod_base = OTHER; note = 2'-O-methyladenosine-3'-phosphate
  modified_base 18: mod_base = OTHER; note = 2'-O-methyladenosine-3'-phosphate
  modified_base 19: mod_base = OTHER; note = 2'-O-methyluridine-3'-phosphorothioate
  modified_base 20: mod_base = OTHER; note = 2'-O-methyluridine-3'-phosphorothioate
  modified_base 21: mod_base = OTHER; note = 2'-O-methyladenosine-3'-phosphate
ttatctgaaagatatcaatta

SEQ ID NO: 4630 - RNA, 21 nt, synthetic construct
  source 1..21: mol_type = other RNA
  modified_base 1: mod_base = OTHER; note = 2'-O-methyladenosine-3'-phosphorothioate
  modified_base 2: mod_base = OTHER; note = 2'-O-methylguanosine-3'-phosphorothioate
  modified_base 3: mod_base = OTHER; note = 2'-O-methyladenosine-3'-phosphate
  modified_base 4: mod_base = OTHER; note = 2'-O-methyluridine-3'-phosphate
  modified_base 5: mod_base = OTHER; note = 2'-O-methylcytidine-3'-phosphate
  modified_base 6: mod_base = OTHER; note = 2'-O-methyluridine-3'-phosphate
  modified_base 7: mod_base = OTHER; note = 2'-fluoroguanosine-3'-phosphate
  modified_base 8: mod_base = OTHER; note = 2'-O-methyluridine-3'-phosphate
  modified_base 9: mod_base = OTHER; note = 2'-fluorouridine-3'-phosphate
  modified_base 10: mod_base = OTHER; note = 2'-fluorocytidine-3'-phosphate
  modified_base 11: mod_base = OTHER; note = 2'-fluorouridine-3'-phosphate
  modified_base 12: mod_base = OTHER; note = 2'-O-methylguanosine-3'-phosphate
  modified_base 13: mod_base = OTHER; note = 2'-O-methylguanosine-3'-phosphate
  modified_base 14: mod_base = OTHER; note = 2'-O-methyladenosine-3'-phosphate
  modified_base 15: mod_base = OTHER; note = 2'-O-methyladenosine-3'-phosphate
  modified_base 16: mod_base = OTHER; note = 2'-O-methyladenosine-3'-phosphate
  modified_base 17: mod_base = OTHER; note = 2'-O-methyladenosine-3'-phosphate
  modified_base 18: mod_base = OTHER; note = 2'-O-methyluridine-3'-phosphate
  modified_base 19: mod_base = OTHER; note = 2'-O-methylcytidine-3'-phosphorothioate
  modified_base 20: mod_base = OTHER; note = 2'-O-methyladenosine-3'-phosphorothioate
  modified_base 21: mod_base = OTHER; note = 2'-O-methyladenosine-3'-phosphate
agatctgttctggaaaatcaa

SEQ ID NO: 4631 - RNA, 21 nt, synthetic construct
  source 1..21: mol_type = other RNA
  modified_base 1: mod_base = OTHER; note = 2'-O-methylcytidine-3'-phosphorothioate
  modified_base 2: mod_base = OTHER; note = 2'-O-methylcytidine-3'-phosphorothioate
  modified_base 3: mod_base = OTHER; note = 2'-O-methylcytidine-3'-phosphate
  modified_base 4: mod_base = OTHER; note = 2'-O-methyladenosine-3'-phosphate
  modified_base 5: mod_base = OTHER; note = 2'-O-methylguanosine-3'-phosphate
  modified_base 6: mod_base = OTHER; note = 2'-O-methyladenosine-3'-phosphate
  modified_base 7: mod_base = OTHER; note = 2'-fluoroadenosine-3'-phosphate
  modified_base 8: mod_base = OTHER; note = 2'-O-methyluridine-3'-phosphate
  modified_base 9: mod_base = OTHER; note = 2'-fluoroadenosine-3'-phosphate
  modified_base 10: mod_base = OTHER; note = 2'-fluorocytidine-3'-phosphate
  modified_base 11: mod_base = OTHER; note = 2'-fluoroadenosine-3'-phosphate
  modified_base 12: mod_base = OTHER; note = 2'-O-methyladenosine-3'-phosphate
  modified_base 13: mod_base = OTHER; note = 2'-O-methylcytidine-3'-phosphate
  modified_base 14: mod_base = OTHER; note = 2'-O-methyluridine-3'-phosphate
  modified_base 15: mod_base = OTHER; note = 2'-O-methyluridine-3'-phosphate
  modified_base 16: mod_base = OTHER; note = 2'-O-methylcytidine-3'-phosphate
  modified_base 17: mod_base = OTHER; note = 2'-O-methylcytidine-3'-phosphate
  modified_base 18: mod_base = OTHER; note = 2'-O-methyluridine-3'-phosphate
  modified_base 19: mod_base = OTHER; note = 2'-O-methyluridine-3'-phosphorothioate
  modified_base 20: mod_base = OTHER; note = 2'-O-methylcytidine-3'-phosphorothioate
  modified_base 21: mod_base = OTHER; note = 2'-O-methyladenosine-3'-phosphate
cccagaatacaacttccttca

SEQ ID NO: 4632 - RNA, 21 nt, synthetic construct
  source 1..21: mol_type = other RNA
  modified_base 1: mod_base = OTHER; note = 2'-O-methylguanosine-3'-phosphorothioate
  modified_base 2: mod_base = OTHER; note = 2'-O-methyluridine-3'-phosphorothioate
  modified_base 3: mod_base = OTHER; note = 2'-O-methyluridine-3'-phosphate
  modified_base 4: mod_base = OTHER; note = 2'-O-methylguanosine-3'-phosphate
  modified_base 5: mod_base = OTHER; note = 2'-O-methyladenosine-3'-phosphate
  modified_base 6: mod_base = OTHER; note = 2'-O-methyluridine-3'-phosphate
  modified_base 7: mod_base = OTHER; note = 2'-fluorocytidine-3'-phosphate
  modified_base 8: mod_base = OTHER; note = 2'-O-methyluridine-3'-phosphate
  modified_base 9: mod_base = OTHER; note = 2'-fluorouridine-3'-phosphate
  modified_base 10: mod_base = OTHER; note = 2'-fluorouridine-3'-phosphate
  modified_base 11: mod_base = OTHER; note = 2'-fluorocytidine-3'-phosphate
  modified_base 12: mod_base = OTHER; note = 2'-O-methyladenosine-3'-phosphate
  modified_base 13: mod_base = OTHER; note = 2'-O-methylguanosine-3'-phosphate
  modified_base 14: mod_base = OTHER; note = 2'-O-methyluridine-3'-phosphate
  modified_base 15: mod_base = OTHER; note = 2'-O-methylguanosine-3'-phosphate
  modified_base 16: mod_base = OTHER; note = 2'-O-methylcytidine-3'-phosphate
  modified_base 17: mod_base = OTHER; note = 2'-O-methyluridine-3'-phosphate
  modified_base 18: mod_base = OTHER; note = 2'-O-methyladenosine-3'-phosphate
  modified_base 19: mod_base = OTHER; note = 2'-O-methyladenosine-3'-phosphorothioate
  modified_base 20: mod_base = OTHER; note = 2'-O-methyladenosine-3'-phosphorothioate
  modified_base 21: mod_base = OTHER; note = 2'-O-methyladenosine-3'-phosphate
gttgatctttcagtgctaaaa

SEQ ID NO: 4633 - RNA, 21 nt, synthetic construct
  source 1..21: mol_type = other RNA
  modified_base 1: mod_base = OTHER; note = 2'-O-methylcytidine-3'-phosphorothioate
  modified_base 2: mod_base = OTHER; note = 2'-O-methyluridine-3'-phosphorothioate
  modified_base 3: mod_base = OTHER; note = 2'-O-methyladenosine-3'-phosphate
  modified_base 4: mod_base = OTHER; note = 2'-O-methyladenosine-3'-phosphate
  modified_base 5: mod_base = OTHER; note = 2'-O-methylguanosine-3'-phosphate
  modified_base 6: mod_base = OTHER; note = 2'-O-methylcytidine-3'-phosphate
  modified_base 7: mod_base = OTHER; note = 2'-fluorouridine-3'-phosphate
  modified_base 8: mod_base = OTHER; note = 2'-O-methyluridine-3'-phosphate
  modified_base 9: mod_base = OTHER; note = 2'-fluorouridine-3'-phosphate
  modified_base 10: mod_base = OTHER; note = 2'-fluoroadenosine-3'-phosphate
  modified_base 11: mod_base = OTHER; note = 2'-fluorouridine-3'-phosphate
  modified_base 12: mod_base = OTHER; note = 2'-O-methyluridine-3'-phosphate
  modified_base 13: mod_base = OTHER; note = 2'-O-methyluridine-3'-phosphate
  modified_base 14: mod_base = OTHER; note = 2'-O-methyladenosine-3'-phosphate
  modified_base 15: mod_base = OTHER; note = 2'-O-methyluridine-3'-phosphate
  modified_base 16: mod_base = OTHER; note = 2'-O-methyluridine-3'-phosphate
  modified_base 17: mod_base = OTHER; note = 2'-O-methyladenosine-3'-phosphate
  modified_base 18: mod_base = OTHER; note = 2'-O-methylguanosine-3'-phosphate
  modified_base 19: mod_base = OTHER; note = 2'-O-methyladenosine-3'-phosphorothioate
  modified_base 20: mod_base = OTHER; note = 2'-O-methylcytidine-3'-phosphorothioate
  modified_base 21: mod_base = OTHER; note = 2'-O-methyladenosine-3'-phosphate
ctaagctttatttattagaca

SEQ ID NO: 4634 - RNA, 21 nt, synthetic construct
  source 1..21: mol_type = other RNA
  modified_base 1: mod_base = OTHER; note = 2'-O-methyladenosine-3'-phosphorothioate
  modified_base 2: mod_base = OTHER; note = 2'-O-methylguanosine-3'-phosphorothioate
  modified_base 3: mod_base = OTHER; note = 2'-O-methylcytidine-3'-phosphate
  modified_base 4: mod_base = OTHER; note = 2'-O-methyluridine-3'-phosphate
  modified_base 5: mod_base = OTHER; note = 2'-O-methyluridine-3'-phosphate
  modified_base 6: mod_base = OTHER; note = 2'-O-methylguanosine-3'-phosphate
  modified_base 7: mod_base = OTHER; note = 2'-fluoroguanosine-3'-phosphate
  modified_base 8: mod_base = OTHER; note = 2'-O-methyladenosine-3'-phosphate
  modified_base 9: mod_base = OTHER; note = 2'-fluoroadenosine-3'-phosphate
  modified_base 10: mod_base = OTHER; note = 2'-fluorouridine-3'-phosphate
  modified_base 11: mod_base = OTHER; note = 2'-fluorocytidine-3'-phosphate
  modified_base 12: mod_base = OTHER; note = 2'-O-methyluridine-3'-phosphate
  modified_base 13: mod_base = OTHER; note = 2'-O-methyladenosine-3'-phosphate
  modified_base 14: mod_base = OTHER; note = 2'-O-methyluridine-3'-phosphate
  modified_base 15: mod_base = OTHER; note = 2'-O-methyladenosine-3'-phosphate
  modified_base 16: mod_base = OTHER; note = 2'-O-methyluridine-3'-phosphate
  modified_base 17: mod_base = OTHER; note = 2'-O-methylcytidine-3'-phosphate
  modified_base 18: mod_base = OTHER; note = 2'-O-methyluridine-3'-phosphate
  modified_base 19: mod_base = OTHER; note = 2'-O-methyluridine-3'-phosphorothioate
  modified_base 20: mod_base = OTHER; note = 2'-O-methyluridine-3'-phosphorothioate
  modified_base 21: mod_base = OTHER; note = 2'-O-methyladenosine-3'-phosphate
agcttggaatctatatcttta

SEQ ID NO: 4635 - RNA, 21 nt, synthetic construct
  source 1..21: mol_type = other RNA
  modified_base 1: mod_base = OTHER; note = 2'-O-methyluridine-3'-phosphorothioate
  modified_base 2: mod_base = OTHER; note = 2'-O-methyluridine-3'-phosphorothioate
  modified_base 3: mod_base = OTHER; note = 2'-O-methyladenosine-3'-phosphate
  modified_base 4: mod_base = OTHER; note = 2'-O-methyluridine-3'-phosphate
  modified_base 5: mod_base = OTHER; note = 2'-O-methyluridine-3'-phosphate
  modified_base 6: mod_base = OTHER; note = 2'-O-methyladenosine-3'-phosphate
  modified_base 7: mod_base = OTHER; note = 2'-fluorouridine-3'-phosphate
  modified_base 8: mod_base = OTHER; note = 2'-O-methyluridine-3'-phosphate
  modified_base 9: mod_base = OTHER; note = 2'-fluorouridine-3'-phosphate
  modified_base 10: mod_base = OTHER; note = 2'-fluorocytidine-3'-phosphate
  modified_base 11: mod_base = OTHER; note = 2'-fluorouridine-3'-phosphate
  modified_base 12: mod_base = OTHER; note = 2'-O-methylguanosine-3'-phosphate
  modified_base 13: mod_base = OTHER; note = 2'-O-methyladenosine-3'-phosphate
  modified_base 14: mod_base = OTHER; note = 2'-O-methyladenosine-3'-phosphate
  modified_base 15: mod_base = OTHER; note = 2'-O-methylguanosine-3'-phosphate
  modified_base 16: mod_base = OTHER; note = 2'-O-methylcytidine-3'-phosphate
  modified_base 17: mod_base = OTHER; note = 2'-O-methylcytidine-3'-phosphate
  modified_base 18: mod_base = OTHER; note = 2'-O-methyluridine-3'-phosphate
  modified_base 19: mod_base = OTHER; note = 2'-O-methyladenosine-3'-phosphorothioate
  modified_base 20: mod_base = OTHER; note = 2'-O-methyladenosine-3'-phosphorothioate
  modified_base 21: mod_base = OTHER; note = 2'-O-methyladenosine-3'-phosphate
ttattatttctgaagcctaaa

SEQ ID NO: 4636 - RNA, 21 nt, synthetic construct
  source 1..21: mol_type = other RNA
  modified_base 1: mod_base = OTHER; note = 2'-O-methylcytidine-3'-phosphorothioate
  modified_base 2: mod_base = OTHER; note = 2'-O-methylcytidine-3'-phosphorothioate
  modified_base 3: mod_base = OTHER; note = 2'-O-methyluridine-3'-phosphate
  modified_base 4: mod_base = OTHER; note = 2'-O-methyluridine-3'-phosphate
  modified_base 5: mod_base = OTHER; note = 2'-O-methyluridine-3'-phosphate
  modified_base 6: mod_base = OTHER; note = 2'-O-methylguanosine-3'-phosphate
  modified_base 7: mod_base = OTHER; note = 2'-fluorouridine-3'-phosphate
  modified_base 8: mod_base = OTHER; note = 2'-O-methyluridine-3'-phosphate
  modified_base 9: mod_base = OTHER; note = 2'-fluoroguanosine-3'-phosphate
  modified_base 10: mod_base = OTHER; note = 2'-fluorouridine-3'-phosphate
  modified_base 11: mod_base = OTHER; note = 2'-fluoroadenosine-3'-phosphate
  modified_base 12: mod_base = OTHER; note = 2'-O-methyluridine-3'-phosphate
  modified_base 13: mod_base = OTHER; note = 2'-O-methyluridine-3'-phosphate
  modified_base 14: mod_base = OTHER; note = 2'-O-methyluridine-3'-phosphate
  modified_base 15: mod_base = OTHER; note = 2'-O-methyladenosine-3'-phosphate
  modified_base 16: mod_base = OTHER; note = 2'-O-methyladenosine-3'-phosphate
  modified_base 17: mod_base = OTHER; note = 2'-O-methylcytidine-3'-phosphate
  modified_base 18: mod_base = OTHER; note = 2'-O-methyladenosine-3'-phosphate
  modified_base 19: mod_base = OTHER; note = 2'-O-methyladenosine-3'-phosphorothioate
  modified_base 20: mod_base = OTHER; note = 2'-O-methyladenosine-3'-phosphorothioate
  modified_base 21: mod_base = OTHER; note = 2'-O-methyladenosine-3'-phosphate
cctttgttgtatttaacaaaa

SEQ ID NO: 4637 - RNA, 21 nt, synthetic construct
  source 1..21: mol_type = other RNA
  modified_base 1: mod_base = OTHER; note = 2'-O-methylguanosine-3'-phosphorothioate
  modified_base 2: mod_base = OTHER; note = 2'-O-methylcytidine-3'-phosphorothioate
  modified_base 3: mod_base = OTHER; note = 2'-O-methyluridine-3'-phosphate
  modified_base 4: mod_base = OTHER; note = 2'-O-methylcytidine-3'-phosphate
  modified_base 5: mod_base = OTHER; note = 2'-O-methyluridine-3'-phosphate
  modified_base 6: mod_base = OTHER; note = 2'-O-methylcytidine-3'-phosphate
  modified_base 7: mod_base = OTHER; note = 2'-fluorouridine-3'-phosphate
  modified_base 8: mod_base = OTHER; note = 2'-O-methyladenosine-3'-phosphate
  modified_base 9: mod_base = OTHER; note = 2'-fluoroadenosine-3'-phosphate
  modified_base 10: mod_base = OTHER; note = 2'-fluorocytidine-3'-phosphate
  modified_base 11: mod_base = OTHER; note = 2'-fluorouridine-3'-phosphate
  modified_base 12: mod_base = OTHER; note = 2'-O-methyladenosine-3'-phosphate
  modified_base 13: mod_base = OTHER; note = 2'-O-methyladenosine-3'-phosphate
  modified_base 14: mod_base = OTHER; note = 2'-O-methyluridine-3'-phosphate
  modified_base 15: mod_base = OTHER; note = 2'-O-methylcytidine-3'-phosphate
  modified_base 16: mod_base = OTHER; note = 2'-O-methylguanosine-3'-phosphate
  modified_base 17: mod_base = OTHER; note = 2'-O-methyladenosine-3'-phosphate
  modified_base 18: mod_base = OTHER; note = 2'-O-methyluridine-3'-phosphate
  modified_base 19: mod_base = OTHER; note = 2'-O-methylcytidine-3'-phosphorothioate
  modified_base 20: mod_base = OTHER; note = 2'-O-methyladenosine-3'-phosphorothioate
  modified_base 21: mod_base = OTHER; note = 2'-O-methyladenosine-3'-phosphate
gctctctaactaatcgatcaa

SEQ ID NO: 4638 - RNA, 21 nt, synthetic construct
  source 1..21: mol_type = other RNA
  modified_base 1: mod_base = OTHER; note = 2'-O-methyladenosine-3'-phosphorothioate
  modified_base 2: mod_base = OTHER; note = 2'-O-methyladenosine-3'-phosphorothioate
  modified_base 3: mod_base = OTHER; note = 2'-O-methyladenosine-3'-phosphate
  modified_base 4: mod_base = OTHER; note = 2'-O-methylguanosine-3'-phosphate
  modified_base 5: mod_base = OTHER; note = 2'-O-methyladenosine-3'-phosphate
  modified_base 6: mod_base = OTHER; note = 2'-O-methylcytidine-3'-phosphate
  modified_base 7: mod_base = OTHER; note = 2'-fluorouridine-3'-phosphate
  modified_base 8: mod_base = OTHER; note = 2'-O-methyladenosine-3'-phosphate
  modified_base 9: mod_base = OTHER; note = 2'-fluorocytidine-3'-phosphate
  modified_base 10: mod_base = OTHER; note = 2'-fluoroadenosine-3'-phosphate
  modified_base 11: mod_base = OTHER; note = 2'-fluorouridine-3'-phosphate
  modified_base 12: mod_base = OTHER; note = 2'-O-methylguanosine-3'-phosphate
  modified_base 13: mod_base = OTHER; note = 2'-O-methyladenosine-3'-phosphate
  modified_base 14: mod_base = OTHER; note = 2'-O-methylcytidine-3'-phosphate
  modified_base 15: mod_base = OTHER; note = 2'-O-methyladenosine-3'-phosphate
  modified_base 16: mod_base = OTHER; note = 2'-O-methylguanosine-3'-phosphate
  modified_base 17: mod_base = OTHER; note = 2'-O-methyladenosine-3'-phosphate
  modified_base 18: mod_base = OTHER; note = 2'-O-methyladenosine-3'-phosphate
  modified_base 19: mod_base = OTHER; note = 2'-O-methyladenosine-3'-phosphorothioate
  modified_base 20: mod_base = OTHER; note = 2'-O-methyluridine-3'-phosphorothioate
  modified_base 21: mod_base = OTHER; note = 2'-O-methyladenosine-3'-phosphate
aaagactacatgacagaaata

SEQ ID NO: 4639 - RNA, 21 nt, synthetic construct
  source 1..21: mol_type = other RNA
  modified_base 1: mod_base = OTHER; note = 2'-O-methylcytidine-3'-phosphorothioate
  modified_base 2: mod_base = OTHER; note = 2'-O-methyladenosine-3'-phosphorothioate
  modified_base 3: mod_base = OTHER; note = 2'-O-methylguanosine-3'-phosphate
  modified_base 4: mod_base = OTHER; note = 2'-O-methylguanosine-3'-phosphate
  modified_base 5: mod_base = OTHER; note = 2'-O-methyladenosine-3'-phosphate
  modified_base 6: mod_base = OTHER; note = 2'-O-methyluridine-3'-phosphate
  modified_base 7: mod_base = OTHER; note = 2'-fluorouridine-3'-phosphate
  modified_base 8: mod_base = OTHER; note = 2'-O-methylcytidine-3'-phosphate
  modified_base 9: mod_base = OTHER; note = 2'-fluoroguanosine-3'-phosphate
  modified_base 10: mod_base = OTHER; note = 2'-fluorouridine-3'-phosphate
  modified_base 11: mod_base = OTHER; note = 2'-fluoroadenosine-3'-phosphate
  modified_base 12: mod_base = OTHER; note = 2'-O-methyluridine-3'-phosphate
  modified_base 13: mod_base = OTHER; note = 2'-O-methyluridine-3'-phosphate
  modified_base 14: mod_base = OTHER; note = 2'-O-methyluridine-3'-phosphate
  modified_base 15: mod_base = OTHER; note = 2'-O-methyluridine-3'-phosphate
  modified_base 16: mod_base = OTHER; note = 2'-O-methyluridine-3'-phosphate
  modified_base 17: mod_base = OTHER; note = 2'-O-methyladenosine-3'-phosphate
  modified_base 18: mod_base = OTHER; note = 2'-O-methyladenosine-3'-phosphate
  modified_base 19: mod_base = OTHER; note = 2'-O-methyladenosine-3'-phosphorothioate
  modified_base 20: mod_base = OTHER; note = 2'-O-methylguanosine-3'-phosphorothioate
  modified_base 21: mod_base = OTHER; note = 2'-O-methyladenosine-3'-phosphate
caggattcgtatttttaaaga

SEQ ID NO: 4640 - RNA, 21 nt, synthetic construct
  source 1..21: mol_type = other RNA
  modified_base 1: mod_base = OTHER; note = 2'-O-methylcytidine-3'-phosphorothioate
  modified_base 2: mod_base = OTHER; note = 2'-O-methylcytidine-3'-phosphorothioate
  modified_base 3: mod_base = OTHER; note = 2'-O-methyluridine-3'-phosphate
  modified_base 4: mod_base = OTHER; note = 2'-O-methyluridine-3'-phosphate
  modified_base 5: mod_base = OTHER; note = 2'-O-methylguanosine-3'-phosphate
  modified_base 6: mod_base = OTHER; note = 2'-O-methylcytidine-3'-phosphate
  modified_base 7: mod_base = OTHER; note = 2'-fluorouridine-3'-phosphate
  modified_base 8: mod_base = OTHER; note = 2'-O-methyladenosine-3'-phosphate
  modified_base 9: mod_base = OTHER; note = 2'-fluoroadenosine-3'-phosphate
  modified_base 10: mod_base = OTHER; note = 2'-fluoroguanosine-3'-phosphate
  modified_base 11: mod_base = OTHER; note = 2'-fluorouridine-3'-phosphate
  modified_base 12: mod_base = OTHER; note = 2'-O-methyladenosine-3'-phosphate
  modified_base 13: mod_base = OTHER; note = 2'-O-methyladenosine-3'-phosphate
  modified_base 14: mod_base = OTHER; note = 2'-O-methyluridine-3'-phosphate
  modified_base 15: mod_base = OTHER; note = 2'-O-methyluridine-3'-phosphate
  modified_base 16: mod_base = OTHER; note = 2'-O-methylguanosine-3'-phosphate
  modified_base 17: mod_base = OTHER; note = 2'-O-methyladenosine-3'-phosphate
  modified_base 18: mod_base = OTHER; note = 2'-O-methylcytidine-3'-phosphate
  modified_base 19: mod_base = OTHER; note = 2'-O-methyladenosine-3'-phosphorothioate
  modified_base 20: mod_base = OTHER; note = 2'-O-methyluridine-3'-phosphorothioate
  modified_base 21: mod_base = OTHER; note = 2'-O-methyladenosine-3'-phosphate
ccttgctaagtaattgacata

SEQ ID NO: 4641 - RNA, 21 nt, synthetic construct
  source 1..21: mol_type = other RNA
  modified_base 1: mod_base = OTHER; note = 2'-O-methylcytidine-3'-phosphorothioate
  modified_base 2: mod_base = OTHER; note = 2'-O-methylcytidine-3'-phosphorothioate
  modified_base 3: mod_base = OTHER; note = 2'-O-methyluridine-3'-phosphate
  modified_base 4: mod_base = OTHER; note = 2'-O-methyladenosine-3'-phosphate
  modified_base 5: mod_base = OTHER; note = 2'-O-methyluridine-3'-phosphate
  modified_base 6: mod_base = OTHER; note = 2'-O-methylguanosine-3'-phosphate
  modified_base 7: mod_base = OTHER; note = 2'-fluorocytidine-3'-phosphate
  modified_base 8: mod_base = OTHER; note = 2'-O-methyladenosine-3'-phosphate
  modified_base 9: mod_base = OTHER; note = 2'-fluorocytidine-3'-phosphate
  modified_base 10: mod_base = OTHER; note = 2'-fluorouridine-3'-phosphate
  modified_base 11: mod_base = OTHER; note = 2'-fluorouridine-3'-phosphate
  modified_base 12: mod_base = OTHER; note = 2'-O-methyluridine-3'-phosphate
  modified_base 13: mod_base = OTHER; note = 2'-O-methylcytidine-3'-phosphate
  modified_base 14: mod_base = OTHER; note = 2'-O-methyladenosine-3'-phosphate
  modified_base 15: mod_base = OTHER; note = 2'-O-methylcytidine-3'-phosphate
  modified_base 16: mod_base = OTHER; note = 2'-O-methyladenosine-3'-phosphate
  modified_base 17: mod_base = OTHER; note = 2'-O-methylguanosine-3'-phosphate
  modified_base 18: mod_base = OTHER; note = 2'-O-methylguanosine-3'-phosphate
  modified_base 19: mod_base = OTHER; note = 2'-O-methyladenosine-3'-phosphorothioate
  modified_base 20: mod_base = OTHER; note = 2'-O-methyladenosine-3'-phosphorothioate
  modified_base 21: mod_base = OTHER; note = 2'-O-methyladenosine-3'-phosphate
cctatgcactttcacaggaaa

SEQ ID NO: 4642 - RNA, 21 nt, synthetic construct
  source 1..21: mol_type = other RNA
  modified_base 1: mod_base = OTHER; note = 2'-O-methyladenosine-3'-phosphorothioate
  modified_base 2: mod_base = OTHER; note = 2'-O-methyluridine-3'-phosphorothioate
  modified_base 3: mod_base = OTHER; note = 2'-O-methylguanosine-3'-phosphate
  modified_base 4: mod_base = OTHER; note = 2'-O-methylcytidine-3'-phosphate
  modified_base 5: mod_base = OTHER; note = 2'-O-methyluridine-3'-phosphate
  modified_base 6: mod_base = OTHER; note = 2'-O-methylguanosine-3'-phosphate
  modified_base 7: mod_base = OTHER; note = 2'-fluoroadenosine-3'-phosphate
  modified_base 8: mod_base = OTHER; note = 2'-O-methyladenosine-3'-phosphate
  modified_base 9: mod_base = OTHER; note = 2'-fluoroadenosine-3'-phosphate
  modified_base 10: mod_base = OTHER; note = 2'-fluorouridine-3'-phosphate
  modified_base 11: mod_base = OTHER; note = 2'-fluoroadenosine-3'-phosphate
  modified_base 12: mod_base = OTHER; note = 2'-O-methyluridine-3'-phosphate
  modified_base 13: mod_base = OTHER; note = 2'-O-methylguanosine-3'-phosphate
  modified_base 14: mod_base = OTHER; note = 2'-O-methyluridine-3'-phosphate
  modified_base 15: mod_base = OTHER; note = 2'-O-methyluridine-3'-phosphate
  modified_base 16: mod_base = OTHER; note = 2'-O-methyluridine-3'-phosphate
  modified_base 17: mod_base = OTHER; note = 2'-O-methylcytidine-3'-phosphate
  modified_base 18: mod_base = OTHER; note = 2'-O-methyladenosine-3'-phosphate
  modified_base 19: mod_base = OTHER; note = 2'-O-methyladenosine-3'-phosphorothioate
  modified_base 20: mod_base = OTHER; note = 2'-O-methylcytidine-3'-phosphorothioate
  modified_base 21: mod_base = OTHER; note = 2'-O-methyladenosine-3'-phosphate
atgctgaaatatgtttcaaca

SEQ ID NO: 4643 - RNA, 21 nt, synthetic construct
  source 1..21: mol_type = other RNA
  modified_base 1: mod_base = OTHER; note = 2'-O-methylcytidine-3'-phosphorothioate
  modified_base 2: mod_base = OTHER; note = 2'-O-methylcytidine-3'-phosphorothioate
  modified_base 3: mod_base = OTHER; note = 2'-O-methyluridine-3'-phosphate
  modified_base 4: mod_base = OTHER; note = 2'-O-methyluridine-3'-phosphate
  modified_base 5: mod_base = OTHER; note = 2'-O-methyluridine-3'-phosphate
  modified_base 6: mod_base = OTHER; note = 2'-O-methyluridine-3'-phosphate
  modified_base 7: mod_base = OTHER; note = 2'-fluoroadenosine-3'-phosphate
  modified_base 8: mod_base = OTHER; note = 2'-O-methyladenosine-3'-phosphate
  modified_base 9: mod_base = OTHER; note = 2'-fluorouridine-3'-phosphate
  modified_base 10: mod_base = OTHER; note = 2'-fluorouridine-3'-phosphate
  modified_base 11: mod_base = OTHER; note = 2'-fluorocytidine-3'-phosphate
  modified_base 12: mod_base = OTHER; note = 2'-O-methyladenosine-3'-phosphate
  modified_base 13: mod_base = OTHER; note = 2'-O-methyladenosine-3'-phosphate
  modified_base 14: mod_base = OTHER; note = 2'-O-methyladenosine-3'-phosphate
  modified_base 15: mod_base = OTHER; note = 2'-O-methyluridine-3'-phosphate
  modified_base 16: mod_base = OTHER; note = 2'-O-methylcytidine-3'-phosphate
  modified_base 17: mod_base = OTHER; note = 2'-O-methyluridine-3'-phosphate
  modified_base 18: mod_base = OTHER; note = 2'-O-methyladenosine-3'-phosphate
  modified_base 19: mod_base = OTHER; note = 2'-O-methylcytidine-3'-phosphorothioate
  modified_base 20: mod_base = OTHER; note = 2'-O-methyluridine-3'-phosphorothioate
  modified_base 21: mod_base = OTHER; note = 2'-O-methyladenosine-3'-phosphate
ccttttaattcaaatctacta

SEQ ID NO: 4644 - RNA, 21 nt, synthetic construct
  source 1..21: mol_type = other RNA
  modified_base 1: mod_base = OTHER; note = 2'-O-methyladenosine-3'-phosphorothioate
  modified_base 2: mod_base = OTHER; note = 2'-O-methylcytidine-3'-phosphorothioate
  modified_base 3: mod_base = OTHER; note = 2'-O-methyluridine-3'-phosphate
  modified_base 4: mod_base = OTHER; note = 2'-O-methylguanosine-3'-phosphate
  modified_base 5: mod_base = OTHER; note = 2'-O-methylguanosine-3'-phosphate
  modified_base 6: mod_base = OTHER; note = 2'-O-methyladenosine-3'-phosphate
  modified_base 7: mod_base = OTHER; note = 2'-fluorocytidine-3'-phosphate
  modified_base 8: mod_base = OTHER; note = 2'-O-methyluridine-3'-phosphate
  modified_base 9: mod_base = OTHER; note = 2'-fluorouridine-3'-phosphate
  modified_base 10: mod_base = OTHER; note = 2'-fluoroadenosine-3'-phosphate
  modified_base 11: mod_base = OTHER; note = 2'-fluorouridine-3'-phosphate
  modified_base 12: mod_base = OTHER; note = 2'-O-methyluridine-3'-phosphate
  modified_base 13: mod_base = OTHER; note = 2'-O-methylguanosine-3'-phosphate
  modified_base 14: mod_base = OTHER; note = 2'-O-methylguanosine-3'-phosphate
  modified_base 15: mod_base = OTHER; note = 2'-O-methyladenosine-3'-phosphate
  modified_base 16: mod_base = OTHER; note = 2'-O-methyluridine-3'-phosphate
  modified_base 17: mod_base = OTHER; note = 2'-O-methyluridine-3'-phosphate
  modified_base 18: mod_base = OTHER; note = 2'-O-methyluridine-3'-phosphate
  modified_base 19: mod_base = OTHER; note = 2'-O-methyladenosine-3'-phosphorothioate
  modified_base 20: mod_base = OTHER; note = 2'-O-methyladenosine-3'-phosphorothioate
  modified_base 21: mod_base = OTHER; note = 2'-O-methyladenosine-3'-phosphate
actggacttattggatttaaa

SEQ ID NO: 4645 - RNA, 21 nt, synthetic construct
  source 1..21: mol_type = other RNA
  modified_base 1: mod_base = OTHER; note = 2'-O-methylcytidine-3'-phosphorothioate
  modified_base 2: mod_base = OTHER; note = 2'-O-methyladenosine-3'-phosphorothioate
  modified_base 3: mod_base = OTHER; note = 2'-O-methyluridine-3'-phosphate
  modified_base 4: mod_base = OTHER; note = 2'-O-methylcytidine-3'-phosphate
  modified_base 5: mod_base = OTHER; note = 2'-O-methyluridine-3'-phosphate
  modified_base 6: mod_base = OTHER; note = 2'-O-methylguanosine-3'-phosphate
  modified_base 7: mod_base = OTHER; note = 2'-fluoroadenosine-3'-phosphate
  modified_base 8: mod_base = OTHER; note = 2'-O-methyladenosine-3'-phosphate
  modified_base 9: mod_base = OTHER; note = 2'-fluorouridine-3'-phosphate
  modified_base 10: mod_base = OTHER; note = 2'-fluorocytidine-3'-phosphate
  modified_base 11: mod_base = OTHER; note = 2'-fluoroadenosine-3'-phosphate
  modified_base 12: mod_base = OTHER; note = 2'-O-methylguanosine-3'-phosphate
  modified_base 13: mod_base = OTHER; note = 2'-O-methyladenosine-3'-phosphate
  modified_base 14: mod_base = OTHER; note = 2'-O-methyluridine-3'-phosphate
  modified_base 15: mod_base = OTHER; note = 2'-O-methylguanosine-3'-phosphate
  modified_base 16: mod_base = OTHER; note = 2'-O-methylguanosine-3'-phosphate
  modified_base 17: mod_base = OTHER; note = 2'-O-methyluridine-3'-phosphate
  modified_base 18: mod_base = OTHER; note = 2'-O-methyladenosine-3'-phosphate
  modified_base 19: mod_base = OTHER; note = 2'-O-methylcytidine-3'-phosphorothioate
  modified_base 20: mod_base = OTHER; note = 2'-O-methyladenosine-3'-phosphorothioate
  modified_base 21: mod_base = OTHER; note = 2'-O-methyladenosine-3'-phosphate
catctgaatcagatggtacaa

SEQ ID NO: 4646 - RNA, 21 nt, synthetic construct
  source 1..21: mol_type = other RNA
  modified_base 1: mod_base = OTHER; note = 2'-O-methyladenosine-3'-phosphorothioate
  modified_base 2: mod_base = OTHER; note = 2'-O-methyladenosine-3'-phosphorothioate
  modified_base 3: mod_base = OTHER; note = 2'-O-methyluridine-3'-phosphate
  modified_base 4: mod_base = OTHER; note = 2'-O-methyluridine-3'-phosphate
  modified_base 5: mod_base = OTHER; note = 2'-O-methylcytidine-3'-phosphate
  modified_base 6: mod_base = OTHER; note = 2'-O-methyluridine-3'-phosphate
  modified_base 7: mod_base = OTHER; note = 2'-fluoroguanosine-3'-phosphate
  modified_base 8: mod_base = OTHER; note = 2'-O-methyladenosine-3'-phosphate
  modified_base 9: mod_base = OTHER; note = 2'-fluorouridine-3'-phosphate
  modified_base 10: mod_base = OTHER; note = 2'-fluoroadenosine-3'-phosphate
  modified_base 11: mod_base = OTHER; note = 2'-fluoroguanosine-3'-phosphate
  modified_base 12: mod_base = OTHER; note = 2'-O-methylcytidine-3'-phosphate
  modified_base 13: mod_base = OTHER; note = 2'-O-methyladenosine-3'-phosphate
  modified_base 14: mod_base = OTHER; note = 2'-O-methyladenosine-3'-phosphate
  modified_base 15: mod_base = OTHER; note = 2'-O-methyluridine-3'-phosphate
  modified_base 16: mod_base = OTHER; note = 2'-O-methylcytidine-3'-phosphate
  modified_base 17: mod_base = OTHER; note = 2'-O-methyluridine-3'-phosphate
  modified_base 18: mod_base = OTHER; note = 2'-O-methylguanosine-3'-phosphate
  modified_base 19: mod_base = OTHER; note = 2'-O-methyluridine-3'-phosphorothioate
  modified_base 20: mod_base = OTHER; note = 2'-O-methylguanosine-3'-phosphorothioate
  modified_base 21: mod_base = OTHER; note = 2'-O-methyladenosine-3'-phosphate
aattctgatagcaatctgtga

SEQ ID NO: 4647 - RNA, 21 nt, synthetic construct
  source 1..21: mol_type = other RNA
  modified_base 1: mod_base = OTHER; note = 2'-O-methyluridine-3'-phosphorothioate
  modified_base 2: mod_base = OTHER; note = 2'-O-methylcytidine-3'-phosphorothioate
  modified_base 3: mod_base = OTHER; note = 2'-O-methyladenosine-3'-phosphate
  modified_base 4: mod_base = OTHER; note = 2'-O-methyladenosine-3'-phosphate
  modified_base 5: mod_base = OTHER; note = 2'-O-methylguanosine-3'-phosphate
  modified_base 6: mod_base = OTHER; note = 2'-O-methyluridine-3'-phosphate
  modified_base 7: mod_base = OTHER; note = 2'-fluorocytidine-3'-phosphate
  modified_base 8: mod_base = OTHER; note = 2'-O-methyladenosine-3'-phosphate
  modified_base 9: mod_base = OTHER; note = 2'-fluoroadenosine-3'-phosphate
  modified_base 10: mod_base = OTHER; note = 2'-fluoroguanosine-3'-phosphate
  modified_base 11: mod_base = OTHER; note = 2'-fluoroguanosine-3'-phosphate
  modified_base 12: mod_base = OTHER; note = 2'-O-methyladenosine-3'-phosphate
  modified_base 13: mod_base = OTHER; note = 2'-O-methyluridine-3'-phosphate
  modified_base 14: mod_base = OTHER; note = 2'-O-methylguanosine-3'-phosphate
  modified_base 15: mod_base = OTHER; note = 2'-O-methylcytidine-3'-phosphate
  modified_base 16: mod_base = OTHER; note = 2'-O-methyluridine-3'-phosphate
  modified_base 17: mod_base = OTHER; note = 2'-O-methyladenosine-3'-phosphate
  modified_base 18: mod_base = OTHER; note = 2'-O-methyluridine-3'-phosphate
  modified_base 19: mod_base = OTHER; note = 2'-O-methylcytidine-3'-phosphorothioate
  modified_base 20: mod_base = OTHER; note = 2'-O-methyluridine-3'-phosphorothioate
  modified_base 21: mod_base = OTHER; note = 2'-O-methyladenosine-3'-phosphate
tcaagtcaaggatgctatcta

SEQ ID NO: 4648 - RNA, 21 nt, synthetic construct
  source 1..21: mol_type = other RNA
  modified_base 1: mod_base = OTHER; note = 2'-O-methyluridine-3'-phosphorothioate
  modified_base 2: mod_base = OTHER; note = 2'-O-methylcytidine-3'-phosphorothioate
  modified_base 3: mod_base = OTHER; note = 2'-O-methyladenosine-3'-phosphate
  modified_base 4: mod_base = OTHER; note = 2'-O-methylcytidine-3'-phosphate
  modified_base 5: mod_base = OTHER; note = 2'-O-methyluridine-3'-phosphate
  modified_base 6: mod_base = OTHER; note = 2'-O-methylguanosine-3'-phosphate
  modified_base 7: mod_base = OTHER; note = 2'-fluoroadenosine-3'-phosphate
  modified_base 8: mod_base = OTHER; note = 2'-O-methyladenosine-3'-phosphate
  modified_base 9: mod_base = OTHER; note = 2'-fluoroadenosine-3'-phosphate
  modified_base 10: mod_base = OTHER; note = 2'-fluoroadenosine-3'-phosphate
  modified_base 11: mod_base = OTHER; note = 2'-fluorocytidine-3'-phosphate
  modified_base 12: mod_base = OTHER; note = 2'-O-methylcytidine-3'-phosphate
  modified_base 13: mod_base = OTHER; note = 2'-O-methyladenosine-3'-phosphate
  modified_base 14: mod_base = OTHER; note = 2'-O-methylcytidine-3'-phosphate
  modified_base 15: mod_base = OTHER; note = 2'-O-methyladenosine-3'-phosphate
  modified_base 16: mod_base = OTHER; note = 2'-O-methyladenosine-3'-phosphate
  modified_base 17: mod_base = OTHER; note = 2'-O-methylguanosine-3'-phosphate
  modified_base 18: mod_base = OTHER; note = 2'-O-methyladenosine-3'-phosphate
  modified_base 19: mod_base = OTHER; note = 2'-O-methyluridine-3'-phosphorothioate
  modified_base 20: mod_base = OTHER; note = 2'-O-methyladenosine-3'-phosphorothioate
  modified_base 21: mod_base = OTHER; note = 2'-O-methyladenosine-3'-phosphate
tcactgaaaaccacaagataa

SEQ ID NO: 4649 - RNA, 21 nt, synthetic construct
  source 1..21: mol_type = other RNA
  modified_base 1: mod_base = OTHER; note = 2'-O-methyladenosine-3'-phosphorothioate
  modified_base 2: mod_base = OTHER; note = 2'-O-methylcytidine-3'-phosphorothioate
  modified_base 3: mod_base = OTHER; note = 2'-O-methylcytidine-3'-phosphate
  modified_base 4: mod_base = OTHER; note = 2'-O-methyluridine-3'-phosphate
  modified_base 5: mod_base = OTHER; note = 2'-O-methylguanosine-3'-phosphate
  modified_base 6: mod_base = OTHER; note = 2'-O-methyluridine-3'-phosphate
  modified_base 7: mod_base = OTHER; note = 2'-fluorouridine-3'-phosphate
  modified_base 8: mod_base = OTHER; note = 2'-O-methylguanosine-3'-phosphate
  modified_base 9: mod_base = OTHER; note = 2'-fluoroadenosine-3'-phosphate
  modified_base 10: mod_base = OTHER; note = 2'-fluoroadenosine-3'-phosphate
  modified_base 11: mod_base = OTHER; note = 2'-fluorocytidine-3'-phosphate
  modified_base 12: mod_base = OTHER; note = 2'-O-methyladenosine-3'-phosphate
  modified_base 13: mod_base = OTHER; note = 2'-O-methylguanosine-3'-phosphate
  modified_base 14: mod_base = OTHER; note = 2'-O-methyluridine-3'-phosphate
  modified_base 15: mod_base = OTHER; note = 2'-O-methylcytidine-3'-phosphate
  modified_base 16: mod_base = OTHER; note = 2'-O-methyluridine-3'-phosphate
  modified_base 17: mod_base = OTHER; note = 2'-O-methyluridine-3'-phosphate
  modified_base 18: mod_base = OTHER; note = 2'-O-methylcytidine-3'-phosphate
  modified_base 19: mod_base = OTHER; note = 2'-O-methyladenosine-3'-phosphorothioate
  modified_base 20: mod_base = OTHER; note = 2'-O-methyladenosine-3'-phosphorothioate
  modified_base 21: mod_base = OTHER; note = 2'-O-methyladenosine-3'-phosphate
acctgttgaacagtcttcaaa

SEQ ID NO: 4650 - RNA, 21 nt, synthetic construct
  source 1..21: mol_type = other RNA
  modified_base 1: mod_base = OTHER; note = 2'-O-methyluridine-3'-phosphorothioate
  modified_base 2: mod_base = OTHER; note = 2'-O-methylcytidine-3'-phosphorothioate
  modified_base 3: mod_base = OTHER; note = 2'-O-methyladenosine-3'-phosphate
  modified_base 4: mod_base = OTHER; note = 2'-O-methyladenosine-3'-phosphate
  modified_base 5: mod_base = OTHER; note = 2'-O-methylguanosine-3'-phosphate
  modified_base 6: mod_base = OTHER; note = 2'-O-methyluridine-3'-phosphate
  modified_base 7: mod_base = OTHER; note = 2'-fluoroguanosine-3'-phosphate
  modified_base 8: mod_base = OTHER; note = 2'-O-methyladenosine-3'-phosphate
  modified_base 9: mod_base = OTHER; note = 2'-fluorocytidine-3'-phosphate
  modified_base 10: mod_base = OTHER; note = 2'-fluoroadenosine-3'-phosphate
  modified_base 11: mod_base = OTHER; note = 2'-fluorouridine-3'-phosphate
  modified_base 12: mod_base = OTHER; note = 2'-O-methyladenosine-3'-phosphate
  modified_base 13: mod_base = OTHER; note = 2'-O-methyluridine-3'-phosphate
  modified_base 14: mod_base = OTHER; note = 2'-O-methyluridine-3'-phosphate
  modified_base 15: mod_base = OTHER; note = 2'-O-methyluridine-3'-phosphate
  modified_base 16: mod_base = OTHER; note = 2'-O-methylcytidine-3'-phosphate
  modified_base 17: mod_base = OTHER; note = 2'-O-methyladenosine-3'-phosphate
  modified_base 18: mod_base = OTHER; note = 2'-O-methylguanosine-3'-phosphate
  modified_base 19: mod_base = OTHER; note = 2'-O-methyluridine-3'-phosphorothioate
  modified_base 20: mod_base = OTHER; note = 2'-O-methyluridine-3'-phosphorothioate
  modified_base 21: mod_base = OTHER; note = 2'-O-methyladenosine-3'-phosphate
tcaagtgacatatttcagtta

SEQ ID NO: 4651 - RNA, 21 nt, synthetic construct
  source 1..21: mol_type = other RNA
  modified_base 1: mod_base = OTHER; note = 2'-O-methyluridine-3'-phosphorothioate
  modified_base 2: mod_base = OTHER; note = 2'-O-methylcytidine-3'-phosphorothioate
  modified_base 3: mod_base = OTHER; note = 2'-O-methyladenosine-3'-phosphate
  modified_base 4: mod_base = OTHER; note = 2'-O-methylguanosine-3'-phosphate
  modified_base 5: mod_base = OTHER; note = 2'-O-methylguanosine-3'-phosphate
  modified_base 6: mod_base = OTHER; note = 2'-O-methyladenosine-3'-phosphate
  modified_base 7: mod_base = OTHER; note = 2'-fluoroadenosine-3'-phosphate
  modified_base 8: mod_base = OTHER; note = 2'-O-methylcytidine-3'-phosphate
  modified_base 9: mod_base = OTHER; note = 2'-fluorouridine-3'-phosphate
  modified_base 10: mod_base = OTHER; note = 2'-fluorouridine-3'-phosphate
  modified_base 11: mod_base = OTHER; note = 2'-fluorocytidine-3'-phosphate
  modified_base 12: mod_base = OTHER; note = 2'-O-methyladenosine-3'-phosphate
  modified_base 13: mod_base = OTHER; note = 2'-O-methylguanosine-3'-phosphate
  modified_base 14: mod_base = OTHER; note = 2'-O-methylguanosine-3'-phosphate
  modified_base 15: mod_base = OTHER; note = 2'-O-methyladenosine-3'-phosphate
  modified_base 16: mod_base = OTHER; note = 2'-O-methyluridine-3'-phosphate
  modified_base 17: mod_base = OTHER; note = 2'-O-methyluridine-3'-phosphate
  modified_base 18: mod_base = OTHER; note = 2'-O-methylguanosine-3'-phosphate
  modified_base 19: mod_base = OTHER; note = 2'-O-methylcytidine-3'-phosphorothioate
  modified_base 20: mod_base = OTHER; note = 2'-O-methyluridine-3'-phosphorothioate
  modified_base 21: mod_base = OTHER; note = 2'-O-methyladenosine-3'-phosphate
tcaggaacttcaggattgcta

SEQ ID NO: 4652 - RNA, 21 nt, synthetic construct
  source 1..21: mol_type = other RNA
  modified_base 1: mod_base = OTHER; note = 2'-O-methyladenosine-3'-phosphorothioate
  modified_base 2: mod_base = OTHER; note = 2'-O-methylcytidine-3'-phosphorothioate
  modified_base 3: mod_base = OTHER; note = 2'-O-methylguanosine-3'-phosphate
  modified_base 4: mod_base = OTHER; note = 2'-O-methylguanosine-3'-phosphate
  modified_base 5: mod_base = OTHER; note = 2'-O-methyladenosine-3'-phosphate
  modified_base 6: mod_base = OTHER; note = 2'-O-methylguanosine-3'-phosphate
  modified_base 7: mod_base = OTHER; note = 2'-fluorouridine-3'-phosphate
  modified_base 8: mod_base = OTHER; note = 2'-O-methyladenosine-3'-phosphate
  modified_base 9: mod_base = OTHER; note = 2'-fluorouridine-3'-phosphate
  modified_base 10: mod_base = OTHER; note = 2'-fluorouridine-3'-phosphate
  modified_base 11: mod_base = OTHER; note = 2'-fluoroadenosine-3'-phosphate
  modified_base 12: mod_base = OTHER; note = 2'-O-methylguanosine-3'-phosphate
  modified_base 13: mod_base = OTHER; note = 2'-O-methyluridine-3'-phosphate
  modified_base 14: mod_base = OTHER; note = 2'-O-methyladenosine-3'-phosphate
  modified_base 15: mod_base = OTHER; note = 2'-O-methylguanosine-3'-phosphate
  modified_base 16: mod_base = OTHER; note = 2'-O-methylcytidine-3'-phosphate
  modified_base 17: mod_base = OTHER; note = 2'-O-methyluridine-3'-phosphate
  modified_base 18: mod_base = OTHER; note = 2'-O-methyluridine-3'-phosphate
  modified_base 19: mod_base = OTHER; note = 2'-O-methyladenosine-3'-phosphorothioate
  modified_base 20: mod_base = OTHER; note = 2'-O-methyladenosine-3'-phosphorothioate
  modified_base 21: mod_base = OTHER; note = 2'-O-methyladenosine-3'-phosphate
acggagtattagtagcttaaa

SEQ ID NO: 4653 - RNA, 21 nt, synthetic construct
  source 1..21: mol_type = other RNA
  modified_base 1: mod_base = OTHER; note = 2'-O-methyladenosine-3'-phosphorothioate
  modified_base 2: mod_base = OTHER; note = 2'-O-methyluridine-3'-phosphorothioate
  modified_base 3: mod_base = OTHER; note = 2'-O-methyluridine-3'-phosphate
  modified_base 4: mod_base = OTHER; note = 2'-O-methylguanosine-3'-phosphate
  modified_base 5: mod_base = OTHER; note = 2'-O-methyluridine-3'-phosphate
  modified_base 6: mod_base = OTHER; note = 2'-O-methylcytidine-3'-phosphate
  modified_base 7: mod_base = OTHER; note = 2'-fluoroadenosine-3'-phosphate
  modified_base 8: mod_base = OTHER; note = 2'-O-methyladenosine-3'-phosphate
  modified_base 9: mod_base = OTHER; note = 2'-fluorouridine-3'-phosphate
  modified_base 10: mod_base = OTHER; note = 2'-fluoroguanosine-3'-phosphate
  modified_base 11: mod_base = OTHER; note = 2'-fluoroadenosine-3'-phosphate
  modified_base 12: mod_base = OTHER; note = 2'-O-methyladenosine-3'-phosphate
  modified_base 13: mod_base = OTHER; note = 2'-O-methyluridine-3'-phosphate
  modified_base 14: mod_base = OTHER; note = 2'-O-methyluridine-3'-phosphate
  modified_base 15: mod_base = OTHER; note = 2'-O-methyluridine-3'-phosphate
  modified_base 16: mod_base = OTHER; note = 2'-O-methyluridine-3'-phosphate
  modified_base 17: mod_base = OTHER; note = 2'-O-methyladenosine-3'-phosphate
  modified_base 18: mod_base = OTHER; note = 2'-O-methyluridine-3'-phosphate
  modified_base 19: mod_base = OTHER; note = 2'-O-methylguanosine-3'-phosphorothioate
  modified_base 20: mod_base = OTHER; note = 2'-O-methyladenosine-3'-phosphorothioate
  modified_base 21: mod_base = OTHER; note = 2'-O-methyladenosine-3'-phosphate
attgtcaatgaattttatgaa

SEQ ID NO: 4654 - RNA, 21 nt, synthetic construct
  source 1..21: mol_type = other RNA
  modified_base 1: mod_base = OTHER; note = 2'-O-methylguanosine-3'-phosphorothioate
  modified_base 2: mod_base = OTHER; note = 2'-O-methyladenosine-3'-phosphorothioate
  modified_base 3: mod_base = OTHER; note = 2'-O-methyladenosine-3'-phosphate
  modified_base 4: mod_base = OTHER; note = 2'-O-methylcytidine-3'-phosphate
  modified_base 5: mod_base = OTHER; note = 2'-O-methyladenosine-3'-phosphate
  modified_base 6: mod_base = OTHER; note = 2'-O-methylguanosine-3'-phosphate
  modified_base 7: mod_base = OTHER; note = 2'-fluorocytidine-3'-phosphate
  modified_base 8: mod_base = OTHER; note = 2'-O-methyladenosine-3'-phosphate
  modified_base 9: mod_base = OTHER; note = 2'-fluoroadenosine-3'-phosphate
  modified_base 10: mod_base = OTHER; note = 2'-fluoroadenosine-3'-phosphate
  modified_base 11: mod_base = OTHER; note = 2'-fluorocytidine-3'-phosphate
  modified_base 12: mod_base = OTHER; note = 2'-O-methyladenosine-3'-phosphate
  modified_base 13: mod_base = OTHER; note = 2'-O-methyladenosine-3'-phosphate
  modified_base 14: mod_base = OTHER; note = 2'-O-methyladenosine-3'-phosphate
  modified_base 15: mod_base = OTHER; note = 2'-O-methyluridine-3'-phosphate
  modified_base 16: mod_base = OTHER; note = 2'-O-methyladenosine-3'-phosphate
  modified_base 17: mod_base = OTHER; note = 2'-O-methyluridine-3'-phosphate
  modified_base 18: mod_base = OTHER; note = 2'-O-methyluridine-3'-phosphate
  modified_base 19: mod_base = OTHER; note = 2'-O-methylguanosine-3'-phosphorothioate
  modified_base 20: mod_base = OTHER; note = 2'-O-methyladenosine-3'-phosphorothioate
  modified_base 21: mod_base = OTHER; note = 2'-O-methyladenosine-3'-phosphate
gaacagcaaacaaatattgaa

SEQ ID NO: 4655 - RNA, 21 nt, synthetic construct
  source 1..21: mol_type = other RNA
  modified_base 1: mod_base = OTHER; note = 2'-O-methyluridine-3'-phosphorothioate
  modified_base 2: mod_base = OTHER; note = 2'-O-methylguanosine-3'-phosphorothioate
  modified_base 3: mod_base = OTHER; note = 2'-O-methyladenosine-3'-phosphate
  modified_base 4: mod_base = OTHER; note = 2'-O-methyladenosine-3'-phosphate
  modified_base 5: mod_base = OTHER; note = 2'-O-methylcytidine-3'-phosphate
  modified_base 6: mod_base = OTHER; note = 2'-O-methyluridine-3'-phosphate
  modified_base 7: mod_base = OTHER; note = 2'-fluoroadenosine-3'-phosphate
  modified_base 8: mod_base = OTHER; note = 2'-O-methyluridine-3'-phosphate
  modified_base 9: mod_base = OTHER; note = 2'-fluorouridine-3'-phosphate
  modified_base 10: mod_base = OTHER; note = 2'-fluorouridine-3'-phosphate
  modified_base 11: mod_base = OTHER; note = 2'-fluorouridine-3'-phosphate
  modified_base 12: mod_base = OTHER; note = 2'-O-methylcytidine-3'-phosphate
  modified_base 13: mod_base = OTHER; note = 2'-O-methylguanosine-3'-phosphate
  modified_base 14: mod_base = OTHER; note = 2'-O-methyluridine-3'-phosphate
  modified_base 15: mod_base = OTHER; note = 2'-O-methylguanosine-3'-phosphate
  modified_base 16: mod_base = OTHER; note = 2'-O-methylcytidine-3'-phosphate
  modified_base 17: mod_base = OTHER; note = 2'-O-methyladenosine-3'-phosphate
  modified_base 18: mod_base = OTHER; note = 2'-O-methyluridine-3'-phosphate
  modified_base 19: mod_base = OTHER; note = 2'-O-methyluridine-3'-phosphorothioate
  modified_base 20: mod_base = OTHER; note = 2'-O-methyladenosine-3'-phosphorothioate
  modified_base 21: mod_base = OTHER; note = 2'-O-methyladenosine-3'-phosphate
tgaactattttcgtgcattaa

SEQ ID NO: 4656 - RNA, 21 nt, synthetic construct
  source 1..21: mol_type = other RNA
  modified_base 1: mod_base = OTHER; note = 2'-O-methyladenosine-3'-phosphorothioate
  modified_base 2: mod_base = OTHER; note = 2'-O-methylcytidine-3'-phosphorothioate
  modified_base 3: mod_base = OTHER; note = 2'-O-methyluridine-3'-phosphate
  modified_base 4: mod_base = OTHER; note = 2'-O-methylguanosine-3'-phosphate
  modified_base 5: mod_base = OTHER; note = 2'-O-methylguanosine-3'-phosphate
  modified_base 6: mod_base = OTHER; note = 2'-O-methyladenosine-3'-phosphate
  modified_base 7: mod_base = OTHER; note = 2'-fluoroadenosine-3'-phosphate
  modified_base 8: mod_base = OTHER; note = 2'-O-methyluridine-3'-phosphate
  modified_base 9: mod_base = OTHER; note = 2'-fluoroadenosine-3'-phosphate
  modified_base 10: mod_base = OTHER; note = 2'-fluorocytidine-3'-phosphate
  modified_base 11: mod_base = OTHER; note = 2'-fluorouridine-3'-phosphate
  modified_base 12: mod_base = OTHER; note = 2'-O-methyluridine-3'-phosphate
  modified_base 13: mod_base = OTHER; note = 2'-O-methyladenosine-3'-phosphate
  modified_base 14: mod_base = OTHER; note = 2'-O-methyluridine-3'-phosphate
  modified_base 15: mod_base = OTHER; note = 2'-O-methyluridine-3'-phosphate
  modified_base 16: mod_base = OTHER; note = 2'-O-methyluridine-3'-phosphate
  modified_base 17: mod_base = OTHER; note = 2'-O-methyluridine-3'-phosphate
  modified_base 18: mod_base = OTHER; note = 2'-O-methyluridine-3'-phosphate
  modified_base 19: mod_base = OTHER; note = 2'-O-methylcytidine-3'-phosphorothioate
  modified_base 20: mod_base = OTHER; note = 2'-O-methyladenosine-3'-phosphorothioate
  modified_base 21: mod_base = OTHER; note = 2'-O-methyladenosine-3'-phosphate
actggaatacttatttttcaa

SEQ ID NO: 4657 - RNA, 21 nt, synthetic construct
  source 1..21: mol_type = other RNA
  modified_base 1: mod_base = OTHER; note = 2'-O-methyluridine-3'-phosphorothioate
  modified_base 2: mod_base = OTHER; note = 2'-O-methyluridine-3'-phosphorothioate
  modified_base 3: mod_base = OTHER; note = 2'-O-methyladenosine-3'-phosphate
  modified_base 4: mod_base = OTHER; note = 2'-O-methyluridine-3'-phosphate
  modified_base 5: mod_base = OTHER; note = 2'-O-methylcytidine-3'-phosphate
  modified_base 6: mod_base = OTHER; note = 2'-O-methyluridine-3'-phosphate
  modified_base 7: mod_base = OTHER; note = 2'-fluorouridine-3'-phosphate
  modified_base 8: mod_base = OTHER; note = 2'-O-methylguanosine-3'-phosphate
  modified_base 9: mod_base = OTHER; note = 2'-fluorocytidine-3'-phosphate
  modified_base 10: mod_base = OTHER; note = 2'-fluoroadenosine-3'-phosphate
  modified_base 11: mod_base = OTHER; note = 2'-fluoroguanosine-3'-phosphate
  modified_base 12: mod_base = OTHER; note = 2'-O-methyladenosine-3'-phosphate
  modified_base 13: mod_base = OTHER; note = 2'-O-methylguanosine-3'-phosphate
  modified_base 14: mod_base = OTHER; note = 2'-O-methyladenosine-3'-phosphate
  modified_base 15: mod_base = OTHER; note = 2'-O-methyluridine-3'-phosphate
  modified_base 16: mod_base = OTHER; note = 2'-O-methylcytidine-3'-phosphate
  modified_base 17: mod_base = OTHER; note = 2'-O-methyluridine-3'-phosphate
  modified_base 18: mod_base = OTHER; note = 2'-O-methylcytidine-3'-phosphate
  modified_base 19: mod_base = OTHER; note = 2'-O-methyluridine-3'-phosphorothioate
  modified_base 20: mod_base = OTHER; note = 2'-O-methylguanosine-3'-phosphorothioate
  modified_base 21: mod_base = OTHER; note = 2'-O-methyladenosine-3'-phosphate
ttatcttgcagagatctctga

SEQ ID NO: 4658 - RNA, 21 nt, synthetic construct
  source 1..21: mol_type = other RNA
  modified_base 1: mod_base = OTHER; note = 2'-O-methylguanosine-3'-phosphorothioate
  modified_base 2: mod_base = OTHER; note = 2'-O-methyladenosine-3'-phosphorothioate
  modified_base 3: mod_base = OTHER; note = 2'-O-methyladenosine-3'-phosphate
  modified_base 4: mod_base = OTHER; note = 2'-O-methylguanosine-3'-phosphate
  modified_base 5: mod_base = OTHER; note = 2'-O-methyluridine-3'-phosphate
  modified_base 6: mod_base = OTHER; note = 2'-O-methylguanosine-3'-phosphate
  modified_base 7: mod_base = OTHER; note = 2'-fluorouridine-3'-phosphate
  modified_base 8: mod_base = OTHER; note = 2'-O-methyluridine-3'-phosphate
  modified_base 9: mod_base = OTHER; note = 2'-fluoroadenosine-3'-phosphate
  modified_base 10: mod_base = OTHER; note = 2'-fluoroguanosine-3'-phosphate
  modified_base 11: mod_base = OTHER; note = 2'-fluoroadenosine-3'-phosphate
  modified_base 12: mod_base = OTHER; note = 2'-O-methyladenosine-3'-phosphate
  modified_base 13: mod_base = OTHER; note = 2'-O-methyluridine-3'-phosphate
  modified_base 14: mod_base = OTHER; note = 2'-O-methyluridine-3'-phosphate
  modified_base 15: mod_base = OTHER; note = 2'-O-methyluridine-3'-phosphate
  modified_base 16: mod_base = OTHER; note = 2'-O-methyluridine-3'-phosphate
  modified_base 17: mod_base = OTHER; note = 2'-O-methyluridine-3'-phosphate
  modified_base 18: mod_base = OTHER; note = 2'-O-methylguanosine-3'-phosphate
  modified_base 19: mod_base = OTHER; note = 2'-O-methyladenosine-3'-phosphorothioate
  modified_base 20: mod_base = OTHER; note = 2'-O-methyluridine-3'-phosphorothioate
  modified_base 21: mod_base = OTHER; note = 2'-O-methyladenosine-3'-phosphate
gaagtgttagaatttttgata

SEQ ID NO: 4659 - RNA, 21 nt, synthetic construct
  source 1..21: mol_type = other RNA
  modified_base 1: mod_base = OTHER; note = 2'-O-methyluridine-3'-phosphorothioate
  modified_base 2: mod_base = OTHER; note = 2'-O-methylcytidine-3'-phosphorothioate
  modified_base 3: mod_base = OTHER; note = 2'-O-methyladenosine-3'-phosphate
  modified_base 4: mod_base = OTHER; note = 2'-O-methyladenosine-3'-phosphate
  modified_base 5: mod_base = OTHER; note = 2'-O-methyluridine-3'-phosphate
  modified_base 6: mod_base = OTHER; note = 2'-O-methyluridine-3'-phosphate
  modified_base 7: mod_base = OTHER; note = 2'-fluorouridine-3'-phosphate
  modified_base 8: mod_base = OTHER; note = 2'-O-methyladenosine-3'-phosphate
  modified_base 9: mod_base = OTHER; note = 2'-fluoroadenosine-3'-phosphate
  modified_base 10: mod_base = OTHER; note = 2'-fluoroguanosine-3'-phosphate
  modified_base 11: mod_base = OTHER; note = 2'-fluoroadenosine-3'-phosphate
  modified_base 12: mod_base = OTHER; note = 2'-O-methyluridine-3'-phosphate
  modified_base 13: mod_base = OTHER; note = 2'-O-methylcytidine-3'-phosphate
  modified_base 14: mod_base = OTHER; note = 2'-O-methyluridine-3'-phosphate
  modified_base 15: mod_base = OTHER; note = 2'-O-methylcytidine-3'-phosphate
  modified_base 16: mod_base = OTHER; note = 2'-O-methyluridine-3'-phosphate
  modified_base 17: mod_base = OTHER; note = 2'-O-methylguanosine-3'-phosphate
  modified_base 18: mod_base = OTHER; note = 2'-O-methylguanosine-3'-phosphate
  modified_base 19: mod_base = OTHER; note = 2'-O-methyladenosine-3'-phosphorothioate
  modified_base 20: mod_base = OTHER; note = 2'-O-methyladenosine-3'-phosphorothioate
  modified_base 21: mod_base = OTHER; note = 2'-O-methyladenosine-3'-phosphate
tcaatttaagatctctggaaa

SEQ ID NO: 4660 - RNA, 21 nt, synthetic construct
  source 1..21: mol_type = other RNA
  modified_base 1: mod_base = OTHER; note = 2'-O-methyluridine-3'-phosphorothioate
  modified_base 2: mod_base = OTHER; note = 2'-O-methylguanosine-3'-phosphorothioate
  modified_base 3: mod_base = OTHER; note = 2'-O-methylguanosine-3'-phosphate
  modified_base 4: mod_base = OTHER; note = 2'-O-methyladenosine-3'-phosphate
  modified_base 5: mod_base = OTHER; note = 2'-O-methylcytidine-3'-phosphate
  modified_base 6: mod_base = OTHER; note = 2'-O-methylcytidine-3'-phosphate
  modified_base 7: mod_base = OTHER; note = 2'-fluoroadenosine-3'-phosphate
  modified_base 8: mod_base = OTHER; note = 2'-O-methyluridine-3'-phosphate
  modified_base 9: mod_base = OTHER; note = 2'-fluoroadenosine-3'-phosphate
  modified_base 10: mod_base = OTHER; note = 2'-fluorouridine-3'-phosphate
  modified_base 11: mod_base = OTHER; note = 2'-fluorouridine-3'-phosphate
  modified_base 12: mod_base = OTHER; note = 2'-O-methyluridine-3'-phosphate
  modified_base 13: mod_base = OTHER; note = 2'-O-methyladenosine-3'-phosphate
  modified_base 14: mod_base = OTHER; note = 2'-O-methylcytidine-3'-phosphate
  modified_base 15: mod_base = OTHER; note = 2'-O-methyladenosine-3'-phosphate
  modified_base 16: mod_base = OTHER; note = 2'-O-methyladenosine-3'-phosphate
  modified_base 17: mod_base = OTHER; note = 2'-O-methyluridine-3'-phosphate
  modified_base 18: mod_base = OTHER; note = 2'-O-methylguanosine-3'-phosphate
  modified_base 19: mod_base = OTHER; note = 2'-O-methyluridine-3'-phosphorothioate
  modified_base 20: mod_base = OTHER; note = 2'-O-methyluridine-3'-phosphorothioate
  modified_base 21: mod_base = OTHER; note = 2'-O-methyladenosine-3'-phosphate
tggaccatatttacaatgtta

SEQ ID NO: 4661 - RNA, 21 nt, synthetic construct
  source 1..21: mol_type = other RNA
  modified_base 1: mod_base = OTHER; note = 2'-O-methyluridine-3'-phosphorothioate
  modified_base 2: mod_base = OTHER; note = 2'-O-methyladenosine-3'-phosphorothioate
  modified_base 3: mod_base = OTHER; note = 2'-O-methylguanosine-3'-phosphate
  modified_base 4: mod_base = OTHER; note = 2'-O-methyluridine-3'-phosphate
  modified_base 5: mod_base = OTHER; note = 2'-O-methylcytidine-3'-phosphate
  modified_base 6: mod_base = OTHER; note = 2'-O-methyladenosine-3'-phosphate
  modified_base 7: mod_base = OTHER; note = 2'-fluorouridine-3'-phosphate
  modified_base 8: mod_base = OTHER; note = 2'-O-methyluridine-3'-phosphate
  modified_base 9: mod_base = OTHER; note = 2'-fluoroguanosine-3'-phosphate
  modified_base 10: mod_base = OTHER; note = 2'-fluoroadenosine-3'-phosphate
  modified_base 11: mod_base = OTHER; note = 2'-fluoroadenosine-3'-phosphate
  modified_base 12: mod_base = OTHER; note = 2'-O-methylguanosine-3'-phosphate
  modified_base 13: mod_base = OTHER; note = 2'-O-methylcytidine-3'-phosphate
  modified_base 14: mod_base = OTHER; note = 2'-O-methyladenosine-3'-phosphate
  modified_base 15: mod_base = OTHER; note = 2'-O-methyladenosine-3'-phosphate
  modified_base 16: mod_base = OTHER; note = 2'-O-methyluridine-3'-phosphate
  modified_base 17: mod_base = OTHER; note = 2'-O-methylcytidine-3'-phosphate
  modified_base 18: mod_base = OTHER; note = 2'-O-methylcytidine-3'-phosphate
  modified_base 19: mod_base = OTHER; note = 2'-O-methyluridine-3'-phosphorothioate
  modified_base 20: mod_base = OTHER; note = 2'-O-methyluridine-3'-phosphorothioate
  modified_base 21: mod_base = OTHER; note = 2'-O-methyladenosine-3'-phosphate
tagtcattgaagcaatcctta

SEQ ID NO: 4662 - RNA, 21 nt, synthetic construct
  source 1..21: mol_type = other RNA
  modified_base 1: mod_base = OTHER; note = 2'-O-methyladenosine-3'-phosphorothioate
  modified_base 2: mod_base = OTHER; note = 2'-O-methylguanosine-3'-phosphorothioate
  modified_base 3: mod_base = OTHER; note = 2'-O-methylcytidine-3'-phosphate
  modified_base 4: mod_base = OTHER; note = 2'-O-methyluridine-3'-phosphate
  modified_base 5: mod_base = OTHER; note = 2'-O-methylguanosine-3'-phosphate
  modified_base 6: mod_base = OTHER; note = 2'-O-methyluridine-3'-phosphate
  modified_base 7: mod_base = OTHER; note = 2'-fluorouridine-3'-phosphate
  modified_base 8: mod_base = OTHER; note = 2'-O-methyluridine-3'-phosphate
  modified_base 9: mod_base = OTHER; note = 2'-fluoroadenosine-3'-phosphate
  modified_base 10: mod_base = OTHER; note = 2'-fluoroguanosine-3'-phosphate
  modified_base 11: mod_base = OTHER; note = 2'-fluoroguanosine-3'-phosphate
  modified_base 12: mod_base = OTHER; note = 2'-O-methyluridine-3'-phosphate
  modified_base 13: mod_base = OTHER; note = 2'-O-methyluridine-3'-phosphate
  modified_base 14: mod_base = OTHER; note = 2'-O-methyluridine-3'-phosphate
  modified_base 15: mod_base = OTHER; note = 2'-O-methyladenosine-3'-phosphate
  modified_base 16: mod_base = OTHER; note = 2'-O-methyladenosine-3'-phosphate
  modified_base 17: mod_base = OTHER; note = 2'-O-methylcytidine-3'-phosphate
  modified_base 18: mod_base = OTHER; note = 2'-O-methyladenosine-3'-phosphate
  modified_base 19: mod_base = OTHER; note = 2'-O-methyladenosine-3'-phosphorothioate
  modified_base 20: mod_base = OTHER; note = 2'-O-methyluridine-3'-phosphorothioate
  modified_base 21: mod_base = OTHER; note = 2'-O-methyladenosine-3'-phosphate
agctgtttaggtttaacaata

SEQ ID NO: 4663 - RNA, 21 nt, synthetic construct
  source 1..21: mol_type = other RNA
  modified_base 1: mod_base = OTHER; note = 2'-O-methylcytidine-3'-phosphorothioate
  modified_base 2: mod_base = OTHER; note = 2'-O-methyladenosine-3'-phosphorothioate
  modified_base 3: mod_base = OTHER; note = 2'-O-methyladenosine-3'-phosphate
  modified_base 4: mod_base = OTHER; note = 2'-O-methylguanosine-3'-phosphate
  modified_base 5: mod_base = OTHER; note = 2'-O-methylguanosine-3'-phosphate
  modified_base 6: mod_base = OTHER; note = 2'-O-methylcytidine-3'-phosphate
  modified_base 7: mod_base = OTHER; note = 2'-fluoroadenosine-3'-phosphate
  modified_base 8: mod_base = OTHER; note = 2'-O-methyladenosine-3'-phosphate
  modified_base 9: mod_base = OTHER; note = 2'-fluoroadenosine-3'-phosphate
  modified_base 10: mod_base = OTHER; note = 2'-fluorouridine-3'-phosphate
  modified_base 11: mod_base = OTHER; note = 2'-fluoroguanosine-3'-phosphate
  modified_base 12: mod_base = OTHER; note = 2'-O-methyladenosine-3'-phosphate
  modified_base 13: mod_base = OTHER; note = 2'-O-methyluridine-3'-phosphate
  modified_base 14: mod_base = OTHER; note = 2'-O-methylguanosine-3'-phosphate
  modified_base 15: mod_base = OTHER; note = 2'-O-methyluridine-3'-phosphate
  modified_base 16: mod_base = OTHER; note = 2'-O-methyladenosine-3'-phosphate
  modified_base 17: mod_base = OTHER; note = 2'-O-methyladenosine-3'-phosphate
  modified_base 18: mod_base = OTHER; note = 2'-O-methyladenosine-3'-phosphate
  modified_base 19: mod_base = OTHER; note = 2'-O-methyluridine-3'-phosphorothioate
  modified_base 20: mod_base = OTHER; note = 2'-O-methyladenosine-3'-phosphorothioate
  modified_base 21: mod_base = OTHER; note = 2'-O-methyladenosine-3'-phosphate
caaggcaaatgatgtaaataa

SEQ ID NO: 4664 - RNA, 21 nt, synthetic construct
  source 1..21: mol_type = other RNA
  modified_base 1: mod_base = OTHER; note = 2'-O-methyladenosine-3'-phosphorothioate
  modified_base 2: mod_base = OTHER; note = 2'-O-methyluridine-3'-phosphorothioate
  modified_base 3: mod_base = OTHER; note = 2'-O-methylcytidine-3'-phosphate
  modified_base 4: mod_base = OTHER; note = 2'-O-methylcytidine-3'-phosphate
  modified_base 5: mod_base = OTHER; note = 2'-O-methyladenosine-3'-phosphate
  modified_base 6: mod_base = OTHER; note = 2'-O-methyladenosine-3'-phosphate
  modified_base 7: mod_base = OTHER; note = 2'-fluorouridine-3'-phosphate
  modified_base 8: mod_base = OTHER; note = 2'-O-methyluridine-3'-phosphate
  modified_base 9: mod_base = OTHER; note = 2'-fluoroadenosine-3'-phosphate
  modified_base 10: mod_base = OTHER; note = 2'-fluorocytidine-3'-phosphate
  modified_base 11: mod_base = OTHER; note = 2'-fluorouridine-3'-phosphate
  modified_base 12: mod_base = OTHER; note = 2'-O-methyladenosine-3'-phosphate
  modified_base 13: mod_base = OTHER; note = 2'-O-methylcytidine-3'-phosphate
  modified_base 14: mod_base = OTHER; note = 2'-O-methyluridine-3'-phosphate
  modified_base 15: mod_base = OTHER; note = 2'-O-methylguanosine-3'-phosphate
  modified_base 16: mod_base = OTHER; note = 2'-O-methylguanosine-3'-phosphate
  modified_base 17: mod_base = OTHER; note = 2'-O-methyladenosine-3'-phosphate
  modified_base 18: mod_base = OTHER; note = 2'-O-methyladenosine-3'-phosphate
  modified_base 19: mod_base = OTHER; note = 2'-O-methyladenosine-3'-phosphorothioate
  modified_base 20: mod_base = OTHER; note = 2'-O-methylcytidine-3'-phosphorothioate
  modified_base 21: mod_base = OTHER; note = 2'-O-methyladenosine-3'-phosphate
atccaattactactggaaaca

SEQ ID NO: 4665 - RNA, 21 nt, synthetic construct
  source 1..21: mol_type = other RNA
  modified_base 1: mod_base = OTHER; note = 2'-O-methyladenosine-3'-phosphorothioate
  modified_base 2: mod_base = OTHER; note = 2'-O-methylcytidine-3'-phosphorothioate
  modified_base 3: mod_base = OTHER; note = 2'-O-methyluridine-3'-phosphate
  modified_base 4: mod_base = OTHER; note = 2'-O-methyluridine-3'-phosphate
  modified_base 5: mod_base = OTHER; note = 2'-O-methyladenosine-3'-phosphate
  modified_base 6: mod_base = OTHER; note = 2'-O-methylcytidine-3'-phosphate
  modified_base 7: mod_base = OTHER; note = 2'-fluoroadenosine-3'-phosphate
  modified_base 8: mod_base = OTHER; note = 2'-O-methyladenosine-3'-phosphate
  modified_base 9: mod_base = OTHER; note = 2'-fluorouridine-3'-phosphate
  modified_base 10: mod_base = OTHER; note = 2'-fluoroadenosine-3'-phosphate
  modified_base 11: mod_base = OTHER; note = 2'-fluorouridine-3'-phosphate
  modified_base 12: mod_base = OTHER; note = 2'-O-methyladenosine-3'-phosphate
  modified_base 13: mod_base = OTHER; note = 2'-O-methyluridine-3'-phosphate
  modified_base 14: mod_base = OTHER; note = 2'-O-methyladenosine-3'-phosphate
  modified_base 15: mod_base = OTHER; note = 2'-O-methyluridine-3'-phosphate
  modified_base 16: mod_base = OTHER; note = 2'-O-methyladenosine-3'-phosphate
  modified_base 17: mod_base = OTHER; note = 2'-O-methyluridine-3'-phosphate
  modified_base 18: mod_base = OTHER; note = 2'-O-methylcytidine-3'-phosphate
  modified_base 19: mod_base = OTHER; note = 2'-O-methylcytidine-3'-phosphorothioate
  modified_base 20: mod_base = OTHER; note = 2'-O-methyluridine-3'-phosphorothioate
  modified_base 21: mod_base = OTHER; note = 2'-O-methyladenosine-3'-phosphate
acttacaatatatatatccta

SEQ ID NO: 4666 - RNA, 21 nt, synthetic construct
  source 1..21: mol_type = other RNA
  modified_base 1: mod_base = OTHER; note = 2'-O-methyladenosine-3'-phosphorothioate
  modified_base 2: mod_base = OTHER; note = 2'-O-methyluridine-3'-phosphorothioate
  modified_base 3: mod_base = OTHER; note = 2'-O-methylguanosine-3'-phosphate
  modified_base 4: mod_base = OTHER; note = 2'-O-methylcytidine-3'-phosphate
  modified_base 5: mod_base = OTHER; note = 2'-O-methyladenosine-3'-phosphate
  modified_base 6: mod_base = OTHER; note = 2'-O-methylguanosine-3'-phosphate
  modified_base 7: mod_base = OTHER; note = 2'-fluorouridine-3'-phosphate
  modified_base 8: mod_base = OTHER; note = 2'-O-methyluridine-3'-phosphate
  modified_base 9: mod_base = OTHER; note = 2'-fluorouridine-3'-phosphate
  modified_base 10: mod_base = OTHER; note = 2'-fluoroguanosine-3'-phosphate
  modified_base 11: mod_base = OTHER; note = 2'-fluoroguanosine-3'-phosphate
  modified_base 12: mod_base = OTHER; note = 2'-O-methyluridine-3'-phosphate
  modified_base 13: mod_base = OTHER; note = 2'-O-methyladenosine-3'-phosphate
  modified_base 14: mod_base = OTHER; note = 2'-O-methyluridine-3'-phosphate
  modified_base 15: mod_base = OTHER; note = 2'-O-methylcytidine-3'-phosphate
  modified_base 16: mod_base = OTHER; note = 2'-O-methyluridine-3'-phosphate
  modified_base 17: mod_base = OTHER; note = 2'-O-methylguanosine-3'-phosphate
  modified_base 18: mod_base = OTHER; note = 2'-O-methyladenosine-3'-phosphate
  modified_base 19: mod_base = OTHER; note = 2'-O-methylcytidine-3'-phosphorothioate
  modified_base 20: mod_base = OTHER; note = 2'-O-methyladenosine-3'-phosphorothioate
  modified_base 21: mod_base = OTHER; note = 2'-O-methyladenosine-3'-phosphate
atgcagtttggtatctgacaa

SEQ ID NO: 4667 - RNA, 21 nt, synthetic construct
  source 1..21: mol_type = other RNA
  modified_base 1: mod_base = OTHER; note = 2'-O-methylcytidine-3'-phosphorothioate
  modified_base 2: mod_base = OTHER; note = 2'-O-methylcytidine-3'-phosphorothioate
  modified_base 3: mod_base = OTHER; note = 2'-O-methyluridine-3'-phosphate
  modified_base 4: mod_base = OTHER; note = 2'-O-methyluridine-3'-phosphate
  modified_base 5: mod_base = OTHER; note = 2'-O-methyladenosine-3'-phosphate
  modified_base 6: mod_base = OTHER; note = 2'-O-methyluridine-3'-phosphate
  modified_base 7: mod_base = OTHER; note = 2'-fluorouridine-3'-phosphate
  modified_base 8: mod_base = OTHER; note = 2'-O-methyluridine-3'-phosphate
  modified_base 9: mod_base = OTHER; note = 2'-fluorocytidine-3'-phosphate
  modified_base 10: mod_base = OTHER; note = 2'-fluoroadenosine-3'-phosphate
  modified_base 11: mod_base = OTHER; note = 2'-fluoroadenosine-3'-phosphate
  modified_base 12: mod_base = OTHER; note = 2'-O-methylguanosine-3'-phosphate
  modified_base 13: mod_base = OTHER; note = 2'-O-methyladenosine-3'-phosphate
  modified_base 14: mod_base = OTHER; note = 2'-O-methylcytidine-3'-phosphate
  modified_base 15: mod_base = OTHER; note = 2'-O-methyladenosine-3'-phosphate
  modified_base 16: mod_base = OTHER; note = 2'-O-methylcytidine-3'-phosphate
  modified_base 17: mod_base = OTHER; note = 2'-O-methyluridine-3'-phosphate
  modified_base 18: mod_base = OTHER; note = 2'-O-methylguanosine-3'-phosphate
  modified_base 19: mod_base = OTHER; note = 2'-O-methylguanosine-3'-phosphorothioate
  modified_base 20: mod_base = OTHER; note = 2'-O-methyluridine-3'-phosphorothioate
  modified_base 21: mod_base = OTHER; note = 2'-O-methyladenosine-3'-phosphate
ccttatttcaagacactggta

SEQ ID NO: 4668 - RNA, 21 nt, synthetic construct
  source 1..21: mol_type = other RNA
  modified_base 1: mod_base = OTHER; note = 2'-O-methylguanosine-3'-phosphorothioate
  modified_base 2: mod_base = OTHER; note = 2'-O-methyladenosine-3'-phosphorothioate
  modified_base 3: mod_base = OTHER; note = 2'-O-methyladenosine-3'-phosphate
  modified_base 4: mod_base = OTHER; note = 2'-O-methylguanosine-3'-phosphate
  modified_base 5: mod_base = OTHER; note = 2'-O-methylguanosine-3'-phosphate
  modified_base 6: mod_base = OTHER; note = 2'-O-methylguanosine-3'-phosphate
  modified_base 7: mod_base = OTHER; note = 2'-fluoroadenosine-3'-phosphate
  modified_base 8: mod_base = OTHER; note = 2'-O-methyluridine-3'-phosphate
  modified_base 9: mod_base = OTHER; note = 2'-fluorouridine-3'-phosphate
  modified_base 10: mod_base = OTHER; note = 2'-fluorouridine-3'-phosphate
  modified_base 11: mod_base = OTHER; note = 2'-fluoroadenosine-3'-phosphate
  modified_base 12: mod_base = OTHER; note = 2'-O-methyluridine-3'-phosphate
  modified_base 13: mod_base = OTHER; note = 2'-O-methyluridine-3'-phosphate
  modified_base 14: mod_base = OTHER; note = 2'-O-methylcytidine-3'-phosphate
  modified_base 15: mod_base = OTHER; note = 2'-O-methyluridine-3'-phosphate
  modified_base 16: mod_base = OTHER; note = 2'-O-methyluridine-3'-phosphate
  modified_base 17: mod_base = OTHER; note = 2'-O-methyluridine-3'-phosphate
  modified_base 18: mod_base = OTHER; note = 2'-O-methyladenosine-3'-phosphate
  modified_base 19: mod_base = OTHER; note = 2'-O-methylguanosine-3'-phosphorothioate
  modified_base 20: mod_base = OTHER; note = 2'-O-methyluridine-3'-phosphorothioate
  modified_base 21: mod_base = OTHER; note = 2'-O-methyladenosine-3'-phosphate
gaagggatttattctttagta

SEQ ID NO: 4669 - RNA, 21 nt, synthetic construct
  source 1..21: mol_type = other RNA
  modified_base 1: mod_base = OTHER; note = 2'-O-methyladenosine-3'-phosphorothioate
  modified_base 2: mod_base = OTHER; note = 2'-O-methyluridine-3'-phosphorothioate
  modified_base 3: mod_base = OTHER; note = 2'-O-methylcytidine-3'-phosphate
  modified_base 4: mod_base = OTHER; note = 2'-O-methylcytidine-3'-phosphate
  modified_base 5: mod_base = OTHER; note = 2'-O-methyluridine-3'-phosphate
  modified_base 6: mod_base = OTHER; note = 2'-O-methyluridine-3'-phosphate
  modified_base 7: mod_base = OTHER; note = 2'-fluoroguanosine-3'-phosphate
  modified_base 8: mod_base = OTHER; note = 2'-O-methylcytidine-3'-phosphate
  modified_base 9: mod_base = OTHER; note = 2'-fluorouridine-3'-phosphate
  modified_base 10: mod_base = OTHER; note = 2'-fluoroadenosine-3'-phosphate
  modified_base 11: mod_base = OTHER; note = 2'-fluorocytidine-3'-phosphate
  modified_base 12: mod_base = OTHER; note = 2'-O-methylguanosine-3'-phosphate
  modified_base 13: mod_base = OTHER; note = 2'-O-methylguanosine-3'-phosphate
  modified_base 14: mod_base = OTHER; note = 2'-O-methyladenosine-3'-phosphate
  modified_base 15: mod_base = OTHER; note = 2'-O-methyluridine-3'-phosphate
  modified_base 16: mod_base = OTHER; note = 2'-O-methylcytidine-3'-phosphate
  modified_base 17: mod_base = OTHER; note = 2'-O-methyluridine-3'-phosphate
  modified_base 18: mod_base = OTHER; note = 2'-O-methyluridine-3'-phosphate
  modified_base 19: mod_base = OTHER; note = 2'-O-methyladenosine-3'-phosphorothioate
  modified_base 20: mod_base = OTHER; note = 2'-O-methyladenosine-3'-phosphorothioate
  modified_base 21: mod_base = OTHER; note = 2'-O-methyladenosine-3'-phosphate
atccttgctacggatcttaaa

SEQ ID NO: 4670 - RNA, 21 nt, synthetic construct
  source 1..21: mol_type = other RNA
  modified_base 1: mod_base = OTHER; note = 2'-O-methyladenosine-3'-phosphorothioate
  modified_base 2: mod_base = OTHER; note = 2'-O-methylcytidine-3'-phosphorothioate
  modified_base 3: mod_base = OTHER; note = 2'-O-methyluridine-3'-phosphate
  modified_base 4: mod_base = OTHER; note = 2'-O-methylguanosine-3'-phosphate
  modified_base 5: mod_base = OTHER; note = 2'-O-methyladenosine-3'-phosphate
  modified_base 6: mod_base = OTHER; note = 2'-O-methylcytidine-3'-phosphate
  modified_base 7: mod_base = OTHER; note = 2'-fluorouridine-3'-phosphate
  modified_base 8: mod_base = OTHER; note = 2'-O-methyladenosine-3'-phosphate
  modified_base 9: mod_base = OTHER; note = 2'-fluorouridine-3'-phosphate
  modified_base 10: mod_base = OTHER; note = 2'-fluorocytidine-3'-phosphate
  modified_base 11: mod_base = OTHER; note = 2'-fluorocytidine-3'-phosphate
  modified_base 12: mod_base = OTHER; note = 2'-O-methylcytidine-3'-phosphate
  modified_base 13: mod_base = OTHER; note = 2'-O-methylguanosine-3'-phosphate
  modified_base 14: mod_base = OTHER; note = 2'-O-methyladenosine-3'-phosphate
  modified_base 15: mod_base = OTHER; note = 2'-O-methyladenosine-3'-phosphate
  modified_base 16: mod_base = OTHER; note = 2'-O-methylguanosine-3'-phosphate
  modified_base 17: mod_base = OTHER; note = 2'-O-methylcytidine-3'-phosphate
  modified_base 18: mod_base = OTHER; note = 2'-O-methyladenosine-3'-phosphate
  modified_base 19: mod_base = OTHER; note = 2'-O-methyladenosine-3'-phosphorothioate
  modified_base 20: mod_base = OTHER; note = 2'-O-methyladenosine-3'-phosphorothioate
  modified_base 21: mod_base = OTHER; note = 2'-O-methyladenosine-3'-phosphate
actgactatcccgaagcaaaa

SEQ ID NO: 4671 - RNA, 21 nt, synthetic construct
  source 1..21: mol_type = other RNA
  modified_base 1: mod_base = OTHER; note = 2'-O-methyluridine-3'-phosphorothioate
  modified_base 2: mod_base = OTHER; note = 2'-O-methylguanosine-3'-phosphorothioate
  modified_base 3: mod_base = OTHER; note = 2'-O-methyluridine-3'-phosphate
  modified_base 4: mod_base = OTHER; note = 2'-O-methyladenosine-3'-phosphate
  modified_base 5: mod_base = OTHER; note = 2'-O-methyluridine-3'-phosphate
  modified_base 6: mod_base = OTHER; note = 2'-O-methyluridine-3'-phosphate
  modified_base 7: mod_base = OTHER; note = 2'-fluorouridine-3'-phosphate
  modified_base 8: mod_base = OTHER; note = 2'-O-methylcytidine-3'-phosphate
  modified_base 9: mod_base = OTHER; note = 2'-fluorouridine-3'-phosphate
  modified_base 10: mod_base = OTHER; note = 2'-fluoroguanosine-3'-phosphate
  modified_base 11: mod_base = OTHER; note = 2'-fluorocytidine-3'-phosphate
  modified_base 12: mod_base = OTHER; note = 2'-O-methyluridine-3'-phosphate
  modified_base 13: mod_base = OTHER; note = 2'-O-methyladenosine-3'-phosphate
  modified_base 14: mod_base = OTHER; note = 2'-O-methyluridine-3'-phosphate
  modified_base 15: mod_base = OTHER; note = 2'-O-methyluridine-3'-phosphate
  modified_base 16: mod_base = OTHER; note = 2'-O-methyladenosine-3'-phosphate
  modified_base 17: mod_base = OTHER; note = 2'-O-methyluridine-3'-phosphate
  modified_base 18: mod_base = OTHER; note = 2'-O-methyluridine-3'-phosphate
  modified_base 19: mod_base = OTHER; note = 2'-O-methyluridine-3'-phosphorothioate
  modified_base 20: mod_base = OTHER; note = 2'-O-methylcytidine-3'-phosphorothioate
  modified_base 21: mod_base = OTHER; note = 2'-O-methyladenosine-3'-phosphate
tgtatttctgctattatttca

SEQ ID NO: 4672 - RNA, 21 nt, synthetic construct
  source 1..21: mol_type = other RNA
  modified_base 1: mod_base = OTHER; note = 2'-O-methyluridine-3'-phosphorothioate
  modified_base 2: mod_base = OTHER; note = 2'-O-methylguanosine-3'-phosphorothioate
  modified_base 3: mod_base = OTHER; note = 2'-O-methyluridine-3'-phosphate
  modified_base 4: mod_base = OTHER; note = 2'-O-methyladenosine-3'-phosphate
  modified_base 5: mod_base = OTHER; note = 2'-O-methyladenosine-3'-phosphate
  modified_base 6: mod_base = OTHER; note = 2'-O-methylcytidine-3'-phosphate
  modified_base 7: mod_base = OTHER; note = 2'-fluoroadenosine-3'-phosphate
  modified_base 8: mod_base = OTHER; note = 2'-O-methyladenosine-3'-phosphate
  modified_base 9: mod_base = OTHER; note = 2'-fluorouridine-3'-phosphate
  modified_base 10: mod_base = OTHER; note = 2'-fluoroadenosine-3'-phosphate
  modified_base 11: mod_base = OTHER; note = 2'-fluoroadenosine-3'-phosphate
  modified_base 12: mod_base = OTHER; note = 2'-O-methylcytidine-3'-phosphate
  modified_base 13: mod_base = OTHER; note = 2'-O-methyluridine-3'-phosphate
  modified_base 14: mod_base = OTHER; note = 2'-O-methyladenosine-3'-phosphate
  modified_base 15: mod_base = OTHER; note = 2'-O-methylguanosine-3'-phosphate
  modified_base 16: mod_base = OTHER; note = 2'-O-methylcytidine-3'-phosphate
  modified_base 17: mod_base = OTHER; note = 2'-O-methylcytidine-3'-phosphate
  modified_base 18: mod_base = OTHER; note = 2'-O-methyluridine-3'-phosphate
  modified_base 19: mod_base = OTHER; note = 2'-O-methyladenosine-3'-phosphorothioate
  modified_base 20: mod_base = OTHER; note = 2'-O-methyladenosine-3'-phosphorothioate
  modified_base 21: mod_base = OTHER; note = 2'-O-methyladenosine-3'-phosphate
tgtaacaataactagcctaaa

SEQ ID NO: 4673 - RNA, 21 nt, synthetic construct
  source 1..21: mol_type = other RNA
  modified_base 1: mod_base = OTHER; note = 2'-O-methylguanosine-3'-phosphorothioate
  modified_base 2: mod_base = OTHER; note = 2'-O-methyluridine-3'-phosphorothioate
  modified_base 3: mod_base = OTHER; note = 2'-O-methyluridine-3'-phosphate
  modified_base 4: mod_base = OTHER; note = 2'-O-methylguanosine-3'-phosphate
  modified_base 5: mod_base = OTHER; note = 2'-O-methyluridine-3'-phosphate
  modified_base 6: mod_base = OTHER; note = 2'-O-methyluridine-3'-phosphate
  modified_base 7: mod_base = OTHER; note = 2'-fluorouridine-3'-phosphate
  modified_base 8: mod_base = OTHER; note = 2'-O-methyluridine-3'-phosphate
  modified_base 9: mod_base = OTHER; note = 2'-fluorouridine-3'-phosphate
  modified_base 10: mod_base = OTHER; note = 2'-fluoroadenosine-3'-phosphate
  modified_base 11: mod_base = OTHER; note = 2'-fluorocytidine-3'-phosphate
  modified_base 12: mod_base = OTHER; note = 2'-O-methyluridine-3'-phosphate
  modified_base 13: mod_base = OTHER; note = 2'-O-methylcytidine-3'-phosphate
  modified_base 14: mod_base = OTHER; note = 2'-O-methyluridine-3'-phosphate
  modified_base 15: mod_base = OTHER; note = 2'-O-methyladenosine-3'-phosphate
  modified_base 16: mod_base = OTHER; note = 2'-O-methylguanosine-3'-phosphate
  modified_base 17: mod_base = OTHER; note = 2'-O-methylcytidine-3'-phosphate
  modified_base 18: mod_base = OTHER; note = 2'-O-methyluridine-3'-phosphate
  modified_base 19: mod_base = OTHER; note = 2'-O-methylcytidine-3'-phosphorothioate
  modified_base 20: mod_base = OTHER; note = 2'-O-methyladenosine-3'-phosphorothioate
  modified_base 21: mod_base = OTHER; note = 2'-O-methyladenosine-3'-phosphate
gttgtttttactctagctcaa

SEQ ID NO: 4674 - RNA, 21 nt, synthetic construct
  source 1..21: mol_type = other RNA
  modified_base 1: mod_base = OTHER; note = 2'-O-methylcytidine-3'-phosphorothioate
  modified_base 2: mod_base = OTHER; note = 2'-O-methyladenosine-3'-phosphorothioate
  modified_base 3: mod_base = OTHER; note = 2'-O-methylguanosine-3'-phosphate
  modified_base 4: mod_base = OTHER; note = 2'-O-methylguanosine-3'-phosphate
  modified_base 5: mod_base = OTHER; note = 2'-O-methylcytidine-3'-phosphate
  modified_base 6: mod_base = OTHER; note = 2'-O-methyladenosine-3'-phosphate
  modified_base 7: mod_base = OTHER; note = 2'-fluoroguanosine-3'-phosphate
  modified_base 8: mod_base = OTHER; note = 2'-O-methyluridine-3'-phosphate
  modified_base 9: mod_base = OTHER; note = 2'-fluorouridine-3'-phosphate
  modified_base 10: mod_base = OTHER; note = 2'-fluorouridine-3'-phosphate
  modified_base 11: mod_base = OTHER; note = 2'-fluorouridine-3'-phosphate
  modified_base 12: mod_base = OTHER; note = 2'-O-methyladenosine-3'-phosphate
  modified_base 13: mod_base = OTHER; note = 2'-O-methyluridine-3'-phosphate
  modified_base 14: mod_base = OTHER; note = 2'-O-methyladenosine-3'-phosphate
  modified_base 15: mod_base = OTHER; note = 2'-O-methylcytidine-3'-phosphate
  modified_base 16: mod_base = OTHER; note = 2'-O-methyladenosine-3'-phosphate
  modified_base 17: mod_base = OTHER; note = 2'-O-methyladenosine-3'-phosphate
  modified_base 18: mod_base = OTHER; note = 2'-O-methyluridine-3'-phosphate
  modified_base 19: mod_base = OTHER; note = 2'-O-methylguanosine-3'-phosphorothioate
  modified_base 20: mod_base = OTHER; note = 2'-O-methyladenosine-3'-phosphorothioate
  modified_base 21: mod_base = OTHER; note = 2'-O-methyladenosine-3'-phosphate
caggcagttttatacaatgaa

SEQ ID NO: 4675 - RNA, 21 nt, synthetic construct
  source 1..21: mol_type = other RNA
  modified_base 1: mod_base = OTHER; note = 2'-O-methyladenosine-3'-phosphorothioate
  modified_base 2: mod_base = OTHER; note = 2'-O-methylguanosine-3'-phosphorothioate
  modified_base 3: mod_base = OTHER; note = 2'-O-methylguanosine-3'-phosphate
  modified_base 4: mod_base = OTHER; note = 2'-O-methyladenosine-3'-phosphate
  modified_base 5: mod_base = OTHER; note = 2'-O-methyluridine-3'-phosphate
  modified_base 6: mod_base = OTHER; note = 2'-O-methyluridine-3'-phosphate
  modified_base 7: mod_base = OTHER; note = 2'-fluorocytidine-3'-phosphate
  modified_base 8: mod_base = OTHER; note = 2'-O-methyluridine-3'-phosphate
  modified_base 9: mod_base = OTHER; note = 2'-fluorocytidine-3'-phosphate
  modified_base 10: mod_base = OTHER; note = 2'-fluoroadenosine-3'-phosphate
  modified_base 11: mod_base = OTHER; note = 2'-fluoroguanosine-3'-phosphate
  modified_base 12: mod_base = OTHER; note = 2'-O-methyluridine-3'-phosphate
  modified_base 13: mod_base = OTHER; note = 2'-O-methylcytidine-3'-phosphate
  modified_base 14: mod_base = OTHER; note = 2'-O-methyladenosine-3'-phosphate
  modified_base 15: mod_base = OTHER; note = 2'-O-methylguanosine-3'-phosphate
  modified_base 16: mod_base = OTHER; note = 2'-O-methylguanosine-3'-phosphate
  modified_base 17: mod_base = OTHER; note = 2'-O-methyluridine-3'-phosphate
  modified_base 18: mod_base = OTHER; note = 2'-O-methyluridine-3'-phosphate
  modified_base 19: mod_base = OTHER; note = 2'-O-methyladenosine-3'-phosphorothioate
  modified_base 20: mod_base = OTHER; note = 2'-O-methyluridine-3'-phosphorothioate
  modified_base 21: mod_base = OTHER; note = 2'-O-methyladenosine-3'-phosphate
aggattctcagtcaggttata

SEQ ID NO: 4676 - RNA, 21 nt, synthetic construct
  source 1..21: mol_type = other RNA
  modified_base 1: mod_base = OTHER; note = 2'-O-methyladenosine-3'-phosphorothioate
  modified_base 2: mod_base = OTHER; note = 2'-O-methyluridine-3'-phosphorothioate
  modified_base 3: mod_base = OTHER; note = 2'-O-methyluridine-3'-phosphate
  modified_base 4: mod_base = OTHER; note = 2'-O-methyluridine-3'-phosphate
  modified_base 5: mod_base = OTHER; note = 2'-O-methyluridine-3'-phosphate
  modified_base 6: mod_base = OTHER; note = 2'-O-methylcytidine-3'-phosphate
  modified_base 7: mod_base = OTHER; note = 2'-fluorocytidine-3'-phosphate
  modified_base 8: mod_base = OTHER; note = 2'-O-methyladenosine-3'-phosphate
  modified_base 9: mod_base = OTHER; note = 2'-fluorouridine-3'-phosphate
  modified_base 10: mod_base = OTHER; note = 2'-fluorocytidine-3'-phosphate
  modified_base 11: mod_base = OTHER; note = 2'-fluoroadenosine-3'-phosphate
  modified_base 12: mod_base = OTHER; note = 2'-O-methyluridine-3'-phosphate
  modified_base 13: mod_base = OTHER; note = 2'-O-methylguanosine-3'-phosphate
  modified_base 14: mod_base = OTHER; note = 2'-O-methyluridine-3'-phosphate
  modified_base 15: mod_base = OTHER; note = 2'-O-methyluridine-3'-phosphate
  modified_base 16: mod_base = OTHER; note = 2'-O-methyluridine-3'-phosphate
  modified_base 17: mod_base = OTHER; note = 2'-O-methyladenosine-3'-phosphate
  modified_base 18: mod_base = OTHER; note = 2'-O-methyladenosine-3'-phosphate
  modified_base 19: mod_base = OTHER; note = 2'-O-methylguanosine-3'-phosphorothioate
  modified_base 20: mod_base = OTHER; note = 2'-O-methyluridine-3'-phosphorothioate
  modified_base 21: mod_base = OTHER; note = 2'-O-methyladenosine-3'-phosphate
attttccatcatgtttaagta

SEQ ID NO: 4677 - RNA, 21 nt, synthetic construct
  source 1..21: mol_type = other RNA
  modified_base 1: mod_base = OTHER; note = 2'-O-methyluridine-3'-phosphorothioate
  modified_base 2: mod_base = OTHER; note = 2'-O-methylguanosine-3'-phosphorothioate
  modified_base 3: mod_base = OTHER; note = 2'-O-methylcytidine-3'-phosphate
  modified_base 4: mod_base = OTHER; note = 2'-O-methylcytidine-3'-phosphate
  modified_base 5: mod_base = OTHER; note = 2'-O-methyladenosine-3'-phosphate
  modified_base 6: mod_base = OTHER; note = 2'-O-methylcytidine-3'-phosphate
  modified_base 7: mod_base = OTHER; note = 2'-fluorouridine-3'-phosphate
  modified_base 8: mod_base = OTHER; note = 2'-O-methyluridine-3'-phosphate
  modified_base 9: mod_base = OTHER; note = 2'-fluorouridine-3'-phosphate
  modified_base 10: mod_base = OTHER; note = 2'-fluorouridine-3'-phosphate
  modified_base 11: mod_base = OTHER; note = 2'-fluoroguanosine-3'-phosphate
  modified_base 12: mod_base = OTHER; note = 2'-O-methyluridine-3'-phosphate
  modified_base 13: mod_base = OTHER; note = 2'-O-methyluridine-3'-phosphate
  modified_base 14: mod_base = OTHER; note = 2'-O-methyladenosine-3'-phosphate
  modified_base 15: mod_base = OTHER; note = 2'-O-methylcytidine-3'-phosphate
  modified_base 16: mod_base = OTHER; note = 2'-O-methylcytidine-3'-phosphate
  modified_base 17: mod_base = OTHER; note = 2'-O-methyladenosine-3'-phosphate
  modified_base 18: mod_base = OTHER; note = 2'-O-methyluridine-3'-phosphate
  modified_base 19: mod_base = OTHER; note = 2'-O-methyluridine-3'-phosphorothioate
  modified_base 20: mod_base = OTHER; note = 2'-O-methylguanosine-3'-phosphorothioate
  modified_base 21: mod_base = OTHER; note = 2'-O-methyladenosine-3'-phosphate
tgccacttttgttaccattga

SEQ ID NO: 4678 - RNA, 21 nt, synthetic construct
  source 1..21: mol_type = other RNA
  modified_base 1: mod_base = OTHER; note = 2'-O-methyladenosine-3'-phosphorothioate
  modified_base 2: mod_base = OTHER; note = 2'-O-methylcytidine-3'-phosphorothioate
  modified_base 3: mod_base = OTHER; note = 2'-O-methyluridine-3'-phosphate
  modified_base 4: mod_base = OTHER; note = 2'-O-methyluridine-3'-phosphate
  modified_base 5: mod_base = OTHER; note = 2'-O-methylguanosine-3'-phosphate
  modified_base 6: mod_base = OTHER; note = 2'-O-methylcytidine-3'-phosphate
  modified_base 7: mod_base = OTHER; note = 2'-fluorouridine-3'-phosphate
  modified_base 8: mod_base = OTHER; note = 2'-O-methyladenosine-3'-phosphate
  modified_base 9: mod_base = OTHER; note = 2'-fluoroguanosine-3'-phosphate
  modified_base 10: mod_base = OTHER; note = 2'-fluorouridine-3'-phosphate
  modified_base 11: mod_base = OTHER; note = 2'-fluoroguanosine-3'-phosphate
  modified_base 12: mod_base = OTHER; note = 2'-O-methyluridine-3'-phosphate
  modified_base 13: mod_base = OTHER; note = 2'-O-methylguanosine-3'-phosphate
  modified_base 14: mod_base = OTHER; note = 2'-O-methyluridine-3'-phosphate
  modified_base 15: mod_base = OTHER; note = 2'-O-methylguanosine-3'-phosphate
  modified_base 16: mod_base = OTHER; note = 2'-O-methylguanosine-3'-phosphate
  modified_base 17: mod_base = OTHER; note = 2'-O-methyladenosine-3'-phosphate
  modified_base 18: mod_base = OTHER; note = 2'-O-methyluridine-3'-phosphate
  modified_base 19: mod_base = OTHER; note = 2'-O-methyladenosine-3'-phosphorothioate
  modified_base 20: mod_base = OTHER; note = 2'-O-methyluridine-3'-phosphorothioate
  modified_base 21: mod_base = OTHER; note = 2'-O-methyladenosine-3'-phosphate
acttgctagtgtgtggatata

SEQ ID NO: 4679 - RNA, 21 nt, synthetic construct
  source 1..21: mol_type = other RNA
  modified_base 1: mod_base = OTHER; note = 2'-O-methyladenosine-3'-phosphorothioate
  modified_base 2: mod_base = OTHER; note = 2'-O-methyladenosine-3'-phosphorothioate
  modified_base 3: mod_base = OTHER; note = 2'-O-methyluridine-3'-phosphate
  modified_base 4: mod_base = OTHER; note = 2'-O-methylcytidine-3'-phosphate
  modified_base 5: mod_base = OTHER; note = 2'-O-methyluridine-3'-phosphate
  modified_base 6: mod_base = OTHER; note = 2'-O-methyluridine-3'-phosphate
  modified_base 7: mod_base = OTHER; note = 2'-fluoroadenosine-3'-phosphate
  modified_base 8: mod_base = OTHER; note = 2'-O-methylcytidine-3'-phosphate
  modified_base 9: mod_base = OTHER; note = 2'-fluorouridine-3'-phosphate
  modified_base 10: mod_base = OTHER; note = 2'-fluorouridine-3'-phosphate
  modified_base 11: mod_base = OTHER; note = 2'-fluoroguanosine-3'-phosphate
  modified_base 12: mod_base = OTHER; note = 2'-O-methyladenosine-3'-phosphate
  modified_base 13: mod_base = OTHER; note = 2'-O-methylguanosine-3'-phosphate
  modified_base 14: mod_base = OTHER; note = 2'-O-methyladenosine-3'-phosphate
  modified_base 15: mod_base = OTHER; note = 2'-O-methyladenosine-3'-phosphate
  modified_base 16: mod_base = OTHER; note = 2'-O-methyladenosine-3'-phosphate
  modified_base 17: mod_base = OTHER; note = 2'-O-methyluridine-3'-phosphate
  modified_base 18: mod_base = OTHER; note = 2'-O-methyluridine-3'-phosphate
  modified_base 19: mod_base = OTHER; note = 2'-O-methylguanosine-3'-phosphorothioate
  modified_base 20: mod_base = OTHER; note = 2'-O-methylcytidine-3'-phosphorothioate
  modified_base 21: mod_base = OTHER; note = 2'-O-methyladenosine-3'-phosphate
aatcttacttgagaaattgca

SEQ ID NO: 4680 - RNA, 21 nt, synthetic construct
  source 1..21: mol_type = other RNA
  modified_base 1: mod_base = OTHER; note = 2'-O-methyladenosine-3'-phosphorothioate
  modified_base 2: mod_base = OTHER; note = 2'-O-methylguanosine-3'-phosphorothioate
  modified_base 3: mod_base = OTHER; note = 2'-O-methyluridine-3'-phosphate
  modified_base 4: mod_base = OTHER; note = 2'-O-methyluridine-3'-phosphate
  modified_base 5: mod_base = OTHER; note = 2'-O-methylcytidine-3'-phosphate
  modified_base 6: mod_base = OTHER; note = 2'-O-methylguanosine-3'-phosphate
  modified_base 7: mod_base = OTHER; note = 2'-fluoroadenosine-3'-phosphate
  modified_base 8: mod_base = OTHER; note = 2'-O-methylguanosine-3'-phosphate
  modified_base 9: mod_base = OTHER; note = 2'-fluoroadenosine-3'-phosphate
  modified_base 10: mod_base = OTHER; note = 2'-fluorocytidine-3'-phosphate
  modified_base 11: mod_base = OTHER; note = 2'-fluorouridine-3'-phosphate
  modified_base 12: mod_base = OTHER; note = 2'-O-methyluridine-3'-phosphate
  modified_base 13: mod_base = OTHER; note = 2'-O-methylguanosine-3'-phosphate
  modified_base 14: mod_base = OTHER; note = 2'-O-methylcytidine-3'-phosphate
  modified_base 15: mod_base = OTHER; note = 2'-O-methyladenosine-3'-phosphate
  modified_base 16: mod_base = OTHER; note = 2'-O-methyluridine-3'-phosphate
  modified_base 17: mod_base = OTHER; note = 2'-O-methyluridine-3'-phosphate
  modified_base 18: mod_base = OTHER; note = 2'-O-methyluridine-3'-phosphate
  modified_base 19: mod_base = OTHER; note = 2'-O-methylguanosine-3'-phosphorothioate
  modified_base 20: mod_base = OTHER; note = 2'-O-methyladenosine-3'-phosphorothioate
  modified_base 21: mod_base = OTHER; note = 2'-O-methyladenosine-3'-phosphate
agttcgagacttgcatttgaa

SEQ ID NO: 4681 - RNA, 21 nt, synthetic construct
  source 1..21: mol_type = other RNA
  modified_base 1: mod_base = OTHER; note = 2'-O-methylcytidine-3'-phosphorothioate
  modified_base 2: mod_base = OTHER; note = 2'-O-methylcytidine-3'-phosphorothioate
  modified_base 3: mod_base = OTHER; note = 2'-O-methyladenosine-3'-phosphate
  modified_base 4: mod_base = OTHER; note = 2'-O-methyluridine-3'-phosphate
  modified_base 5: mod_base = OTHER; note = 2'-O-methyladenosine-3'-phosphate
  modified_base 6: mod_base = OTHER; note = 2'-O-methylguanosine-3'-phosphate
  modified_base 7: mod_base = OTHER; note = 2'-fluoroadenosine-3'-phosphate
  modified_base 8: mod_base = OTHER; note = 2'-O-methyladenosine-3'-phosphate
  modified_base 9: mod_base = OTHER; note = 2'-fluorouridine-3'-phosphate
  modified_base 10: mod_base = OTHER; note = 2'-fluorouridine-3'-phosphate
  modified_base 11: mod_base = OTHER; note = 2'-fluorouridine-3'-phosphate
  modified_base 12: mod_base = OTHER; note = 2'-O-methylcytidine-3'-phosphate
  modified_base 13: mod_base = OTHER; note = 2'-O-methylcytidine-3'-phosphate
  modified_base 14: mod_base = OTHER; note = 2'-O-methyluridine-3'-phosphate
  modified_base 15: mod_base = OTHER; note = 2'-O-methylguanosine-3'-phosphate
  modified_base 16: mod_base = OTHER; note = 2'-O-methyladenosine-3'-phosphate
  modified_base 17: mod_base = OTHER; note = 2'-O-methyluridine-3'-phosphate
  modified_base 18: mod_base = OTHER; note = 2'-O-methyladenosine-3'-phosphate
  modified_base 19: mod_base = OTHER; note = 2'-O-methylcytidine-3'-phosphorothioate
  modified_base 20: mod_base = OTHER; note = 2'-O-methyluridine-3'-phosphorothioate
  modified_base 21: mod_base = OTHER; note = 2'-O-methyladenosine-3'-phosphate
ccatagaatttcctgatacta

SEQ ID NO: 4682 - RNA, 21 nt, synthetic construct
  source 1..21: mol_type = other RNA
  modified_base 1: mod_base = OTHER; note = 2'-O-methyladenosine-3'-phosphorothioate
  modified_base 2: mod_base = OTHER; note = 2'-O-methylguanosine-3'-phosphorothioate
  modified_base 3: mod_base = OTHER; note = 2'-O-methylguanosine-3'-phosphate
  modified_base 4: mod_base = OTHER; note = 2'-O-methyluridine-3'-phosphate
  modified_base 5: mod_base = OTHER; note = 2'-O-methyladenosine-3'-phosphate
  modified_base 6: mod_base = OTHER; note = 2'-O-methyladenosine-3'-phosphate
  modified_base 7: mod_base = OTHER; note = 2'-fluorouridine-3'-phosphate
  modified_base 8: mod_base = OTHER; note = 2'-O-methyluridine-3'-phosphate
  modified_base 9: mod_base = OTHER; note = 2'-fluorocytidine-3'-phosphate
  modified_base 10: mod_base = OTHER; note = 2'-fluorocytidine-3'-phosphate
  modified_base 11: mod_base = OTHER; note = 2'-fluorouridine-3'-phosphate
  modified_base 12: mod_base = OTHER; note = 2'-O-methyluridine-3'-phosphate
  modified_base 13: mod_base = OTHER; note = 2'-O-methyluridine-3'-phosphate
  modified_base 14: mod_base = OTHER; note = 2'-O-methyladenosine-3'-phosphate
  modified_base 15: mod_base = OTHER; note = 2'-O-methylguanosine-3'-phosphate
  modified_base 16: mod_base = OTHER; note = 2'-O-methyladenosine-3'-phosphate
  modified_base 17: mod_base = OTHER; note = 2'-O-methyladenosine-3'-phosphate
  modified_base 18: mod_base = OTHER; note = 2'-O-methyluridine-3'-phosphate
  modified_base 19: mod_base = OTHER; note = 2'-O-methyladenosine-3'-phosphorothioate
  modified_base 20: mod_base = OTHER; note = 2'-O-methyluridine-3'-phosphorothioate
  modified_base 21: mod_base = OTHER; note = 2'-O-methyladenosine-3'-phosphate
aggtaattcctttagaatata

SEQ ID NO: 4683 - RNA, 21 nt, synthetic construct
  source 1..21: mol_type = other RNA
  modified_base 1: mod_base = OTHER; note = 2'-O-methylcytidine-3'-phosphorothioate
  modified_base 2: mod_base = OTHER; note = 2'-O-methyluridine-3'-phosphorothioate
  modified_base 3: mod_base = OTHER; note = 2'-O-methyluridine-3'-phosphate
  modified_base 4: mod_base = OTHER; note = 2'-O-methyladenosine-3'-phosphate
  modified_base 5: mod_base = OTHER; note = 2'-O-methyluridine-3'-phosphate
  modified_base 6: mod_base = OTHER; note = 2'-O-methylguanosine-3'-phosphate
  modified_base 7: mod_base = OTHER; note = 2'-fluoroguanosine-3'-phosphate
  modified_base 8: mod_base = OTHER; note = 2'-O-methyladenosine-3'-phosphate
  modified_base 9: mod_base = OTHER; note = 2'-fluoroadenosine-3'-phosphate
  modified_base 10: mod_base = OTHER; note = 2'-fluoroadenosine-3'-phosphate
  modified_base 11: mod_base = OTHER; note = 2'-fluorocytidine-3'-phosphate
  modified_base 12: mod_base = OTHER; note = 2'-O-methyluridine-3'-phosphate
  modified_base 13: mod_base = OTHER; note = 2'-O-methylcytidine-3'-phosphate
  modified_base 14: mod_base = OTHER; note = 2'-O-methyladenosine-3'-phosphate
  modified_base 15: mod_base = OTHER; note = 2'-O-methyladenosine-3'-phosphate
  modified_base 16: mod_base = OTHER; note = 2'-O-methylcytidine-3'-phosphate
  modified_base 17: mod_base = OTHER; note = 2'-O-methyladenosine-3'-phosphate
  modified_base 18: mod_base = OTHER; note = 2'-O-methyladenosine-3'-phosphate
  modified_base 19: mod_base = OTHER; note = 2'-O-methylguanosine-3'-phosphorothioate
  modified_base 20: mod_base = OTHER; note = 2'-O-methyladenosine-3'-phosphorothioate
  modified_base 21: mod_base = OTHER; note = 2'-O-methyladenosine-3'-phosphate
cttatggaaactcaacaagaa

SEQ ID NO: 4684 - RNA, 21 nt, synthetic construct
  source 1..21: mol_type = other RNA
  modified_base 1: mod_base = OTHER; note = 2'-O-methyladenosine-3'-phosphorothioate
  modified_base 2: mod_base = OTHER; note = 2'-O-methyladenosine-3'-phosphorothioate
  modified_base 3: mod_base = OTHER; note = 2'-O-methylguanosine-3'-phosphate
  modified_base 4: mod_base = OTHER; note = 2'-O-methylcytidine-3'-phosphate
  modified_base 5: mod_base = OTHER; note = 2'-O-methyladenosine-3'-phosphate
  modified_base 6: mod_base = OTHER; note = 2'-O-methylguanosine-3'-phosphate
  modified_base 7: mod_base = OTHER; note = 2'-fluorocytidine-3'-phosphate
  modified_base 8: mod_base = OTHER; note = 2'-O-methyladenosine-3'-phosphate
  modified_base 9: mod_base = OTHER; note = 2'-fluorouridine-3'-phosphate
  modified_base 10: mod_base = OTHER; note = 2'-fluorouridine-3'-phosphate
  modified_base 11: mod_base = OTHER; note = 2'-fluorouridine-3'-phosphate
  modified_base 12: mod_base = OTHER; note = 2'-O-methyluridine-3'-phosphate
  modified_base 13: mod_base = OTHER; note = 2'-O-methyladenosine-3'-phosphate
  modified_base 14: mod_base = OTHER; note = 2'-O-methyladenosine-3'-phosphate
  modified_base 15: mod_base = OTHER; note = 2'-O-methyladenosine-3'-phosphate
  modified_base 16: mod_base = OTHER; note = 2'-O-methyluridine-3'-phosphate
  modified_base 17: mod_base = OTHER; note = 2'-O-methyluridine-3'-phosphate
  modified_base 18: mod_base = OTHER; note = 2'-O-methyladenosine-3'-phosphate
  modified_base 19: mod_base = OTHER; note = 2'-O-methylcytidine-3'-phosphorothioate
  modified_base 20: mod_base = OTHER; note = 2'-O-methylguanosine-3'-phosphorothioate
  modified_base 21: mod_base = OTHER; note = 2'-O-methyladenosine-3'-phosphate
aagcagcattttaaattacga

SEQ ID NO: 4685 - RNA, 21 nt, synthetic construct
  source 1..21: mol_type = other RNA
  modified_base 1: mod_base = OTHER; note = 2'-O-methyluridine-3'-phosphorothioate
  modified_base 2: mod_base = OTHER; note = 2'-O-methylguanosine-3'-phosphorothioate
  modified_base 3: mod_base = OTHER; note = 2'-O-methyladenosine-3'-phosphate
  modified_base 4: mod_base = OTHER; note = 2'-O-methylcytidine-3'-phosphate
  modified_base 5: mod_base = OTHER; note = 2'-O-methyluridine-3'-phosphate
  modified_base 6: mod_base = OTHER; note = 2'-O-methylcytidine-3'-phosphate
  modified_base 7: mod_base = OTHER; note = 2'-fluorouridine-3'-phosphate
  modified_base 8: mod_base = OTHER; note = 2'-O-methylcytidine-3'-phosphate
  modified_base 9: mod_base = OTHER; note = 2'-fluoroadenosine-3'-phosphate
  modified_base 10: mod_base = OTHER; note = 2'-fluoroadenosine-3'-phosphate
  modified_base 11: mod_base = OTHER; note = 2'-fluorocytidine-3'-phosphate
  modified_base 12: mod_base = OTHER; note = 2'-O-methyluridine-3'-phosphate
  modified_base 13: mod_base = OTHER; note = 2'-O-methylguanosine-3'-phosphate
  modified_base 14: mod_base = OTHER; note = 2'-O-methyladenosine-3'-phosphate
  modified_base 15: mod_base = OTHER; note = 2'-O-methylcytidine-3'-phosphate
  modified_base 16: mod_base = OTHER; note = 2'-O-methylcytidine-3'-phosphate
  modified_base 17: mod_base = OTHER; note = 2'-O-methyladenosine-3'-phosphate
  modified_base 18: mod_base = OTHER; note = 2'-O-methyluridine-3'-phosphate
  modified_base 19: mod_base = OTHER; note = 2'-O-methyluridine-3'-phosphorothioate
  modified_base 20: mod_base = OTHER; note = 2'-O-methylcytidine-3'-phosphorothioate
  modified_base 21: mod_base = OTHER; note = 2'-O-methyladenosine-3'-phosphate
tgactctcaactgaccattca

SEQ ID NO: 4686 - RNA, 21 nt, synthetic construct
  source 1..21: mol_type = other RNA
  modified_base 1: mod_base = OTHER; note = 2'-O-methyladenosine-3'-phosphorothioate
  modified_base 2: mod_base = OTHER; note = 2'-O-methylguanosine-3'-phosphorothioate
  modified_base 3: mod_base = OTHER; note = 2'-O-methylguanosine-3'-phosphate
  modified_base 4: mod_base = OTHER; note = 2'-O-methyluridine-3'-phosphate
  modified_base 5: mod_base = OTHER; note = 2'-O-methyluridine-3'-phosphate
  modified_base 6: mod_base = OTHER; note = 2'-O-methyluridine-3'-phosphate
  modified_base 7: mod_base = OTHER; note = 2'-fluoroadenosine-3'-phosphate
  modified_base 8: mod_base = OTHER; note = 2'-O-methyluridine-3'-phosphate
  modified_base 9: mod_base = OTHER; note = 2'-fluorocytidine-3'-phosphate
  modified_base 10: mod_base = OTHER; note = 2'-fluorocytidine-3'-phosphate
  modified_base 11: mod_base = OTHER; note = 2'-fluoroadenosine-3'-phosphate
  modified_base 12: mod_base = OTHER; note = 2'-O-methyluridine-3'-phosphate
  modified_base 13: mod_base = OTHER; note = 2'-O-methylguanosine-3'-phosphate
  modified_base 14: mod_base = OTHER; note = 2'-O-methyladenosine-3'-phosphate
  modified_base 15: mod_base = OTHER; note = 2'-O-methyladenosine-3'-phosphate
  modified_base 16: mod_base = OTHER; note = 2'-O-methylguanosine-3'-phosphate
  modified_base 17: mod_base = OTHER; note = 2'-O-methylguanosine-3'-phosphate
  modified_base 18: mod_base = OTHER; note = 2'-O-methyladenosine-3'-phosphate
  modified_base 19: mod_base = OTHER; note = 2'-O-methylcytidine-3'-phosphorothioate
  modified_base 20: mod_base = OTHER; note = 2'-O-methyluridine-3'-phosphorothioate
  modified_base 21: mod_base = OTHER; note = 2'-O-methyladenosine-3'-phosphate
aggtttatccatgaaggacta

SEQ ID NO: 4687 - RNA, 21 nt, synthetic construct
  source 1..21: mol_type = other RNA
  modified_base 1: mod_base = OTHER; note = 2'-O-methyladenosine-3'-phosphorothioate
  modified_base 2: mod_base = OTHER; note = 2'-O-methylcytidine-3'-phosphorothioate
  modified_base 3: mod_base = OTHER; note = 2'-O-methylcytidine-3'-phosphate
  modified_base 4: mod_base = OTHER; note = 2'-O-methyladenosine-3'-phosphate
  modified_base 5: mod_base = OTHER; note = 2'-O-methyladenosine-3'-phosphate
  modified_base 6: mod_base = OTHER; note = 2'-O-methylguanosine-3'-phosphate
  modified_base 7: mod_base = OTHER; note = 2'-fluoroadenosine-3'-phosphate
  modified_base 8: mod_base = OTHER; note = 2'-O-methyladenosine-3'-phosphate
  modified_base 9: mod_base = OTHER; note = 2'-fluorouridine-3'-phosphate
  modified_base 10: mod_base = OTHER; note = 2'-fluorouridine-3'-phosphate
  modified_base 11: mod_base = OTHER; note = 2'-fluorouridine-3'-phosphate
  modified_base 12: mod_base = OTHER; note = 2'-O-methylguanosine-3'-phosphate
  modified_base 13: mod_base = OTHER; note = 2'-O-methylguanosine-3'-phosphate
  modified_base 14: mod_base = OTHER; note = 2'-O-methylcytidine-3'-phosphate
  modified_base 15: mod_base = OTHER; note = 2'-O-methyladenosine-3'-phosphate
  modified_base 16: mod_base = OTHER; note = 2'-O-methyluridine-3'-phosphate
  modified_base 17: mod_base = OTHER; note = 2'-O-methyluridine-3'-phosphate
  modified_base 18: mod_base = OTHER; note = 2'-O-methyluridine-3'-phosphate
  modified_base 19: mod_base = OTHER; note = 2'-O-methylcytidine-3'-phosphorothioate
  modified_base 20: mod_base = OTHER; note = 2'-O-methyladenosine-3'-phosphorothioate
  modified_base 21: mod_base = OTHER; note = 2'-O-methyladenosine-3'-phosphate
accaagaatttggcatttcaa

SEQ ID NO: 4688 - RNA, 21 nt, synthetic construct
  source 1..21: mol_type = other RNA
  modified_base 1: mod_base = OTHER; note = 2'-O-methyluridine-3'-phosphorothioate
  modified_base 2: mod_base = OTHER; note = 2'-O-methyladenosine-3'-phosphorothioate
  modified_base 3: mod_base = OTHER; note = 2'-O-methyluridine-3'-phosphate
  modified_base 4: mod_base = OTHER; note = 2'-O-methylcytidine-3'-phosphate
  modified_base 5: mod_base = OTHER; note = 2'-O-methyluridine-3'-phosphate
  modified_base 6: mod_base = OTHER; note = 2'-O-methyladenosine-3'-phosphate
  modified_base 7: mod_base = OTHER; note = 2'-fluoroguanosine-3'-phosphate
  modified_base 8: mod_base = OTHER; note = 2'-O-methyladenosine-3'-phosphate
  modified_base 9: mod_base = OTHER; note = 2'-fluoroadenosine-3'-phosphate
  modified_base 10: mod_base = OTHER; note = 2'-fluorouridine-3'-phosphate
  modified_base 11: mod_base = OTHER; note = 2'-fluoroadenosine-3'-phosphate
  modified_base 12: mod_base = OTHER; note = 2'-O-methyluridine-3'-phosphate
  modified_base 13: mod_base = OTHER; note = 2'-O-methyluridine-3'-phosphate
  modified_base 14: mod_base = OTHER; note = 2'-O-methyluridine-3'-phosphate
  modified_base 15: mod_base = OTHER; note = 2'-O-methylguanosine-3'-phosphate
  modified_base 16: mod_base = OTHER; note = 2'-O-methylguanosine-3'-phosphate
  modified_base 17: mod_base = OTHER; note = 2'-O-methylcytidine-3'-phosphate
  modified_base 18: mod_base = OTHER; note = 2'-O-methyluridine-3'-phosphate
  modified_base 19: mod_base = OTHER; note = 2'-O-methyluridine-3'-phosphorothioate
  modified_base 20: mod_base = OTHER; note = 2'-O-methyladenosine-3'-phosphorothioate
  modified_base 21: mod_base = OTHER; note = 2'-O-methyladenosine-3'-phosphate
tatctagaatatttggcttaa

SEQ ID NO: 4689 - RNA, 21 nt, synthetic construct
  source 1..21: mol_type = other RNA
  modified_base 1: mod_base = OTHER; note = 2'-O-methylcytidine-3'-phosphorothioate
  modified_base 2: mod_base = OTHER; note = 2'-O-methyluridine-3'-phosphorothioate
  modified_base 3: mod_base = OTHER; note = 2'-O-methylcytidine-3'-phosphate
  modified_base 4: mod_base = OTHER; note = 2'-O-methylcytidine-3'-phosphate
  modified_base 5: mod_base = OTHER; note = 2'-O-methyluridine-3'-phosphate
  modified_base 6: mod_base = OTHER; note = 2'-O-methylguanosine-3'-phosphate
  modified_base 7: mod_base = OTHER; note = 2'-fluorocytidine-3'-phosphate
  modified_base 8: mod_base = OTHER; note = 2'-O-methyladenosine-3'-phosphate
  modified_base 9: mod_base = OTHER; note = 2'-fluoroguanosine-3'-phosphate
  modified_base 10: mod_base = OTHER; note = 2'-fluoroadenosine-3'-phosphate
  modified_base 11: mod_base = OTHER; note = 2'-fluoroadenosine-3'-phosphate
  modified_base 12: mod_base = OTHER; note = 2'-O-methyluridine-3'-phosphate
  modified_base 13: mod_base = OTHER; note = 2'-O-methyladenosine-3'-phosphate
  modified_base 14: mod_base = OTHER; note = 2'-O-methylcytidine-3'-phosphate
  modified_base 15: mod_base = OTHER; note = 2'-O-methyladenosine-3'-phosphate
  modified_base 16: mod_base = OTHER; note = 2'-O-methyluridine-3'-phosphate
  modified_base 17: mod_base = OTHER; note = 2'-O-methyladenosine-3'-phosphate
  modified_base 18: mod_base = OTHER; note = 2'-O-methylcytidine-3'-phosphate
  modified_base 19: mod_base = OTHER; note = 2'-O-methyladenosine-3'-phosphorothioate
  modified_base 20: mod_base = OTHER; note = 2'-O-methyladenosine-3'-phosphorothioate
  modified_base 21: mod_base = OTHER; note = 2'-O-methyladenosine-3'-phosphate
ctcctgcagaatacatacaaa

SEQ ID NO: 4690 - RNA, 21 nt, synthetic construct
  source 1..21: mol_type = other RNA
  modified_base 1: mod_base = OTHER; note = 2'-O-methyluridine-3'-phosphorothioate
  modified_base 2: mod_base = OTHER; note = 2'-O-methylcytidine-3'-phosphorothioate
  modified_base 3: mod_base = OTHER; note = 2'-O-methyladenosine-3'-phosphate
  modified_base 4: mod_base = OTHER; note = 2'-O-methylcytidine-3'-phosphate
  modified_base 5: mod_base = OTHER; note = 2'-O-methyladenosine-3'-phosphate
  modified_base 6: mod_base = OTHER; note = 2'-O-methylcytidine-3'-phosphate
  modified_base 7: mod_base = OTHER; note = 2'-fluorocytidine-3'-phosphate
  modified_base 8: mod_base = OTHER; note = 2'-O-methyladenosine-3'-phosphate
  modified_base 9: mod_base = OTHER; note = 2'-fluorouridine-3'-phosphate
  modified_base 10: mod_base = OTHER; note = 2'-fluorouridine-3'-phosphate
  modified_base 11: mod_base = OTHER; note = 2'-fluorouridine-3'-phosphate
  modified_base 12: mod_base = OTHER; note = 2'-O-methylcytidine-3'-phosphate
  modified_base 13: mod_base = OTHER; note = 2'-O-methylcytidine-3'-phosphate
  modified_base 14: mod_base = OTHER; note = 2'-O-methyluridine-3'-phosphate
  modified_base 15: mod_base = OTHER; note = 2'-O-methylguanosine-3'-phosphate
  modified_base 16: mod_base = OTHER; note = 2'-O-methylguanosine-3'-phosphate
  modified_base 17: mod_base = OTHER; note = 2'-O-methyladenosine-3'-phosphate
  modified_base 18: mod_base = OTHER; note = 2'-O-methyluridine-3'-phosphate
  modified_base 19: mod_base = OTHER; note = 2'-O-methyluridine-3'-phosphorothioate
  modified_base 20: mod_base = OTHER; note = 2'-O-methyluridine-3'-phosphorothioate
  modified_base 21: mod_base = OTHER; note = 2'-O-methyladenosine-3'-phosphate
tcacaccatttcctggattta

SEQ ID NO: 4691 - RNA, 21 nt, synthetic construct
  source 1..21: mol_type = other RNA
  modified_base 1: mod_base = OTHER; note = 2'-O-methyladenosine-3'-phosphorothioate
  modified_base 2: mod_base = OTHER; note = 2'-O-methyluridine-3'-phosphorothioate
  modified_base 3: mod_base = OTHER; note = 2'-O-methylguanosine-3'-phosphate
  modified_base 4: mod_base = OTHER; note = 2'-O-methyluridine-3'-phosphate
  modified_base 5: mod_base = OTHER; note = 2'-O-methylguanosine-3'-phosphate
  modified_base 6: mod_base = OTHER; note = 2'-O-methylguanosine-3'-phosphate
  modified_base 7: mod_base = OTHER; note = 2'-fluoroadenosine-3'-phosphate
  modified_base 8: mod_base = OTHER; note = 2'-O-methyladenosine-3'-phosphate
  modified_base 9: mod_base = OTHER; note = 2'-fluorouridine-3'-phosphate
  modified_base 10: mod_base = OTHER; note = 2'-fluorouridine-3'-phosphate
  modified_base 11: mod_base = OTHER; note = 2'-fluorocytidine-3'-phosphate
  modified_base 12: mod_base = OTHER; note = 2'-O-methyladenosine-3'-phosphate
  modified_base 13: mod_base = OTHER; note = 2'-O-methyladenosine-3'-phosphate
  modified_base 14: mod_base = OTHER; note = 2'-O-methylguanosine-3'-phosphate
  modified_base 15: mod_base = OTHER; note = 2'-O-methylcytidine-3'-phosphate
  modified_base 16: mod_base = OTHER; note = 2'-O-methylguanosine-3'-phosphate
  modified_base 17: mod_base = OTHER; note = 2'-O-methylcytidine-3'-phosphate
  modified_base 18: mod_base = OTHER; note = 2'-O-methyluridine-3'-phosphate
  modified_base 19: mod_base = OTHER; note = 2'-O-methyluridine-3'-phosphorothioate
  modified_base 20: mod_base = OTHER; note = 2'-O-methyluridine-3'-phosphorothioate
  modified_base 21: mod_base = OTHER; note = 2'-O-methyladenosine-3'-phosphate
atgtggaattcaagcgcttta

SEQ ID NO: 4692 - RNA, 21 nt, synthetic construct
  source 1..21: mol_type = other RNA
  modified_base 1: mod_base = OTHER; note = 2'-O-methyladenosine-3'-phosphorothioate
  modified_base 2: mod_base = OTHER; note = 2'-O-methyluridine-3'-phosphorothioate
  modified_base 3: mod_base = OTHER; note = 2'-O-methyluridine-3'-phosphate
  modified_base 4: mod_base = OTHER; note = 2'-O-methylguanosine-3'-phosphate
  modified_base 5: mod_base = OTHER; note = 2'-O-methyluridine-3'-phosphate
  modified_base 6: mod_base = OTHER; note = 2'-O-methylguanosine-3'-phosphate
  modified_base 7: mod_base = OTHER; note = 2'-fluorouridine-3'-phosphate
  modified_base 8: mod_base = OTHER; note = 2'-O-methyladenosine-3'-phosphate
  modified_base 9: mod_base = OTHER; note = 2'-fluorouridine-3'-phosphate
  modified_base 10: mod_base = OTHER; note = 2'-fluorouridine-3'-phosphate
  modified_base 11: mod_base = OTHER; note = 2'-fluoroadenosine-3'-phosphate
  modified_base 12: mod_base = OTHER; note = 2'-O-methyluridine-3'-phosphate
  modified_base 13: mod_base = OTHER; note = 2'-O-methylcytidine-3'-phosphate
  modified_base 14: mod_base = OTHER; note = 2'-O-methyluridine-3'-phosphate
  modified_base 15: mod_base = OTHER; note = 2'-O-methyladenosine-3'-phosphate
  modified_base 16: mod_base = OTHER; note = 2'-O-methylcytidine-3'-phosphate
  modified_base 17: mod_base = OTHER; note = 2'-O-methyluridine-3'-phosphate
  modified_base 18: mod_base = OTHER; note = 2'-O-methyladenosine-3'-phosphate
  modified_base 19: mod_base = OTHER; note = 2'-O-methyluridine-3'-phosphorothioate
  modified_base 20: mod_base = OTHER; note = 2'-O-methylguanosine-3'-phosphorothioate
  modified_base 21: mod_base = OTHER; note = 2'-O-methyladenosine-3'-phosphate
attgtgtattatctactatga

SEQ ID NO: 4693 - RNA, 21 nt, synthetic construct
  source 1..21: mol_type = other RNA
  modified_base 1: mod_base = OTHER; note = 2'-O-methyladenosine-3'-phosphorothioate
  modified_base 2: mod_base = OTHER; note = 2'-O-methyladenosine-3'-phosphorothioate
  modified_base 3: mod_base = OTHER; note = 2'-O-methyluridine-3'-phosphate
  modified_base 4: mod_base = OTHER; note = 2'-O-methylguanosine-3'-phosphate
  modified_base 5: mod_base = OTHER; note = 2'-O-methylguanosine-3'-phosphate
  modified_base 6: mod_base = OTHER; note = 2'-O-methyladenosine-3'-phosphate
  modified_base 7: mod_base = OTHER; note = 2'-fluoroguanosine-3'-phosphate
  modified_base 8: mod_base = OTHER; note = 2'-O-methyluridine-3'-phosphate
  modified_base 9: mod_base = OTHER; note = 2'-fluoroadenosine-3'-phosphate
  modified_base 10: mod_base = OTHER; note = 2'-fluoroadenosine-3'-phosphate
  modified_base 11: mod_base = OTHER; note = 2'-fluorouridine-3'-phosphate
  modified_base 12: mod_base = OTHER; note = 2'-O-methylguanosine-3'-phosphate
  modified_base 13: mod_base = OTHER; note = 2'-O-methyladenosine-3'-phosphate
  modified_base 14: mod_base = OTHER; note = 2'-O-methyladenosine-3'-phosphate
  modified_base 15: mod_base = OTHER; note = 2'-O-methyladenosine-3'-phosphate
  modified_base 16: mod_base = OTHER; note = 2'-O-methyladenosine-3'-phosphate
  modified_base 17: mod_base = OTHER; note = 2'-O-methyluridine-3'-phosphate
  modified_base 18: mod_base = OTHER; note = 2'-O-methylguanosine-3'-phosphate
  modified_base 19: mod_base = OTHER; note = 2'-O-methyladenosine-3'-phosphorothioate
  modified_base 20: mod_base = OTHER; note = 2'-O-methyluridine-3'-phosphorothioate
  modified_base 21: mod_base = OTHER; note = 2'-O-methyladenosine-3'-phosphate
aatggagtaatgaaaatgata

SEQ ID NO: 4694 - RNA, 21 nt, synthetic construct
  source 1..21: mol_type = other RNA
  modified_base 1: mod_base = OTHER; note = 2'-O-methyladenosine-3'-phosphorothioate
  modified_base 2: mod_base = OTHER; note = 2'-O-methylcytidine-3'-phosphorothioate
  modified_base 3: mod_base = OTHER; note = 2'-O-methyluridine-3'-phosphate
  modified_base 4: mod_base = OTHER; note = 2'-O-methylguanosine-3'-phosphate
  modified_base 5: mod_base = OTHER; note = 2'-O-methylguanosine-3'-phosphate
  modified_base 6: mod_base = OTHER; note = 2'-O-methyluridine-3'-phosphate
  modified_base 7: mod_base = OTHER; note = 2'-fluorouridine-3'-phosphate
  modified_base 8: mod_base = OTHER; note = 2'-O-methyluridine-3'-phosphate
  modified_base 9: mod_base = OTHER; note = 2'-fluoroadenosine-3'-phosphate
  modified_base 10: mod_base = OTHER; note = 2'-fluorouridine-3'-phosphate
  modified_base 11: mod_base = OTHER; note = 2'-fluorouridine-3'-phosphate
  modified_base 12: mod_base = OTHER; note = 2'-O-methylguanosine-3'-phosphate
  modified_base 13: mod_base = OTHER; note = 2'-O-methylguanosine-3'-phosphate
  modified_base 14: mod_base = OTHER; note = 2'-O-methyladenosine-3'-phosphate
  modified_base 15: mod_base = OTHER; note = 2'-O-methyladenosine-3'-phosphate
  modified_base 16: mod_base = OTHER; note = 2'-O-methyladenosine-3'-phosphate
  modified_base 17: mod_base = OTHER; note = 2'-O-methyluridine-3'-phosphate
  modified_base 18: mod_base = OTHER; note = 2'-O-methyladenosine-3'-phosphate
  modified_base 19: mod_base = OTHER; note = 2'-O-methyluridine-3'-phosphorothioate
  modified_base 20: mod_base = OTHER; note = 2'-O-methyluridine-3'-phosphorothioate
  modified_base 21: mod_base = OTHER; note = 2'-O-methyladenosine-3'-phosphate
actggtttattggaaatatta

SEQ ID NO: 4695 - RNA, 21 nt, synthetic construct
  source 1..21: mol_type = other RNA
  modified_base 1: mod_base = OTHER; note = 2'-O-methylcytidine-3'-phosphorothioate
  modified_base 2: mod_base = OTHER; note = 2'-O-methyladenosine-3'-phosphorothioate
  modified_base 3: mod_base = OTHER; note = 2'-O-methyladenosine-3'-phosphate
  modified_base 4: mod_base = OTHER; note = 2'-O-methylguanosine-3'-phosphate
  modified_base 5: mod_base = OTHER; note = 2'-O-methyluridine-3'-phosphate
  modified_base 6: mod_base = OTHER; note = 2'-O-methylguanosine-3'-phosphate
  modified_base 7: mod_base = OTHER; note = 2'-fluorouridine-3'-phosphate
  modified_base 8: mod_base = OTHER; note = 2'-O-methyladenosine-3'-phosphate
  modified_base 9: mod_base = OTHER; note = 2'-fluorouridine-3'-phosphate
  modified_base 10: mod_base = OTHER; note = 2'-fluoroguanosine-3'-phosphate
  modified_base 11: mod_base = OTHER; note = 2'-fluorouridine-3'-phosphate
  modified_base 12: mod_base = OTHER; note = 2'-O-methylguanosine-3'-phosphate
  modified_base 13: mod_base = OTHER; note = 2'-O-methyluridine-3'-phosphate
  modified_base 14: mod_base = OTHER; note = 2'-O-methyladenosine-3'-phosphate
  modified_base 15: mod_base = OTHER; note = 2'-O-methyluridine-3'-phosphate
  modified_base 16: mod_base = OTHER; note = 2'-O-methyladenosine-3'-phosphate
  modified_base 17: mod_base = OTHER; note = 2'-O-methyladenosine-3'-phosphate
  modified_base 18: mod_base = OTHER; note = 2'-O-methyladenosine-3'-phosphate
  modified_base 19: mod_base = OTHER; note = 2'-O-methylguanosine-3'-phosphorothioate
  modified_base 20: mod_base = OTHER; note = 2'-O-methyluridine-3'-phosphorothioate
  modified_base 21: mod_base = OTHER; note = 2'-O-methyladenosine-3'-phosphate
caagtgtatgtgtataaagta

SEQ ID NO: 4696 - RNA, 21 nt, synthetic construct
  source 1..21: mol_type = other RNA
  modified_base 1: mod_base = OTHER; note = 2'-O-methyluridine-3'-phosphorothioate
  modified_base 2: mod_base = OTHER; note = 2'-O-methyladenosine-3'-phosphorothioate
  modified_base 3: mod_base = OTHER; note = 2'-O-methylcytidine-3'-phosphate
  modified_base 4: mod_base = OTHER; note = 2'-O-methyladenosine-3'-phosphate
  modified_base 5: mod_base = OTHER; note = 2'-O-methyladenosine-3'-phosphate
  modified_base 6: mod_base = OTHER; note = 2'-O-methylguanosine-3'-phosphate
  modified_base 7: mod_base = OTHER; note = 2'-fluorocytidine-3'-phosphate
  modified_base 8: mod_base = OTHER; note = 2'-O-methyladenosine-3'-phosphate
  modified_base 9: mod_base = OTHER; note = 2'-fluorouridine-3'-phosphate
  modified_base 10: mod_base = OTHER; note = 2'-fluoroguanosine-3'-phosphate
  modified_base 11: mod_base = OTHER; note = 2'-fluorocytidine-3'-phosphate
  modified_base 12: mod_base = OTHER; note = 2'-O-methyladenosine-3'-phosphate
  modified_base 13: mod_base = OTHER; note = 2'-O-methyluridine-3'-phosphate
  modified_base 14: mod_base = OTHER; note = 2'-O-methyladenosine-3'-phosphate
  modified_base 15: mod_base = OTHER; note = 2'-O-methyluridine-3'-phosphate
  modified_base 16: mod_base = OTHER; note = 2'-O-methyluridine-3'-phosphate
  modified_base 17: mod_base = OTHER; note = 2'-O-methylguanosine-3'-phosphate
  modified_base 18: mod_base = OTHER; note = 2'-O-methyladenosine-3'-phosphate
  modified_base 19: mod_base = OTHER; note = 2'-O-methylguanosine-3'-phosphorothioate
  modified_base 20: mod_base = OTHER; note = 2'-O-methyladenosine-3'-phosphorothioate
  modified_base 21: mod_base = OTHER; note = 2'-O-methyladenosine-3'-phosphate
tacaagcatgcatattgagaa

SEQ ID NO: 4697 - RNA, 21 nt, synthetic construct
  source 1..21: mol_type = other RNA
  modified_base 1: mod_base = OTHER; note = 2'-O-methyluridine-3'-phosphorothioate
  modified_base 2: mod_base = OTHER; note = 2'-O-methylguanosine-3'-phosphorothioate
  modified_base 3: mod_base = OTHER; note = 2'-O-methyluridine-3'-phosphate
  modified_base 4: mod_base = OTHER; note = 2'-O-methylguanosine-3'-phosphate
  modified_base 5: mod_base = OTHER; note = 2'-O-methyluridine-3'-phosphate
  modified_base 6: mod_base = OTHER; note = 2'-O-methylcytidine-3'-phosphate
  modified_base 7: mod_base = OTHER; note = 2'-fluorouridine-3'-phosphate
  modified_base 8: mod_base = OTHER; note = 2'-O-methyluridine-3'-phosphate
  modified_base 9: mod_base = OTHER; note = 2'-fluorouridine-3'-phosphate
  modified_base 10: mod_base = OTHER; note = 2'-fluorouridine-3'-phosphate
  modified_base 11: mod_base = OTHER; note = 2'-fluoroadenosine-3'-phosphate
  modified_base 12: mod_base = OTHER; note = 2'-O-methyluridine-3'-phosphate
  modified_base 13: mod_base = OTHER; note = 2'-O-methylguanosine-3'-phosphate
  modified_base 14: mod_base = OTHER; note = 2'-O-methyluridine-3'-phosphate
  modified_base 15: mod_base = OTHER; note = 2'-O-methylcytidine-3'-phosphate
  modified_base 16: mod_base = OTHER; note = 2'-O-methyluridine-3'-phosphate
  modified_base 17: mod_base = OTHER; note = 2'-O-methyluridine-3'-phosphate
  modified_base 18: mod_base = OTHER; note = 2'-O-methyluridine-3'-phosphate
  modified_base 19: mod_base = OTHER; note = 2'-O-methylguanosine-3'-phosphorothioate
  modified_base 20: mod_base = OTHER; note = 2'-O-methyladenosine-3'-phosphorothioate
  modified_base 21: mod_base = OTHER; note = 2'-O-methyladenosine-3'-phosphate
tgtgtcttttatgtctttgaa

SEQ ID NO: 4698 - RNA, 21 nt, synthetic construct
  source 1..21: mol_type = other RNA
  modified_base 1: mod_base = OTHER; note = 2'-O-methyladenosine-3'-phosphorothioate
  modified_base 2: mod_base = OTHER; note = 2'-O-methyluridine-3'-phosphorothioate
  modified_base 3: mod_base = OTHER; note = 2'-O-methyluridine-3'-phosphate
  modified_base 4: mod_base = OTHER; note = 2'-O-methyluridine-3'-phosphate
  modified_base 5: mod_base = OTHER; note = 2'-O-methyluridine-3'-phosphate
  modified_base 6: mod_base = OTHER; note = 2'-O-methylcytidine-3'-phosphate
  modified_base 7: mod_base = OTHER; note = 2'-fluorouridine-3'-phosphate
  modified_base 8: mod_base = OTHER; note = 2'-O-methylcytidine-3'-phosphate
  modified_base 9: mod_base = OTHER; note = 2'-fluoroguanosine-3'-phosphate
  modified_base 10: mod_base = OTHER; note = 2'-fluorocytidine-3'-phosphate
  modified_base 11: mod_base = OTHER; note = 2'-fluoroadenosine-3'-phosphate
  modified_base 12: mod_base = OTHER; note = 2'-O-methylguanosine-3'-phosphate
  modified_base 13: mod_base = OTHER; note = 2'-O-methyladenosine-3'-phosphate
  modified_base 14: mod_base = OTHER; note = 2'-O-methyladenosine-3'-phosphate
  modified_base 15: mod_base = OTHER; note = 2'-O-methyluridine-3'-phosphate
  modified_base 16: mod_base = OTHER; note = 2'-O-methyluridine-3'-phosphate
  modified_base 17: mod_base = OTHER; note = 2'-O-methylcytidine-3'-phosphate
  modified_base 18: mod_base = OTHER; note = 2'-O-methyladenosine-3'-phosphate
  modified_base 19: mod_base = OTHER; note = 2'-O-methyladenosine-3'-phosphorothioate
  modified_base 20: mod_base = OTHER; note = 2'-O-methyluridine-3'-phosphorothioate
  modified_base 21: mod_base = OTHER; note = 2'-O-methyladenosine-3'-phosphate
attttctcgcagaattcaata

SEQ ID NO: 4699 - RNA, 21 nt, synthetic construct
  source 1..21: mol_type = other RNA
  modified_base 1: mod_base = OTHER; note = 2'-O-methyluridine-3'-phosphorothioate
  modified_base 2: mod_base = OTHER; note = 2'-O-methyladenosine-3'-phosphorothioate
  modified_base 3: mod_base = OTHER; note = 2'-O-methylguanosine-3'-phosphate
  modified_base 4: mod_base = OTHER; note = 2'-O-methylcytidine-3'-phosphate
  modified_base 5: mod_base = OTHER; note = 2'-O-methylguanosine-3'-phosphate
  modified_base 6: mod_base = OTHER; note = 2'-O-methyladenosine-3'-phosphate
  modified_base 7: mod_base = OTHER; note = 2'-fluorocytidine-3'-phosphate
  modified_base 8: mod_base = OTHER; note = 2'-O-methyladenosine-3'-phosphate
  modified_base 9: mod_base = OTHER; note = 2'-fluoroguanosine-3'-phosphate
  modified_base 10: mod_base = OTHER; note = 2'-fluorouridine-3'-phosphate
  modified_base 11: mod_base = OTHER; note = 2'-fluorouridine-3'-phosphate
  modified_base 12: mod_base = OTHER; note = 2'-O-methyluridine-3'-phosphate
  modified_base 13: mod_base = OTHER; note = 2'-O-methylguanosine-3'-phosphate
  modified_base 14: mod_base = OTHER; note = 2'-O-methyladenosine-3'-phosphate
  modified_base 15: mod_base = OTHER; note = 2'-O-methylguanosine-3'-phosphate
  modified_base 16: mod_base = OTHER; note = 2'-O-methyluridine-3'-phosphate
  modified_base 17: mod_base = OTHER; note = 2'-O-methyladenosine-3'-phosphate
  modified_base 18: mod_base = OTHER; note = 2'-O-methyladenosine-3'-phosphate
  modified_base 19: mod_base = OTHER; note = 2'-O-methyladenosine-3'-phosphorothioate
  modified_base 20: mod_base = OTHER; note = 2'-O-methyladenosine-3'-phosphorothioate
  modified_base 21: mod_base = OTHER; note = 2'-O-methyladenosine-3'-phosphate
tagcgacagtttgagtaaaaa

SEQ ID NO: 4700 - RNA, 21 nt, synthetic construct
  source 1..21: mol_type = other RNA
  modified_base 1: mod_base = OTHER; note = 2'-O-methylcytidine-3'-phosphorothioate
  modified_base 2: mod_base = OTHER; note = 2'-O-methyluridine-3'-phosphorothioate
  modified_base 3: mod_base = OTHER; note = 2'-O-methylguanosine-3'-phosphate
  modified_base 4: mod_base = OTHER; note = 2'-O-methylguanosine-3'-phosphate
  modified_base 5: mod_base = OTHER; note = 2'-O-methyluridine-3'-phosphate
  modified_base 6: mod_base = OTHER; note = 2'-O-methylguanosine-3'-phosphate
  modified_base 7: mod_base = OTHER; note = 2'-fluorouridine-3'-phosphate
  modified_base 8: mod_base = OTHER; note = 2'-O-methyladenosine-3'-phosphate
  modified_base 9: mod_base = OTHER; note = 2'-fluorouridine-3'-phosphate
  modified_base 10: mod_base = OTHER; note = 2'-fluoroguanosine-3'-phosphate
  modified_base 11: mod_base = OTHER; note = 2'-fluoroadenosine-3'-phosphate
  modified_base 12: mod_base = OTHER; note = 2'-O-methyladenosine-3'-phosphate
  modified_base 13: mod_base = OTHER; note = 2'-O-methyluridine-3'-phosphate
  modified_base 14: mod_base = OTHER; note = 2'-O-methyladenosine-3'-phosphate
  modified_base 15: mod_base = OTHER; note = 2'-O-methylcytidine-3'-phosphate
  modified_base 16: mod_base = OTHER; note = 2'-O-methyluridine-3'-phosphate
  modified_base 17: mod_base = OTHER; note = 2'-O-methyluridine-3'-phosphate
  modified_base 18: mod_base = OTHER; note = 2'-O-methyluridine-3'-phosphate
  modified_base 19: mod_base = OTHER; note = 2'-O-methylguanosine-3'-phosphorothioate
  modified_base 20: mod_base = OTHER; note = 2'-O-methyluridine-3'-phosphorothioate
  modified_base 21: mod_base = OTHER; note = 2'-O-methyladenosine-3'-phosphate
ctggtgtatgaatactttgta

SEQ ID NO: 4701 - RNA, 21 nt, synthetic construct
  source 1..21: mol_type = other RNA
  modified_base 1: mod_base = OTHER; note = 2'-O-methylguanosine-3'-phosphorothioate
  modified_base 2: mod_base = OTHER; note = 2'-O-methyluridine-3'-phosphorothioate
  modified_base 3: mod_base = OTHER; note = 2'-O-methylguanosine-3'-phosphate
  modified_base 4: mod_base = OTHER; note = 2'-O-methyladenosine-3'-phosphate
  modified_base 5: mod_base = OTHER; note = 2'-O-methyluridine-3'-phosphate
  modified_base 6: mod_base = OTHER; note = 2'-O-methyladenosine-3'-phosphate
  modified_base 7: mod_base = OTHER; note = 2'-fluoroadenosine-3'-phosphate
  modified_base 8: mod_base = OTHER; note = 2'-O-methylguanosine-3'-phosphate
  modified_base 9: mod_base = OTHER; note = 2'-fluorouridine-3'-phosphate
  modified_base 10: mod_base = OTHER; note = 2'-fluoroguanosine-3'-phosphate
  modified_base 11: mod_base = OTHER; note = 2'-fluoroguanosine-3'-phosphate
  modified_base 12: mod_base = OTHER; note = 2'-O-methylcytidine-3'-phosphate
  modified_base 13: mod_base = OTHER; note = 2'-O-methyluridine-3'-phosphate
  modified_base 14: mod_base = OTHER; note = 2'-O-methyladenosine-3'-phosphate
  modified_base 15: mod_base = OTHER; note = 2'-O-methyladenosine-3'-phosphate
  modified_base 16: mod_base = OTHER; note = 2'-O-methylcytidine-3'-phosphate
  modified_base 17: mod_base = OTHER; note = 2'-O-methyladenosine-3'-phosphate
  modified_base 18: mod_base = OTHER; note = 2'-O-methylguanosine-3'-phosphate
  modified_base 19: mod_base = OTHER; note = 2'-O-methyladenosine-3'-phosphorothioate
  modified_base 20: mod_base = OTHER; note = 2'-O-methyladenosine-3'-phosphorothioate
  modified_base 21: mod_base = OTHER; note = 2'-O-methyladenosine-3'-phosphate
gtgataagtggctaacagaaa

SEQ ID NO: 4702 - RNA, 21 nt, synthetic construct
  source 1..21: mol_type = other RNA
  modified_base 1: mod_base = OTHER; note = 2'-O-methylguanosine-3'-phosphorothioate
  modified_base 2: mod_base = OTHER; note = 2'-O-methyluridine-3'-phosphorothioate
  modified_base 3: mod_base = OTHER; note = 2'-O-methyladenosine-3'-phosphate
  modified_base 4: mod_base = OTHER; note = 2'-O-methylguanosine-3'-phosphate
  modified_base 5: mod_base = OTHER; note = 2'-O-methylguanosine-3'-phosphate
  modified_base 6: mod_base = OTHER; note = 2'-O-methylcytidine-3'-phosphate
  modified_base 7: mod_base = OTHER; note = 2'-fluorouridine-3'-phosphate
  modified_base 8: mod_base = OTHER; note = 2'-O-methyladenosine-3'-phosphate
  modified_base 9: mod_base = OTHER; note = 2'-fluoroadenosine-3'-phosphate
  modified_base 10: mod_base = OTHER; note = 2'-fluorouridine-3'-phosphate
  modified_base 11: mod_base = OTHER; note = 2'-fluoroadenosine-3'-phosphate
  modified_base 12: mod_base = OTHER; note = 2'-O-methyluridine-3'-phosphate
  modified_base 13: mod_base = OTHER; note = 2'-O-methyluridine-3'-phosphate
  modified_base 14: mod_base = OTHER; note = 2'-O-methyluridine-3'-phosphate
  modified_base 15: mod_base = OTHER; note = 2'-O-methyluridine-3'-phosphate
  modified_base 16: mod_base = OTHER; note = 2'-O-methylcytidine-3'-phosphate
  modified_base 17: mod_base = OTHER; note = 2'-O-methyluridine-3'-phosphate
  modified_base 18: mod_base = OTHER; note = 2'-O-methyladenosine-3'-phosphate
  modified_base 19: mod_base = OTHER; note = 2'-O-methyluridine-3'-phosphorothioate
  modified_base 20: mod_base = OTHER; note = 2'-O-methyluridine-3'-phosphorothioate
  modified_base 21: mod_base = OTHER; note = 2'-O-methyladenosine-3'-phosphate
gtaggctaatattttctatta

SEQ ID NO: 4703 - RNA, 21 nt, synthetic construct
  source 1..21: mol_type = other RNA
  modified_base 1: mod_base = OTHER; note = 2'-O-methylcytidine-3'-phosphorothioate
  modified_base 2: mod_base = OTHER; note = 2'-O-methylcytidine-3'-phosphorothioate
  modified_base 3: mod_base = OTHER; note = 2'-O-methyluridine-3'-phosphate
  modified_base 4: mod_base = OTHER; note = 2'-O-methylcytidine-3'-phosphate
  modified_base 5: mod_base = OTHER; note = 2'-O-methyluridine-3'-phosphate
  modified_base 6: mod_base = OTHER; note = 2'-O-methyluridine-3'-phosphate
  modified_base 7: mod_base = OTHER; note = 2'-fluorocytidine-3'-phosphate
  modified_base 8: mod_base = OTHER; note = 2'-O-methyladenosine-3'-phosphate
  modified_base 9: mod_base = OTHER; note = 2'-fluorouridine-3'-phosphate
  modified_base 10: mod_base = OTHER; note = 2'-fluorocytidine-3'-phosphate
  modified_base 11: mod_base = OTHER; note = 2'-fluorocytidine-3'-phosphate
  modified_base 12: mod_base = OTHER; note = 2'-O-methyluridine-3'-phosphate
  modified_base 13: mod_base = OTHER; note = 2'-O-methylcytidine-3'-phosphate
  modified_base 14: mod_base = OTHER; note = 2'-O-methylguanosine-3'-phosphate
  modified_base 15: mod_base = OTHER; note = 2'-O-methyladenosine-3'-phosphate
  modified_base 16: mod_base = OTHER; note = 2'-O-methylcytidine-3'-phosphate
  modified_base 17: mod_base = OTHER; note = 2'-O-methyluridine-3'-phosphate
  modified_base 18: mod_base = OTHER; note = 2'-O-methylguanosine-3'-phosphate
  modified_base 19: mod_base = OTHER; note = 2'-O-methyluridine-3'-phosphorothioate
  modified_base 20: mod_base = OTHER; note = 2'-O-methylcytidine-3'-phosphorothioate
  modified_base 21: mod_base = OTHER; note = 2'-O-methyladenosine-3'-phosphate
cctcttcatcctcgactgtca

SEQ ID NO: 4704 - RNA, 21 nt, synthetic construct
  source 1..21: mol_type = other RNA
  modified_base 1: mod_base = OTHER; note = 2'-O-methyladenosine-3'-phosphorothioate
  modified_base 2: mod_base = OTHER; note = 2'-O-methyladenosine-3'-phosphorothioate
  modified_base 3: mod_base = OTHER; note = 2'-O-methyluridine-3'-phosphate
  modified_base 4: mod_base = OTHER; note = 2'-O-methyluridine-3'-phosphate
  modified_base 5: mod_base = OTHER; note = 2'-O-methylguanosine-3'-phosphate
  modified_base 6: mod_base = OTHER; note = 2'-O-methylcytidine-3'-phosphate
  modified_base 7: mod_base = OTHER; note = 2'-fluorocytidine-3'-phosphate
  modified_base 8: mod_base = OTHER; note = 2'-O-methyladenosine-3'-phosphate
  modified_base 9: mod_base = OTHER; note = 2'-fluorouridine-3'-phosphate
  modified_base 10: mod_base = OTHER; note = 2'-fluoroadenosine-3'-phosphate
  modified_base 11: mod_base = OTHER; note = 2'-fluoroadenosine-3'-phosphate
  modified_base 12: mod_base = OTHER; note = 2'-O-methylguanosine-3'-phosphate
  modified_base 13: mod_base = OTHER; note = 2'-O-methylcytidine-3'-phosphate
  modified_base 14: mod_base = OTHER; note = 2'-O-methylcytidine-3'-phosphate
  modified_base 15: mod_base = OTHER; note = 2'-O-methyladenosine-3'-phosphate
  modified_base 16: mod_base = OTHER; note = 2'-O-methyluridine-3'-phosphate
  modified_base 17: mod_base = OTHER; note = 2'-O-methyladenosine-3'-phosphate
  modified_base 18: mod_base = OTHER; note = 2'-O-methyluridine-3'-phosphate
  modified_base 19: mod_base = OTHER; note = 2'-O-methyluridine-3'-phosphorothioate
  modified_base 20: mod_base = OTHER; note = 2'-O-methyladenosine-3'-phosphorothioate
  modified_base 21: mod_base = OTHER; note = 2'-O-methyladenosine-3'-phosphate
aattgccataagccatattaa

SEQ ID NO: 4705 - RNA, 21 nt, synthetic construct
  source 1..21: mol_type = other RNA
  modified_base 1: mod_base = OTHER; note = 2'-O-methylguanosine-3'-phosphorothioate
  modified_base 2: mod_base = OTHER; note = 2'-O-methylcytidine-3'-phosphorothioate
  modified_base 3: mod_base = OTHER; note = 2'-O-methylguanosine-3'-phosphate
  modified_base 4: mod_base = OTHER; note = 2'-O-methyladenosine-3'-phosphate
  modified_base 5: mod_base = OTHER; note = 2'-O-methyladenosine-3'-phosphate
  modified_base 6: mod_base = OTHER; note = 2'-O-methyluridine-3'-phosphate
  modified_base 7: mod_base = OTHER; note = 2'-fluoroadenosine-3'-phosphate
  modified_base 8: mod_base = OTHER; note = 2'-O-methyluridine-3'-phosphate
  modified_base 9: mod_base = OTHER; note = 2'-fluorouridine-3'-phosphate
  modified_base 10: mod_base = OTHER; note = 2'-fluorouridine-3'-phosphate
  modified_base 11: mod_base = OTHER; note = 2'-fluorouridine-3'-phosphate
  modified_base 12: mod_base = OTHER; note = 2'-O-methylguanosine-3'-phosphate
  modified_base 13: mod_base = OTHER; note = 2'-O-methyluridine-3'-phosphate
  modified_base 14: mod_base = OTHER; note = 2'-O-methylcytidine-3'-phosphate
  modified_base 15: mod_base = OTHER; note = 2'-O-methyladenosine-3'-phosphate
  modified_base 16: mod_base = OTHER; note = 2'-O-methylguanosine-3'-phosphate
  modified_base 17: mod_base = OTHER; note = 2'-O-methylcytidine-3'-phosphate
  modified_base 18: mod_base = OTHER; note = 2'-O-methyluridine-3'-phosphate
  modified_base 19: mod_base = OTHER; note = 2'-O-methyladenosine-3'-phosphorothioate
  modified_base 20: mod_base = OTHER; note = 2'-O-methyladenosine-3'-phosphorothioate
  modified_base 21: mod_base = OTHER; note = 2'-O-methyladenosine-3'-phosphate
gcgaatattttgtcagctaaa

SEQ ID NO: 4706 - RNA, 21 nt, synthetic construct
  source 1..21: mol_type = other RNA
  modified_base 1: mod_base = OTHER; note = 2'-O-methyladenosine-3'-phosphorothioate
  modified_base 2: mod_base = OTHER; note = 2'-O-methyluridine-3'-phosphorothioate
  modified_base 3: mod_base = OTHER; note = 2'-O-methylcytidine-3'-phosphate
  modified_base 4: mod_base = OTHER; note = 2'-O-methylcytidine-3'-phosphate
  modified_base 5: mod_base = OTHER; note = 2'-O-methyladenosine-3'-phosphate
  modified_base 6: mod_base = OTHER; note = 2'-O-methylguanosine-3'-phosphate
  modified_base 7: mod_base = OTHER; note = 2'-fluorouridine-3'-phosphate
  modified_base 8: mod_base = OTHER; note = 2'-O-methylguanosine-3'-phosphate
  modified_base 9: mod_base = OTHER; note = 2'-fluorouridine-3'-phosphate
  modified_base 10: mod_base = OTHER; note = 2'-fluorouridine-3'-phosphate
  modified_base 11: mod_base = OTHER; note = 2'-fluoroguanosine-3'-phosphate
  modified_base 12: mod_base = OTHER; note = 2'-O-methylcytidine-3'-phosphate
  modified_base 13: mod_base = OTHER; note = 2'-O-methylcytidine-3'-phosphate
  modified_base 14: mod_base = OTHER; note = 2'-O-methyluridine-3'-phosphate
  modified_base 15: mod_base = OTHER; note = 2'-O-methyluridine-3'-phosphate
  modified_base 16: mod_base = OTHER; note = 2'-O-methyluridine-3'-phosphate
  modified_base 17: mod_base = OTHER; note = 2'-O-methylcytidine-3'-phosphate
  modified_base 18: mod_base = OTHER; note = 2'-O-methyluridine-3'-phosphate
  modified_base 19: mod_base = OTHER; note = 2'-O-methylguanosine-3'-phosphorothioate
  modified_base 20: mod_base = OTHER; note = 2'-O-methyladenosine-3'-phosphorothioate
  modified_base 21: mod_base = OTHER; note = 2'-O-methyladenosine-3'-phosphate
atccagtgttgcctttctgaa

SEQ ID NO: 4707 - RNA, 21 nt, synthetic construct
  source 1..21: mol_type = other RNA
  modified_base 1: mod_base = OTHER; note = 2'-O-methyladenosine-3'-phosphorothioate
  modified_base 2: mod_base = OTHER; note = 2'-O-methyladenosine-3'-phosphorothioate
  modified_base 3: mod_base = OTHER; note = 2'-O-methyladenosine-3'-phosphate
  modified_base 4: mod_base = OTHER; note = 2'-O-methylguanosine-3'-phosphate
  modified_base 5: mod_base = OTHER; note = 2'-O-methyluridine-3'-phosphate
  modified_base 6: mod_base = OTHER; note = 2'-O-methylcytidine-3'-phosphate
  modified_base 7: mod_base = OTHER; note = 2'-fluorouridine-3'-phosphate
  modified_base 8: mod_base = OTHER; note = 2'-O-methyladenosine-3'-phosphate
  modified_base 9: mod_base = OTHER; note = 2'-fluorouridine-3'-phosphate
  modified_base 10: mod_base = OTHER; note = 2'-fluoroguanosine-3'-phosphate
  modified_base 11: mod_base = OTHER; note = 2'-fluorocytidine-3'-phosphate
  modified_base 12: mod_base = OTHER; note = 2'-O-methylcytidine-3'-phosphate
  modified_base 13: mod_base = OTHER; note = 2'-O-methyluridine-3'-phosphate
  modified_base 14: mod_base = OTHER; note = 2'-O-methylguanosine-3'-phosphate
  modified_base 15: mod_base = OTHER; note = 2'-O-methyluridine-3'-phosphate
  modified_base 16: mod_base = OTHER; note = 2'-O-methylcytidine-3'-phosphate
  modified_base 17: mod_base = OTHER; note = 2'-O-methyluridine-3'-phosphate
  modified_base 18: mod_base = OTHER; note = 2'-O-methyladenosine-3'-phosphate
  modified_base 19: mod_base = OTHER; note = 2'-O-methyladenosine-3'-phosphorothioate
  modified_base 20: mod_base = OTHER; note = 2'-O-methyladenosine-3'-phosphorothioate
  modified_base 21: mod_base = OTHER; note = 2'-O-methyladenosine-3'-phosphate
aaagtctatgcctgtctaaaa

SEQ ID NO: 4708 - RNA, 21 nt, synthetic construct
  source 1..21: mol_type = other RNA
  modified_base 1: mod_base = OTHER; note = 2'-O-methylguanosine-3'-phosphorothioate
  modified_base 2: mod_base = OTHER; note = 2'-O-methylguanosine-3'-phosphorothioate
  modified_base 3: mod_base = OTHER; note = 2'-O-methyladenosine-3'-phosphate
  modified_base 4: mod_base = OTHER; note = 2'-O-methylcytidine-3'-phosphate
  modified_base 5: mod_base = OTHER; note = 2'-O-methyladenosine-3'-phosphate
  modified_base 6: mod_base = OTHER; note = 2'-O-methyluridine-3'-phosphate
  modified_base 7: mod_base = OTHER; note = 2'-fluorocytidine-3'-phosphate
  modified_base 8: mod_base = OTHER; note = 2'-O-methyladenosine-3'-phosphate
  modified_base 9: mod_base = OTHER; note = 2'-fluoroguanosine-3'-phosphate
  modified_base 10: mod_base = OTHER; note = 2'-fluoroadenosine-3'-phosphate
  modified_base 11: mod_base = OTHER; note = 2'-fluoroadenosine-3'-phosphate
  modified_base 12: mod_base = OTHER; note = 2'-O-methylguanosine-3'-phosphate
  modified_base 13: mod_base = OTHER; note = 2'-O-methyluridine-3'-phosphate
  modified_base 14: mod_base = OTHER; note = 2'-O-methyluridine-3'-phosphate
  modified_base 15: mod_base = OTHER; note = 2'-O-methyluridine-3'-phosphate
  modified_base 16: mod_base = OTHER; note = 2'-O-methylguanosine-3'-phosphate
  modified_base 17: mod_base = OTHER; note = 2'-O-methyladenosine-3'-phosphate
  modified_base 18: mod_base = OTHER; note = 2'-O-methyladenosine-3'-phosphate
  modified_base 19: mod_base = OTHER; note = 2'-O-methyluridine-3'-phosphorothioate
  modified_base 20: mod_base = OTHER; note = 2'-O-methyluridine-3'-phosphorothioate
  modified_base 21: mod_base = OTHER; note = 2'-O-methyladenosine-3'-phosphate
ggacatcagaagtttgaatta

SEQ ID NO: 4709 - RNA, 21 nt, synthetic construct
  source 1..21: mol_type = other RNA
  modified_base 1: mod_base = OTHER; note = 2'-O-methylguanosine-3'-phosphorothioate
  modified_base 2: mod_base = OTHER; note = 2'-O-methylguanosine-3'-phosphorothioate
  modified_base 3: mod_base = OTHER; note = 2'-O-methylcytidine-3'-phosphate
  modified_base 4: mod_base = OTHER; note = 2'-O-methylguanosine-3'-phosphate
  modified_base 5: mod_base = OTHER; note = 2'-O-methyladenosine-3'-phosphate
  modified_base 6: mod_base = OTHER; note = 2'-O-methyladenosine-3'-phosphate
  modified_base 7: mod_base = OTHER; note = 2'-fluorouridine-3'-phosphate
  modified_base 8: mod_base = OTHER; note = 2'-O-methyluridine-3'-phosphate
  modified_base 9: mod_base = OTHER; note = 2'-fluoroguanosine-3'-phosphate
  modified_base 10: mod_base = OTHER; note = 2'-fluorocytidine-3'-phosphate
  modified_base 11: mod_base = OTHER; note = 2'-fluorouridine-3'-phosphate
  modified_base 12: mod_base = OTHER; note = 2'-O-methyluridine-3'-phosphate
  modified_base 13: mod_base = OTHER; note = 2'-O-methyladenosine-3'-phosphate
  modified_base 14: mod_base = OTHER; note = 2'-O-methyluridine-3'-phosphate
  modified_base 15: mod_base = OTHER; note = 2'-O-methyladenosine-3'-phosphate
  modified_base 16: mod_base = OTHER; note = 2'-O-methyluridine-3'-phosphate
  modified_base 17: mod_base = OTHER; note = 2'-O-methyluridine-3'-phosphate
  modified_base 18: mod_base = OTHER; note = 2'-O-methyluridine-3'-phosphate
  modified_base 19: mod_base = OTHER; note = 2'-O-methylcytidine-3'-phosphorothioate
  modified_base 20: mod_base = OTHER; note = 2'-O-methyluridine-3'-phosphorothioate
  modified_base 21: mod_base = OTHER; note = 2'-O-methyladenosine-3'-phosphate
ggcgaattgcttatatttcta

SEQ ID NO: 4710 - RNA, 21 nt, synthetic construct
  source 1..21: mol_type = other RNA
  modified_base 1: mod_base = OTHER; note = 2'-O-methylcytidine-3'-phosphorothioate
  modified_base 2: mod_base = OTHER; note = 2'-O-methyladenosine-3'-phosphorothioate
  modified_base 3: mod_base = OTHER; note = 2'-O-methylcytidine-3'-phosphate
  modified_base 4: mod_base = OTHER; note = 2'-O-methyladenosine-3'-phosphate
  modified_base 5: mod_base = OTHER; note = 2'-O-methylcytidine-3'-phosphate
  modified_base 6: mod_base = OTHER; note = 2'-O-methyluridine-3'-phosphate
  modified_base 7: mod_base = OTHER; note = 2'-fluoroadenosine-3'-phosphate
  modified_base 8: mod_base = OTHER; note = 2'-O-methyluridine-3'-phosphate
  modified_base 9: mod_base = OTHER; note = 2'-fluoroguanosine-3'-phosphate
  modified_base 10: mod_base = OTHER; note = 2'-fluorouridine-3'-phosphate
  modified_base 11: mod_base = OTHER; note = 2'-fluoroguanosine-3'-phosphate
  modified_base 12: mod_base = OTHER; note = 2'-O-methyluridine-3'-phosphate
  modified_base 13: mod_base = OTHER; note = 2'-O-methyladenosine-3'-phosphate
  modified_base 14: mod_base = OTHER; note = 2'-O-methyladenosine-3'-phosphate
  modified_base 15: mod_base = OTHER; note = 2'-O-methyladenosine-3'-phosphate
  modified_base 16: mod_base = OTHER; note = 2'-O-methylcytidine-3'-phosphate
  modified_base 17: mod_base = OTHER; note = 2'-O-methylcytidine-3'-phosphate
  modified_base 18: mod_base = OTHER; note = 2'-O-methyladenosine-3'-phosphate
  modified_base 19: mod_base = OTHER; note = 2'-O-methylguanosine-3'-phosphorothioate
  modified_base 20: mod_base = OTHER; note = 2'-O-methyluridine-3'-phosphorothioate
  modified_base 21: mod_base = OTHER; note = 2'-O-methyladenosine-3'-phosphate
cacactatgtgtaaaccagta

SEQ ID NO: 4711 - RNA, 21 nt, synthetic construct
  source 1..21: mol_type = other RNA
  modified_base 1: mod_base = OTHER; note = 2'-O-methylcytidine-3'-phosphorothioate
  modified_base 2: mod_base = OTHER; note = 2'-O-methyladenosine-3'-phosphorothioate
  modified_base 3: mod_base = OTHER; note = 2'-O-methylguanosine-3'-phosphate
  modified_base 4: mod_base = OTHER; note = 2'-O-methylguanosine-3'-phosphate
  modified_base 5: mod_base = OTHER; note = 2'-O-methyluridine-3'-phosphate
  modified_base 6: mod_base = OTHER; note = 2'-O-methylguanosine-3'-phosphate
  modified_base 7: mod_base = OTHER; note = 2'-fluoroadenosine-3'-phosphate
  modified_base 8: mod_base = OTHER; note = 2'-O-methyladenosine-3'-phosphate
  modified_base 9: mod_base = OTHER; note = 2'-fluoroguanosine-3'-phosphate
  modified_base 10: mod_base = OTHER; note = 2'-fluoroadenosine-3'-phosphate
  modified_base 11: mod_base = OTHER; note = 2'-fluoroadenosine-3'-phosphate
  modified_base 12: mod_base = OTHER; note = 2'-O-methylguanosine-3'-phosphate
  modified_base 13: mod_base = OTHER; note = 2'-O-methyladenosine-3'-phosphate
  modified_base 14: mod_base = OTHER; note = 2'-O-methyladenosine-3'-phosphate
  modified_base 15: mod_base = OTHER; note = 2'-O-methyladenosine-3'-phosphate
  modified_base 16: mod_base = OTHER; note = 2'-O-methyladenosine-3'-phosphate
  modified_base 17: mod_base = OTHER; note = 2'-O-methylcytidine-3'-phosphate
  modified_base 18: mod_base = OTHER; note = 2'-O-methyladenosine-3'-phosphate
  modified_base 19: mod_base = OTHER; note = 2'-O-methyluridine-3'-phosphorothioate
  modified_base 20: mod_base = OTHER; note = 2'-O-methyluridine-3'-phosphorothioate
  modified_base 21: mod_base = OTHER; note = 2'-O-methyladenosine-3'-phosphate
caggtgaagaagaaaacatta

SEQ ID NO: 4712 - RNA, 21 nt, synthetic construct
  source 1..21: mol_type = other RNA
  modified_base 1: mod_base = OTHER; note = 2'-O-methylguanosine-3'-phosphorothioate
  modified_base 2: mod_base = OTHER; note = 2'-O-methyluridine-3'-phosphorothioate
  modified_base 3: mod_base = OTHER; note = 2'-O-methylguanosine-3'-phosphate
  modified_base 4: mod_base = OTHER; note = 2'-O-methyladenosine-3'-phosphate
  modified_base 5: mod_base = OTHER; note = 2'-O-methylguanosine-3'-phosphate
  modified_base 6: mod_base = OTHER; note = 2'-O-methylcytidine-3'-phosphate
  modified_base 7: mod_base = OTHER; note = 2'-fluorouridine-3'-phosphate
  modified_base 8: mod_base = OTHER; note = 2'-O-methylcytidine-3'-phosphate
  modified_base 9: mod_base = OTHER; note = 2'-fluorouridine-3'-phosphate
  modified_base 10: mod_base = OTHER; note = 2'-fluorouridine-3'-phosphate
  modified_base 11: mod_base = OTHER; note = 2'-fluoroadenosine-3'-phosphate
  modified_base 12: mod_base = OTHER; note = 2'-O-methyluridine-3'-phosphate
  modified_base 13: mod_base = OTHER; note = 2'-O-methyluridine-3'-phosphate
  modified_base 14: mod_base = OTHER; note = 2'-O-methyluridine-3'-phosphate
  modified_base 15: mod_base = OTHER; note = 2'-O-methyluridine-3'-phosphate
  modified_base 16: mod_base = OTHER; note = 2'-O-methyluridine-3'-phosphate
  modified_base 17: mod_base = OTHER; note = 2'-O-methylcytidine-3'-phosphate
  modified_base 18: mod_base = OTHER; note = 2'-O-methyladenosine-3'-phosphate
  modified_base 19: mod_base = OTHER; note = 2'-O-methylcytidine-3'-phosphorothioate
  modified_base 20: mod_base = OTHER; note = 2'-O-methyluridine-3'-phosphorothioate
  modified_base 21: mod_base = OTHER; note = 2'-O-methyladenosine-3'-phosphate
gtgagctcttatttttcacta

SEQ ID NO: 4713 - RNA, 21 nt, synthetic construct
  source 1..21: mol_type = other RNA
  modified_base 1: mod_base = OTHER; note = 2'-O-methyladenosine-3'-phosphorothioate
  modified_base 2: mod_base = OTHER; note = 2'-O-methyladenosine-3'-phosphorothioate
  modified_base 3: mod_base = OTHER; note = 2'-O-methyladenosine-3'-phosphate
  modified_base 4: mod_base = OTHER; note = 2'-O-methylguanosine-3'-phosphate
  modified_base 5: mod_base = OTHER; note = 2'-O-methylcytidine-3'-phosphate
  modified_base 6: mod_base = OTHER; note = 2'-O-methyluridine-3'-phosphate
  modified_base 7: mod_base = OTHER; note = 2'-fluoroguanosine-3'-phosphate
  modified_base 8: mod_base = OTHER; note = 2'-O-methyladenosine-3'-phosphate
  modified_base 9: mod_base = OTHER; note = 2'-fluorouridine-3'-phosphate
  modified_base 10: mod_base = OTHER; note = 2'-fluoroguanosine-3'-phosphate
  modified_base 11: mod_base = OTHER; note = 2'-fluoroguanosine-3'-phosphate
  modified_base 12: mod_base = OTHER; note = 2'-O-methylguanosine-3'-phosphate
  modified_base 13: mod_base = OTHER; note = 2'-O-methyladenosine-3'-phosphate
  modified_base 14: mod_base = OTHER; note = 2'-O-methyladenosine-3'-phosphate
  modified_base 15: mod_base = OTHER; note = 2'-O-methyluridine-3'-phosphate
  modified_base 16: mod_base = OTHER; note = 2'-O-methyladenosine-3'-phosphate
  modified_base 17: mod_base = OTHER; note = 2'-O-methyladenosine-3'-phosphate
  modified_base 18: mod_base = OTHER; note = 2'-O-methyladenosine-3'-phosphate
  modified_base 19: mod_base = OTHER; note = 2'-O-methylcytidine-3'-phosphorothioate
  modified_base 20: mod_base = OTHER; note = 2'-O-methyluridine-3'-phosphorothioate
  modified_base 21: mod_base = OTHER; note = 2'-O-methyladenosine-3'-phosphate
aaagctgatgggaataaacta

SEQ ID NO: 4714 - RNA, 21 nt, synthetic construct
  source 1..21: mol_type = other RNA
  modified_base 1: mod_base = OTHER; note = 2'-O-methylguanosine-3'-phosphorothioate
  modified_base 2: mod_base = OTHER; note = 2'-O-methyluridine-3'-phosphorothioate
  modified_base 3: mod_base = OTHER; note = 2'-O-methylguanosine-3'-phosphate
  modified_base 4: mod_base = OTHER; note = 2'-O-methyluridine-3'-phosphate
  modified_base 5: mod_base = OTHER; note = 2'-O-methylcytidine-3'-phosphate
  modified_base 6: mod_base = OTHER; note = 2'-O-methylguanosine-3'-phosphate
  modified_base 7: mod_base = OTHER; note = 2'-fluorouridine-3'-phosphate
  modified_base 8: mod_base = OTHER; note = 2'-O-methyluridine-3'-phosphate
  modified_base 9: mod_base = OTHER; note = 2'-fluoroadenosine-3'-phosphate
  modified_base 10: mod_base = OTHER; note = 2'-fluoroguanosine-3'-phosphate
  modified_base 11: mod_base = OTHER; note = 2'-fluoroguanosine-3'-phosphate
  modified_base 12: mod_base = OTHER; note = 2'-O-methyladenosine-3'-phosphate
  modified_base 13: mod_base = OTHER; note = 2'-O-methylguanosine-3'-phosphate
  modified_base 14: mod_base = OTHER; note = 2'-O-methyladenosine-3'-phosphate
  modified_base 15: mod_base = OTHER; note = 2'-O-methyladenosine-3'-phosphate
  modified_base 16: mod_base = OTHER; note = 2'-O-methyladenosine-3'-phosphate
  modified_base 17: mod_base = OTHER; note = 2'-O-methylcytidine-3'-phosphate
  modified_base 18: mod_base = OTHER; note = 2'-O-methyluridine-3'-phosphate
  modified_base 19: mod_base = OTHER; note = 2'-O-methylguanosine-3'-phosphorothioate
  modified_base 20: mod_base = OTHER; note = 2'-O-methylcytidine-3'-phosphorothioate
  modified_base 21: mod_base = OTHER; note = 2'-O-methyladenosine-3'-phosphate
gtgtcgttaggagaaactgca

SEQ ID NO: 4715 - RNA, 21 nt, synthetic construct
  source 1..21: mol_type = other RNA
  modified_base 1: mod_base = OTHER; note = 2'-O-methylguanosine-3'-phosphorothioate
  modified_base 2: mod_base = OTHER; note = 2'-O-methylguanosine-3'-phosphorothioate
  modified_base 3: mod_base = OTHER; note = 2'-O-methylguanosine-3'-phosphate
  modified_base 4: mod_base = OTHER; note = 2'-O-methyladenosine-3'-phosphate
  modified_base 5: mod_base = OTHER; note = 2'-O-methylcytidine-3'-phosphate
  modified_base 6: mod_base = OTHER; note = 2'-O-methyluridine-3'-phosphate
  modified_base 7: mod_base = OTHER; note = 2'-fluorouridine-3'-phosphate
  modified_base 8: mod_base = OTHER; note = 2'-O-methyladenosine-3'-phosphate
  modified_base 9: mod_base = OTHER; note = 2'-fluoroadenosine-3'-phosphate
  modified_base 10: mod_base = OTHER; note = 2'-fluoroadenosine-3'-phosphate
  modified_base 11: mod_base = OTHER; note = 2'-fluoroadenosine-3'-phosphate
  modified_base 12: mod_base = OTHER; note = 2'-O-methylcytidine-3'-phosphate
  modified_base 13: mod_base = OTHER; note = 2'-O-methyladenosine-3'-phosphate
  modified_base 14: mod_base = OTHER; note = 2'-O-methyladenosine-3'-phosphate
  modified_base 15: mod_base = OTHER; note = 2'-O-methyluridine-3'-phosphate
  modified_base 16: mod_base = OTHER; note = 2'-O-methylguanosine-3'-phosphate
  modified_base 17: mod_base = OTHER; note = 2'-O-methylguanosine-3'-phosphate
  modified_base 18: mod_base = OTHER; note = 2'-O-methyluridine-3'-phosphate
  modified_base 19: mod_base = OTHER; note = 2'-O-methyladenosine-3'-phosphorothioate
  modified_base 20: mod_base = OTHER; note = 2'-O-methyluridine-3'-phosphorothioate
  modified_base 21: mod_base = OTHER; note = 2'-O-methyladenosine-3'-phosphate
gggacttaaaacaatggtata

SEQ ID NO: 4716 - RNA, 21 nt, synthetic construct
  source 1..21: mol_type = other RNA
  modified_base 1: mod_base = OTHER; note = 2'-O-methylcytidine-3'-phosphorothioate
  modified_base 2: mod_base = OTHER; note = 2'-O-methyluridine-3'-phosphorothioate
  modified_base 3: mod_base = OTHER; note = 2'-O-methylguanosine-3'-phosphate
  modified_base 4: mod_base = OTHER; note = 2'-O-methyladenosine-3'-phosphate
  modified_base 5: mod_base = OTHER; note = 2'-O-methyluridine-3'-phosphate
  modified_base 6: mod_base = OTHER; note = 2'-O-methylguanosine-3'-phosphate
  modified_base 7: mod_base = OTHER; note = 2'-fluoroguanosine-3'-phosphate
  modified_base 8: mod_base = OTHER; note = 2'-O-methyluridine-3'-phosphate
  modified_base 9: mod_base = OTHER; note = 2'-fluoroadenosine-3'-phosphate
  modified_base 10: mod_base = OTHER; note = 2'-fluoroguanosine-3'-phosphate
  modified_base 11: mod_base = OTHER; note = 2'-fluoroadenosine-3'-phosphate
  modified_base 12: mod_base = OTHER; note = 2'-O-methyladenosine-3'-phosphate
  modified_base 13: mod_base = OTHER; note = 2'-O-methyluridine-3'-phosphate
  modified_base 14: mod_base = OTHER; note = 2'-O-methyluridine-3'-phosphate
  modified_base 15: mod_base = OTHER; note = 2'-O-methyladenosine-3'-phosphate
  modified_base 16: mod_base = OTHER; note = 2'-O-methyladenosine-3'-phosphate
  modified_base 17: mod_base = OTHER; note = 2'-O-methylcytidine-3'-phosphate
  modified_base 18: mod_base = OTHER; note = 2'-O-methylcytidine-3'-phosphate
  modified_base 19: mod_base = OTHER; note = 2'-O-methyladenosine-3'-phosphorothioate
  modified_base 20: mod_base = OTHER; note = 2'-O-methyluridine-3'-phosphorothioate
  modified_base 21: mod_base = OTHER; note = 2'-O-methyladenosine-3'-phosphate
ctgatggtagaattaaccata

SEQ ID NO: 4717 - RNA, 21 nt, synthetic construct
  source 1..21: mol_type = other RNA
  modified_base 1: mod_base = OTHER; note = 2'-O-methyladenosine-3'-phosphorothioate
  modified_base 2: mod_base = OTHER; note = 2'-O-methylcytidine-3'-phosphorothioate
  modified_base 3: mod_base = OTHER; note = 2'-O-methyluridine-3'-phosphate
  modified_base 4: mod_base = OTHER; note = 2'-O-methyladenosine-3'-phosphate
  modified_base 5: mod_base = OTHER; note = 2'-O-methyluridine-3'-phosphate
  modified_base 6: mod_base = OTHER; note = 2'-O-methylguanosine-3'-phosphate
  modified_base 7: mod_base = OTHER; note = 2'-fluorouridine-3'-phosphate
  modified_base 8: mod_base = OTHER; note = 2'-O-methylguanosine-3'-phosphate
  modified_base 9: mod_base = OTHER; note = 2'-fluorouridine-3'-phosphate
  modified_base 10: mod_base = OTHER; note = 2'-fluoroguanosine-3'-phosphate
  modified_base 11: mod_base = OTHER; note = 2'-fluorouridine-3'-phosphate
  modified_base 12: mod_base = OTHER; note = 2'-O-methyluridine-3'-phosphate
  modified_base 13: mod_base = OTHER; note = 2'-O-methyluridine-3'-phosphate
  modified_base 14: mod_base = OTHER; note = 2'-O-methyluridine-3'-phosphate
  modified_base 15: mod_base = OTHER; note = 2'-O-methyladenosine-3'-phosphate
  modified_base 16: mod_base = OTHER; note = 2'-O-methyluridine-3'-phosphate
  modified_base 17: mod_base = OTHER; note = 2'-O-methyluridine-3'-phosphate
  modified_base 18: mod_base = OTHER; note = 2'-O-methyluridine-3'-phosphate
  modified_base 19: mod_base = OTHER; note = 2'-O-methylcytidine-3'-phosphorothioate
  modified_base 20: mod_base = OTHER; note = 2'-O-methyluridine-3'-phosphorothioate
  modified_base 21: mod_base = OTHER; note = 2'-O-methyladenosine-3'-phosphate
actatgtgtgttttatttcta

SEQ ID NO: 4718 - RNA, 21 nt, synthetic construct
  source 1..21: mol_type = other RNA
  modified_base 1: mod_base = OTHER; note = 2'-O-methylcytidine-3'-phosphorothioate
  modified_base 2: mod_base = OTHER; note = 2'-O-methyluridine-3'-phosphorothioate
  modified_base 3: mod_base = OTHER; note = 2'-O-methylguanosine-3'-phosphate
  modified_base 4: mod_base = OTHER; note = 2'-O-methyladenosine-3'-phosphate
  modified_base 5: mod_base = OTHER; note = 2'-O-methyluridine-3'-phosphate
  modified_base 6: mod_base = OTHER; note = 2'-O-methyladenosine-3'-phosphate
  modified_base 7: mod_base = OTHER; note = 2'-fluoroadenosine-3'-phosphate
  modified_base 8: mod_base = OTHER; note = 2'-O-methyluridine-3'-phosphate
  modified_base 9: mod_base = OTHER; note = 2'-fluorouridine-3'-phosphate
  modified_base 10: mod_base = OTHER; note = 2'-fluorouridine-3'-phosphate
  modified_base 11: mod_base = OTHER; note = 2'-fluoroadenosine-3'-phosphate
  modified_base 12: mod_base = OTHER; note = 2'-O-methyluridine-3'-phosphate
  modified_base 13: mod_base = OTHER; note = 2'-O-methyladenosine-3'-phosphate
  modified_base 14: mod_base = OTHER; note = 2'-O-methyluridine-3'-phosphate
  modified_base 15: mod_base = OTHER; note = 2'-O-methyluridine-3'-phosphate
  modified_base 16: mod_base = OTHER; note = 2'-O-methyluridine-3'-phosphate
  modified_base 17: mod_base = OTHER; note = 2'-O-methylguanosine-3'-phosphate
  modified_base 18: mod_base = OTHER; note = 2'-O-methylcytidine-3'-phosphate
  modified_base 19: mod_base = OTHER; note = 2'-O-methyladenosine-3'-phosphorothioate
  modified_base 20: mod_base = OTHER; note = 2'-O-methylcytidine-3'-phosphorothioate
  modified_base 21: mod_base = OTHER; note = 2'-O-methyladenosine-3'-phosphate
ctgataatttatatttgcaca

SEQ ID NO: 4719 - RNA, 21 nt, synthetic construct
  source 1..21: mol_type = other RNA
  modified_base 1: mod_base = OTHER; note = 2'-O-methylguanosine-3'-phosphorothioate
  modified_base 2: mod_base = OTHER; note = 2'-O-methyluridine-3'-phosphorothioate
  modified_base 3: mod_base = OTHER; note = 2'-O-methylcytidine-3'-phosphate
  modified_base 4: mod_base = OTHER; note = 2'-O-methylcytidine-3'-phosphate
  modified_base 5: mod_base = OTHER; note = 2'-O-methyluridine-3'-phosphate
  modified_base 6: mod_base = OTHER; note = 2'-O-methyluridine-3'-phosphate
  modified_base 7: mod_base = OTHER; note = 2'-fluoroadenosine-3'-phosphate
  modified_base 8: mod_base = OTHER; note = 2'-O-methyladenosine-3'-phosphate
  modified_base 9: mod_base = OTHER; note = 2'-fluoroadenosine-3'-phosphate
  modified_base 10: mod_base = OTHER; note = 2'-fluorouridine-3'-phosphate
  modified_base 11: mod_base = OTHER; note = 2'-fluorouridine-3'-phosphate
  modified_base 12: mod_base = OTHER; note = 2'-O-methyladenosine-3'-phosphate
  modified_base 13: mod_base = OTHER; note = 2'-O-methyluridine-3'-phosphate
  modified_base 14: mod_base = OTHER; note = 2'-O-methyluridine-3'-phosphate
  modified_base 15: mod_base = OTHER; note = 2'-O-methyluridine-3'-phosphate
  modified_base 16: mod_base = OTHER; note = 2'-O-methyladenosine-3'-phosphate
  modified_base 17: mod_base = OTHER; note = 2'-O-methyladenosine-3'-phosphate
  modified_base 18: mod_base = OTHER; note = 2'-O-methylcytidine-3'-phosphate
  modified_base 19: mod_base = OTHER; note = 2'-O-methylcytidine-3'-phosphorothioate
  modified_base 20: mod_base = OTHER; note = 2'-O-methylcytidine-3'-phosphorothioate
  modified_base 21: mod_base = OTHER; note = 2'-O-methyladenosine-3'-phosphate
gtccttaaattatttaaccca

SEQ ID NO: 4720 - RNA, 21 nt, synthetic construct
  source 1..21: mol_type = other RNA
  modified_base 1: mod_base = OTHER; note = 2'-O-methylcytidine-3'-phosphorothioate
  modified_base 2: mod_base = OTHER; note = 2'-O-methylguanosine-3'-phosphorothioate
  modified_base 3: mod_base = OTHER; note = 2'-O-methylcytidine-3'-phosphate
  modified_base 4: mod_base = OTHER; note = 2'-O-methyladenosine-3'-phosphate
  modified_base 5: mod_base = OTHER; note = 2'-O-methyladenosine-3'-phosphate
  modified_base 6: mod_base = OTHER; note = 2'-O-methyluridine-3'-phosphate
  modified_base 7: mod_base = OTHER; note = 2'-fluoroadenosine-3'-phosphate
  modified_base 8: mod_base = OTHER; note = 2'-O-methyluridine-3'-phosphate
  modified_base 9: mod_base = OTHER; note = 2'-fluoroguanosine-3'-phosphate
  modified_base 10: mod_base = OTHER; note = 2'-fluoroguanosine-3'-phosphate
  modified_base 11: mod_base = OTHER; note = 2'-fluorouridine-3'-phosphate
  modified_base 12: mod_base = OTHER; note = 2'-O-methylguanosine-3'-phosphate
  modified_base 13: mod_base = OTHER; note = 2'-O-methyluridine-3'-phosphate
  modified_base 14: mod_base = OTHER; note = 2'-O-methylcytidine-3'-phosphate
  modified_base 15: mod_base = OTHER; note = 2'-O-methyladenosine-3'-phosphate
  modified_base 16: mod_base = OTHER; note = 2'-O-methylguanosine-3'-phosphate
  modified_base 17: mod_base = OTHER; note = 2'-O-methyladenosine-3'-phosphate
  modified_base 18: mod_base = OTHER; note = 2'-O-methyluridine-3'-phosphate
  modified_base 19: mod_base = OTHER; note = 2'-O-methylcytidine-3'-phosphorothioate
  modified_base 20: mod_base = OTHER; note = 2'-O-methyluridine-3'-phosphorothioate
  modified_base 21: mod_base = OTHER; note = 2'-O-methyladenosine-3'-phosphate
cgcaatatggtgtcagatcta

SEQ ID NO: 4721 - RNA, 21 nt, synthetic construct
  source 1..21: mol_type = other RNA
  modified_base 1: mod_base = OTHER; note = 2'-O-methyluridine-3'-phosphorothioate
  modified_base 2: mod_base = OTHER; note = 2'-O-methyluridine-3'-phosphorothioate
  modified_base 3: mod_base = OTHER; note = 2'-O-methylcytidine-3'-phosphate
  modified_base 4: mod_base = OTHER; note = 2'-O-methylguanosine-3'-phosphate
  modified_base 5: mod_base = OTHER; note = 2'-O-methyladenosine-3'-phosphate
  modified_base 6: mod_base = OTHER; note = 2'-O-methyladenosine-3'-phosphate
  modified_base 7: mod_base = OTHER; note = 2'-fluoroguanosine-3'-phosphate
  modified_base 8: mod_base = OTHER; note = 2'-O-methyladenosine-3'-phosphate
  modified_base 9: mod_base = OTHER; note = 2'-fluoroguanosine-3'-phosphate
  modified_base 10: mod_base = OTHER; note = 2'-fluorocytidine-3'-phosphate
  modified_base 11: mod_base = OTHER; note = 2'-fluorouridine-3'-phosphate
  modified_base 12: mod_base = OTHER; note = 2'-O-methylguanosine-3'-phosphate
  modified_base 13: mod_base = OTHER; note = 2'-O-methylcytidine-3'-phosphate
  modified_base 14: mod_base = OTHER; note = 2'-O-methyluridine-3'-phosphate
  modified_base 15: mod_base = OTHER; note = 2'-O-methylcytidine-3'-phosphate
  modified_base 16: mod_base = OTHER; note = 2'-O-methyluridine-3'-phosphate
  modified_base 17: mod_base = OTHER; note = 2'-O-methyladenosine-3'-phosphate
  modified_base 18: mod_base = OTHER; note = 2'-O-methyladenosine-3'-phosphate
  modified_base 19: mod_base = OTHER; note = 2'-O-methyluridine-3'-phosphorothioate
  modified_base 20: mod_base = OTHER; note = 2'-O-methylcytidine-3'-phosphorothioate
  modified_base 21: mod_base = OTHER; note = 2'-O-methyladenosine-3'-phosphate
ttcgaagagctgctctaatca

SEQ ID NO: 4722 - RNA, 21 nt, synthetic construct
  source 1..21: mol_type = other RNA
  modified_base 1: mod_base = OTHER; note = 2'-O-methyluridine-3'-phosphorothioate
  modified_base 2: mod_base = OTHER; note = 2'-O-methyluridine-3'-phosphorothioate
  modified_base 3: mod_base = OTHER; note = 2'-O-methyluridine-3'-phosphate
  modified_base 4: mod_base = OTHER; note = 2'-O-methylcytidine-3'-phosphate
  modified_base 5: mod_base = OTHER; note = 2'-O-methyluridine-3'-phosphate
  modified_base 6: mod_base = OTHER; note = 2'-O-methylguanosine-3'-phosphate
  modified_base 7: mod_base = OTHER; note = 2'-fluorocytidine-3'-phosphate
  modified_base 8: mod_base = OTHER; note = 2'-O-methyluridine-3'-phosphate
  modified_base 9: mod_base = OTHER; note = 2'-fluoroguanosine-3'-phosphate
  modified_base 10: mod_base = OTHER; note = 2'-fluoroadenosine-3'-phosphate
  modified_base 11: mod_base = OTHER; note = 2'-fluoroguanosine-3'-phosphate
  modified_base 12: mod_base = OTHER; note = 2'-O-methyladenosine-3'-phosphate
  modified_base 13: mod_base = OTHER; note = 2'-O-methylguanosine-3'-phosphate
  modified_base 14: mod_base = OTHER; note = 2'-O-methyluridine-3'-phosphate
  modified_base 15: mod_base = OTHER; note = 2'-O-methyladenosine-3'-phosphate
  modified_base 16: mod_base = OTHER; note = 2'-O-methyluridine-3'-phosphate
  modified_base 17: mod_base = OTHER; note = 2'-O-methyluridine-3'-phosphate
  modified_base 18: mod_base = OTHER; note = 2'-O-methylcytidine-3'-phosphate
  modified_base 19: mod_base = OTHER; note = 2'-O-methyladenosine-3'-phosphorothioate
  modified_base 20: mod_base = OTHER; note = 2'-O-methylguanosine-3'-phosphorothioate
  modified_base 21: mod_base = OTHER; note = 2'-O-methyladenosine-3'-phosphate
tttctgctgagagtattcaga

SEQ ID NO: 4723 - RNA, 21 nt, synthetic construct
  source 1..21: mol_type = other RNA
  modified_base 1: mod_base = OTHER; note = 2'-O-methyluridine-3'-phosphorothioate
  modified_base 2: mod_base = OTHER; note = 2'-O-methyluridine-3'-phosphorothioate
  modified_base 3: mod_base = OTHER; note = 2'-O-methylguanosine-3'-phosphate
  modified_base 4: mod_base = OTHER; note = 2'-O-methyladenosine-3'-phosphate
  modified_base 5: mod_base = OTHER; note = 2'-O-methyladenosine-3'-phosphate
  modified_base 6: mod_base = OTHER; note = 2'-O-methylcytidine-3'-phosphate
  modified_base 7: mod_base = OTHER; note = 2'-fluoroadenosine-3'-phosphate
  modified_base 8: mod_base = OTHER; note = 2'-O-methylguanosine-3'-phosphate
  modified_base 9: mod_base = OTHER; note = 2'-fluoroguanosine-3'-phosphate
  modified_base 10: mod_base = OTHER; note = 2'-fluoroadenosine-3'-phosphate
  modified_base 11: mod_base = OTHER; note = 2'-fluoroadenosine-3'-phosphate
  modified_base 12: mod_base = OTHER; note = 2'-O-methylguanosine-3'-phosphate
  modified_base 13: mod_base = OTHER; note = 2'-O-methyluridine-3'-phosphate
  modified_base 14: mod_base = OTHER; note = 2'-O-methyladenosine-3'-phosphate
  modified_base 15: mod_base = OTHER; note = 2'-O-methyluridine-3'-phosphate
  modified_base 16: mod_base = OTHER; note = 2'-O-methylcytidine-3'-phosphate
  modified_base 17: mod_base = OTHER; note = 2'-O-methyladenosine-3'-phosphate
  modified_base 18: mod_base = OTHER; note = 2'-O-methylcytidine-3'-phosphate
  modified_base 19: mod_base = OTHER; note = 2'-O-methyluridine-3'-phosphorothioate
  modified_base 20: mod_base = OTHER; note = 2'-O-methylguanosine-3'-phosphorothioate
  modified_base 21: mod_base = OTHER; note = 2'-O-methyladenosine-3'-phosphate
ttgaacaggaagtatcactga

SEQ ID NO: 4724 - RNA, 21 nt, synthetic construct
  source 1..21: mol_type = other RNA
  modified_base 1: mod_base = OTHER; note = 2'-O-methyluridine-3'-phosphorothioate
  modified_base 2: mod_base = OTHER; note = 2'-O-methylguanosine-3'-phosphorothioate
  modified_base 3: mod_base = OTHER; note = 2'-O-methylcytidine-3'-phosphate
  modified_base 4: mod_base = OTHER; note = 2'-O-methylcytidine-3'-phosphate
  modified_base 5: mod_base = OTHER; note = 2'-O-methyluridine-3'-phosphate
  modified_base 6: mod_base = OTHER; note = 2'-O-methyluridine-3'-phosphate
  modified_base 7: mod_base = OTHER; note = 2'-fluoroguanosine-3'-phosphate
  modified_base 8: mod_base = OTHER; note = 2'-O-methyluridine-3'-phosphate
  modified_base 9: mod_base = OTHER; note = 2'-fluoroadenosine-3'-phosphate
  modified_base 10: mod_base = OTHER; note = 2'-fluorouridine-3'-phosphate
  modified_base 11: mod_base = OTHER; note = 2'-fluorouridine-3'-phosphate
  modified_base 12: mod_base = OTHER; note = 2'-O-methyluridine-3'-phosphate
  modified_base 13: mod_base = OTHER; note = 2'-O-methylcytidine-3'-phosphate
  modified_base 14: mod_base = OTHER; note = 2'-O-methylcytidine-3'-phosphate
  modified_base 15: mod_base = OTHER; note = 2'-O-methyladenosine-3'-phosphate
  modified_base 16: mod_base = OTHER; note = 2'-O-methylguanosine-3'-phosphate
  modified_base 17: mod_base = OTHER; note = 2'-O-methyladenosine-3'-phosphate
  modified_base 18: mod_base = OTHER; note = 2'-O-methylguanosine-3'-phosphate
  modified_base 19: mod_base = OTHER; note = 2'-O-methyladenosine-3'-phosphorothioate
  modified_base 20: mod_base = OTHER; note = 2'-O-methyladenosine-3'-phosphorothioate
  modified_base 21: mod_base = OTHER; note = 2'-O-methyladenosine-3'-phosphate
tgccttgtatttccagagaaa

SEQ ID NO: 4725 - RNA, 21 nt, synthetic construct
  source 1..21: mol_type = other RNA
  modified_base 1: mod_base = OTHER; note = 2'-O-methylguanosine-3'-phosphorothioate
  modified_base 2: mod_base = OTHER; note = 2'-O-methyluridine-3'-phosphorothioate
  modified_base 3: mod_base = OTHER; note = 2'-O-methyluridine-3'-phosphate
  modified_base 4: mod_base = OTHER; note = 2'-O-methyladenosine-3'-phosphate
  modified_base 5: mod_base = OTHER; note = 2'-O-methylcytidine-3'-phosphate
  modified_base 6: mod_base = OTHER; note = 2'-O-methyluridine-3'-phosphate
  modified_base 7: mod_base = OTHER; note = 2'-fluoroadenosine-3'-phosphate
  modified_base 8: mod_base = OTHER; note = 2'-O-methyluridine-3'-phosphate
  modified_base 9: mod_base = OTHER; note = 2'-fluoroguanosine-3'-phosphate
  modified_base 10: mod_base = OTHER; note = 2'-fluoroguanosine-3'-phosphate
  modified_base 11: mod_base = OTHER; note = 2'-fluorocytidine-3'-phosphate
  modified_base 12: mod_base = OTHER; note = 2'-O-methyladenosine-3'-phosphate
  modified_base 13: mod_base = OTHER; note = 2'-O-methylguanosine-3'-phosphate
  modified_base 14: mod_base = OTHER; note = 2'-O-methyluridine-3'-phosphate
  modified_base 15: mod_base = OTHER; note = 2'-O-methyluridine-3'-phosphate
  modified_base 16: mod_base = OTHER; note = 2'-O-methylguanosine-3'-phosphate
  modified_base 17: mod_base = OTHER; note = 2'-O-methylcytidine-3'-phosphate
  modified_base 18: mod_base = OTHER; note = 2'-O-methyladenosine-3'-phosphate
  modified_base 19: mod_base = OTHER; note = 2'-O-methyladenosine-3'-phosphorothioate
  modified_base 20: mod_base = OTHER; note = 2'-O-methyladenosine-3'-phosphorothioate
  modified_base 21: mod_base = OTHER; note = 2'-O-methyladenosine-3'-phosphate
gttactatggcagttgcaaaa

SEQ ID NO: 4726 - RNA, 21 nt, synthetic construct
  source 1..21: mol_type = other RNA
  modified_base 1: mod_base = OTHER; note = 2'-O-methyladenosine-3'-phosphorothioate
  modified_base 2: mod_base = OTHER; note = 2'-O-methyluridine-3'-phosphorothioate
  modified_base 3: mod_base = OTHER; note = 2'-O-methylguanosine-3'-phosphate
  modified_base 4: mod_base = OTHER; note = 2'-O-methylguanosine-3'-phosphate
  modified_base 5: mod_base = OTHER; note = 2'-O-methylcytidine-3'-phosphate
  modified_base 6: mod_base = OTHER; note = 2'-O-methyluridine-3'-phosphate
  modified_base 7: mod_base = OTHER; note = 2'-fluoroguanosine-3'-phosphate
  modified_base 8: mod_base = OTHER; note = 2'-O-methyladenosine-3'-phosphate
  modified_base 9: mod_base = OTHER; note = 2'-fluoroadenosine-3'-phosphate
  modified_base 10: mod_base = OTHER; note = 2'-fluorouridine-3'-phosphate
  modified_base 11: mod_base = OTHER; note = 2'-fluorouridine-3'-phosphate
  modified_base 12: mod_base = OTHER; note = 2'-O-methyluridine-3'-phosphate
  modified_base 13: mod_base = OTHER; note = 2'-O-methyluridine-3'-phosphate
  modified_base 14: mod_base = OTHER; note = 2'-O-methyladenosine-3'-phosphate
  modified_base 15: mod_base = OTHER; note = 2'-O-methyladenosine-3'-phosphate
  modified_base 16: mod_base = OTHER; note = 2'-O-methyladenosine-3'-phosphate
  modified_base 17: mod_base = OTHER; note = 2'-O-methylguanosine-3'-phosphate
  modified_base 18: mod_base = OTHER; note = 2'-O-methylcytidine-3'-phosphate
  modified_base 19: mod_base = OTHER; note = 2'-O-methyluridine-3'-phosphorothioate
  modified_base 20: mod_base = OTHER; note = 2'-O-methylguanosine-3'-phosphorothioate
  modified_base 21: mod_base = OTHER; note = 2'-O-methyladenosine-3'-phosphate
atggctgaattttaaagctga

SEQ ID NO: 4727 - RNA, 21 nt, synthetic construct
  source 1..21: mol_type = other RNA
  modified_base 1: mod_base = OTHER; note = 2'-O-methylguanosine-3'-phosphorothioate
  modified_base 2: mod_base = OTHER; note = 2'-O-methyluridine-3'-phosphorothioate
  modified_base 3: mod_base = OTHER; note = 2'-O-methylcytidine-3'-phosphate
  modified_base 4: mod_base = OTHER; note = 2'-O-methylcytidine-3'-phosphate
  modified_base 5: mod_base = OTHER; note = 2'-O-methyladenosine-3'-phosphate
  modified_base 6: mod_base = OTHER; note = 2'-O-methyluridine-3'-phosphate
  modified_base 7: mod_base = OTHER; note = 2'-fluorouridine-3'-phosphate
  modified_base 8: mod_base = OTHER; note = 2'-O-methylcytidine-3'-phosphate
  modified_base 9: mod_base = OTHER; note = 2'-fluoroadenosine-3'-phosphate
  modified_base 10: mod_base = OTHER; note = 2'-fluorouridine-3'-phosphate
  modified_base 11: mod_base = OTHER; note = 2'-fluoroguanosine-3'-phosphate
  modified_base 12: mod_base = OTHER; note = 2'-O-methylguanosine-3'-phosphate
  modified_base 13: mod_base = OTHER; note = 2'-O-methyladenosine-3'-phosphate
  modified_base 14: mod_base = OTHER; note = 2'-O-methyluridine-3'-phosphate
  modified_base 15: mod_base = OTHER; note = 2'-O-methylcytidine-3'-phosphate
  modified_base 16: mod_base = OTHER; note = 2'-O-methylguanosine-3'-phosphate
  modified_base 17: mod_base = OTHER; note = 2'-O-methyluridine-3'-phosphate
  modified_base 18: mod_base = OTHER; note = 2'-O-methyluridine-3'-phosphate
  modified_base 19: mod_base = OTHER; note = 2'-O-methylcytidine-3'-phosphorothioate
  modified_base 20: mod_base = OTHER; note = 2'-O-methyluridine-3'-phosphorothioate
  modified_base 21: mod_base = OTHER; note = 2'-O-methyladenosine-3'-phosphate
gtccattcatggatcgttcta

SEQ ID NO: 4728 - RNA, 21 nt, synthetic construct
  source 1..21: mol_type = other RNA
  modified_base 1: mod_base = OTHER; note = 2'-O-methyluridine-3'-phosphorothioate
  modified_base 2: mod_base = OTHER; note = 2'-O-methylguanosine-3'-phosphorothioate
  modified_base 3: mod_base = OTHER; note = 2'-O-methyluridine-3'-phosphate
  modified_base 4: mod_base = OTHER; note = 2'-O-methylguanosine-3'-phosphate
  modified_base 5: mod_base = OTHER; note = 2'-O-methyluridine-3'-phosphate
  modified_base 6: mod_base = OTHER; note = 2'-O-methyladenosine-3'-phosphate
  modified_base 7: mod_base = OTHER; note = 2'-fluoroadenosine-3'-phosphate
  modified_base 8: mod_base = OTHER; note = 2'-O-methylcytidine-3'-phosphate
  modified_base 9: mod_base = OTHER; note = 2'-fluorouridine-3'-phosphate
  modified_base 10: mod_base = OTHER; note = 2'-fluorocytidine-3'-phosphate
  modified_base 11: mod_base = OTHER; note = 2'-fluorocytidine-3'-phosphate
  modified_base 12: mod_base = OTHER; note = 2'-O-methyluridine-3'-phosphate
  modified_base 13: mod_base = OTHER; note = 2'-O-methyladenosine-3'-phosphate
  modified_base 14: mod_base = OTHER; note = 2'-O-methyluridine-3'-phosphate
  modified_base 15: mod_base = OTHER; note = 2'-O-methylguanosine-3'-phosphate
  modified_base 16: mod_base = OTHER; note = 2'-O-methyladenosine-3'-phosphate
  modified_base 17: mod_base = OTHER; note = 2'-O-methyluridine-3'-phosphate
  modified_base 18: mod_base = OTHER; note = 2'-O-methylguanosine-3'-phosphate
  modified_base 19: mod_base = OTHER; note = 2'-O-methylcytidine-3'-phosphorothioate
  modified_base 20: mod_base = OTHER; note = 2'-O-methyluridine-3'-phosphorothioate
  modified_base 21: mod_base = OTHER; note = 2'-O-methyladenosine-3'-phosphate
tgtgtaactcctatgatgcta

SEQ ID NO: 4729 - RNA, 21 nt, synthetic construct
  source 1..21: mol_type = other RNA
  modified_base 1: mod_base = OTHER; note = 2'-O-methyluridine-3'-phosphorothioate
  modified_base 2: mod_base = OTHER; note = 2'-O-methylguanosine-3'-phosphorothioate
  modified_base 3: mod_base = OTHER; note = 2'-O-methylguanosine-3'-phosphate
  modified_base 4: mod_base = OTHER; note = 2'-O-methylcytidine-3'-phosphate
  modified_base 5: mod_base = OTHER; note = 2'-O-methyladenosine-3'-phosphate
  modified_base 6: mod_base = OTHER; note = 2'-O-methylguanosine-3'-phosphate
  modified_base 7: mod_base = OTHER; note = 2'-fluorouridine-3'-phosphate
  modified_base 8: mod_base = OTHER; note = 2'-O-methyluridine-3'-phosphate
  modified_base 9: mod_base = OTHER; note = 2'-fluorouridine-3'-phosphate
  modified_base 10: mod_base = OTHER; note = 2'-fluorocytidine-3'-phosphate
  modified_base 11: mod_base = OTHER; note = 2'-fluorocytidine-3'-phosphate
  modified_base 12: mod_base = OTHER; note = 2'-O-methylcytidine-3'-phosphate
  modified_base 13: mod_base = OTHER; note = 2'-O-methyladenosine-3'-phosphate
  modified_base 14: mod_base = OTHER; note = 2'-O-methylcytidine-3'-phosphate
  modified_base 15: mod_base = OTHER; note = 2'-O-methyluridine-3'-phosphate
  modified_base 16: mod_base = OTHER; note = 2'-O-methylcytidine-3'-phosphate
  modified_base 17: mod_base = OTHER; note = 2'-O-methylcytidine-3'-phosphate
  modified_base 18: mod_base = OTHER; note = 2'-O-methyluridine-3'-phosphate
  modified_base 19: mod_base = OTHER; note = 2'-O-methyladenosine-3'-phosphorothioate
  modified_base 20: mod_base = OTHER; note = 2'-O-methyluridine-3'-phosphorothioate
  modified_base 21: mod_base = OTHER; note = 2'-O-methyladenosine-3'-phosphate
tggcagtttcccactcctata

SEQ ID NO: 4730 - RNA, 21 nt, synthetic construct
  source 1..21: mol_type = other RNA
  modified_base 1: mod_base = OTHER; note = 2'-O-methylcytidine-3'-phosphorothioate
  modified_base 2: mod_base = OTHER; note = 2'-O-methylcytidine-3'-phosphorothioate
  modified_base 3: mod_base = OTHER; note = 2'-O-methyluridine-3'-phosphate
  modified_base 4: mod_base = OTHER; note = 2'-O-methylcytidine-3'-phosphate
  modified_base 5: mod_base = OTHER; note = 2'-O-methyladenosine-3'-phosphate
  modified_base 6: mod_base = OTHER; note = 2'-O-methyladenosine-3'-phosphate
  modified_base 7: mod_base = OTHER; note = 2'-fluoroguanosine-3'-phosphate
  modified_base 8: mod_base = OTHER; note = 2'-O-methylcytidine-3'-phosphate
  modified_base 9: mod_base = OTHER; note = 2'-fluoroadenosine-3'-phosphate
  modified_base 10: mod_base = OTHER; note = 2'-fluoroguanosine-3'-phosphate
  modified_base 11: mod_base = OTHER; note = 2'-fluoroadenosine-3'-phosphate
  modified_base 12: mod_base = OTHER; note = 2'-O-methyluridine-3'-phosphate
  modified_base 13: mod_base = OTHER; note = 2'-O-methylguanosine-3'-phosphate
  modified_base 14: mod_base = OTHER; note = 2'-O-methyladenosine-3'-phosphate
  modified_base 15: mod_base = OTHER; note = 2'-O-methylguanosine-3'-phosphate
  modified_base 16: mod_base = OTHER; note = 2'-O-methyladenosine-3'-phosphate
  modified_base 17: mod_base = OTHER; note = 2'-O-methyluridine-3'-phosphate
  modified_base 18: mod_base = OTHER; note = 2'-O-methyluridine-3'-phosphate
  modified_base 19: mod_base = OTHER; note = 2'-O-methylcytidine-3'-phosphorothioate
  modified_base 20: mod_base = OTHER; note = 2'-O-methyladenosine-3'-phosphorothioate
  modified_base 21: mod_base = OTHER; note = 2'-O-methyladenosine-3'-phosphate
cctcaagcagatgagattcaa

SEQ ID NO: 4731 - RNA, 21 nt, synthetic construct
  source 1..21: mol_type = other RNA
  modified_base 1: mod_base = OTHER; note = 2'-O-methyladenosine-3'-phosphorothioate
  modified_base 2: mod_base = OTHER; note = 2'-O-methyluridine-3'-phosphorothioate
  modified_base 3: mod_base = OTHER; note = 2'-O-methylguanosine-3'-phosphate
  modified_base 4: mod_base = OTHER; note = 2'-O-methyluridine-3'-phosphate
  modified_base 5: mod_base = OTHER; note = 2'-O-methyluridine-3'-phosphate
  modified_base 6: mod_base = OTHER; note = 2'-O-methylguanosine-3'-phosphate
  modified_base 7: mod_base = OTHER; note = 2'-fluorouridine-3'-phosphate
  modified_base 8: mod_base = OTHER; note = 2'-O-methyluridine-3'-phosphate
  modified_base 9: mod_base = OTHER; note = 2'-fluorouridine-3'-phosphate
  modified_base 10: mod_base = OTHER; note = 2'-fluorouridine-3'-phosphate
  modified_base 11: mod_base = OTHER; note = 2'-fluorocytidine-3'-phosphate
  modified_base 12: mod_base = OTHER; note = 2'-O-methyluridine-3'-phosphate
  modified_base 13: mod_base = OTHER; note = 2'-O-methylcytidine-3'-phosphate
  modified_base 14: mod_base = OTHER; note = 2'-O-methyladenosine-3'-phosphate
  modified_base 15: mod_base = OTHER; note = 2'-O-methyladenosine-3'-phosphate
  modified_base 16: mod_base = OTHER; note = 2'-O-methyladenosine-3'-phosphate
  modified_base 17: mod_base = OTHER; note = 2'-O-methyladenosine-3'-phosphate
  modified_base 18: mod_base = OTHER; note = 2'-O-methylguanosine-3'-phosphate
  modified_base 19: mod_base = OTHER; note = 2'-O-methylcytidine-3'-phosphorothioate
  modified_base 20: mod_base = OTHER; note = 2'-O-methyladenosine-3'-phosphorothioate
  modified_base 21: mod_base = OTHER; note = 2'-O-methyladenosine-3'-phosphate
atgttgttttctcaaaagcaa

SEQ ID NO: 4732 - RNA, 21 nt, synthetic construct
  source 1..21: mol_type = other RNA
  modified_base 1: mod_base = OTHER; note = 2'-O-methylguanosine-3'-phosphorothioate
  modified_base 2: mod_base = OTHER; note = 2'-O-methyladenosine-3'-phosphorothioate
  modified_base 3: mod_base = OTHER; note = 2'-O-methylguanosine-3'-phosphate
  modified_base 4: mod_base = OTHER; note = 2'-O-methylguanosine-3'-phosphate
  modified_base 5: mod_base = OTHER; note = 2'-O-methylguanosine-3'-phosphate
  modified_base 6: mod_base = OTHER; note = 2'-O-methyladenosine-3'-phosphate
  modified_base 7: mod_base = OTHER; note = 2'-fluorouridine-3'-phosphate
  modified_base 8: mod_base = OTHER; note = 2'-O-methyluridine-3'-phosphate
  modified_base 9: mod_base = OTHER; note = 2'-fluorouridine-3'-phosphate
  modified_base 10: mod_base = OTHER; note = 2'-fluorocytidine-3'-phosphate
  modified_base 11: mod_base = OTHER; note = 2'-fluorouridine-3'-phosphate
  modified_base 12: mod_base = OTHER; note = 2'-O-methylguanosine-3'-phosphate
  modified_base 13: mod_base = OTHER; note = 2'-O-methylcytidine-3'-phosphate
  modified_base 14: mod_base = OTHER; note = 2'-O-methyluridine-3'-phosphate
  modified_base 15: mod_base = OTHER; note = 2'-O-methylcytidine-3'-phosphate
  modified_base 16: mod_base = OTHER; note = 2'-O-methyladenosine-3'-phosphate
  modified_base 17: mod_base = OTHER; note = 2'-O-methyladenosine-3'-phosphate
  modified_base 18: mod_base = OTHER; note = 2'-O-methyluridine-3'-phosphate
  modified_base 19: mod_base = OTHER; note = 2'-O-methylguanosine-3'-phosphorothioate
  modified_base 20: mod_base = OTHER; note = 2'-O-methylcytidine-3'-phosphorothioate
  modified_base 21: mod_base = OTHER; note = 2'-O-methyladenosine-3'-phosphate
gagggatttctgctcaatgca

SEQ ID NO: 4733 - RNA, 21 nt, synthetic construct
  source 1..21: mol_type = other RNA
  modified_base 1: mod_base = OTHER; note = 2'-O-methylguanosine-3'-phosphorothioate
  modified_base 2: mod_base = OTHER; note = 2'-O-methylcytidine-3'-phosphorothioate
  modified_base 3: mod_base = OTHER; note = 2'-O-methylcytidine-3'-phosphate
  modified_base 4: mod_base = OTHER; note = 2'-O-methyluridine-3'-phosphate
  modified_base 5: mod_base = OTHER; note = 2'-O-methyluridine-3'-phosphate
  modified_base 6: mod_base = OTHER; note = 2'-O-methylcytidine-3'-phosphate
  modified_base 7: mod_base = OTHER; note = 2'-fluorouridine-3'-phosphate
  modified_base 8: mod_base = OTHER; note = 2'-O-methyluridine-3'-phosphate
  modified_base 9: mod_base = OTHER; note = 2'-fluorocytidine-3'-phosphate
  modified_base 10: mod_base = OTHER; note = 2'-fluorouridine-3'-phosphate
  modified_base 11: mod_base = OTHER; note = 2'-fluorouridine-3'-phosphate
  modified_base 12: mod_base = OTHER; note = 2'-O-methylcytidine-3'-phosphate
  modified_base 13: mod_base = OTHER; note = 2'-O-methylcytidine-3'-phosphate
  modified_base 14: mod_base = OTHER; note = 2'-O-methyluridine-3'-phosphate
  modified_base 15: mod_base = OTHER; note = 2'-O-methylcytidine-3'-phosphate
  modified_base 16: mod_base = OTHER; note = 2'-O-methyladenosine-3'-phosphate
  modified_base 17: mod_base = OTHER; note = 2'-O-methylcytidine-3'-phosphate
  modified_base 18: mod_base = OTHER; note = 2'-O-methylcytidine-3'-phosphate
  modified_base 19: mod_base = OTHER; note = 2'-O-methyluridine-3'-phosphorothioate
  modified_base 20: mod_base = OTHER; note = 2'-O-methylguanosine-3'-phosphorothioate
  modified_base 21: mod_base = OTHER; note = 2'-O-methyladenosine-3'-phosphate
gccttcttcttcctcacctga

SEQ ID NO: 4734 - RNA, 21 nt, synthetic construct
  source 1..21: mol_type = other RNA
  modified_base 1: mod_base = OTHER; note = 2'-O-methyluridine-3'-phosphorothioate
  modified_base 2: mod_base = OTHER; note = 2'-O-methyluridine-3'-phosphorothioate
  modified_base 3: mod_base = OTHER; note = 2'-O-methylguanosine-3'-phosphate
  modified_base 4: mod_base = OTHER; note = 2'-O-methyladenosine-3'-phosphate
  modified_base 5: mod_base = OTHER; note = 2'-O-methylguanosine-3'-phosphate
  modified_base 6: mod_base = OTHER; note = 2'-O-methyladenosine-3'-phosphate
  modified_base 7: mod_base = OTHER; note = 2'-fluorouridine-3'-phosphate
  modified_base 8: mod_base = OTHER; note = 2'-O-methyluridine-3'-phosphate
  modified_base 9: mod_base = OTHER; note = 2'-fluoroguanosine-3'-phosphate
  modified_base 10: mod_base = OTHER; note = 2'-fluoroadenosine-3'-phosphate
  modified_base 11: mod_base = OTHER; note = 2'-fluoroadenosine-3'-phosphate
  modified_base 12: mod_base = OTHER; note = 2'-O-methyluridine-3'-phosphate
  modified_base 13: mod_base = OTHER; note = 2'-O-methylcytidine-3'-phosphate
  modified_base 14: mod_base = OTHER; note = 2'-O-methyladenosine-3'-phosphate
  modified_base 15: mod_base = OTHER; note = 2'-O-methylcytidine-3'-phosphate
  modified_base 16: mod_base = OTHER; note = 2'-O-methyladenosine-3'-phosphate
  modified_base 17: mod_base = OTHER; note = 2'-O-methyluridine-3'-phosphate
  modified_base 18: mod_base = OTHER; note = 2'-O-methyluridine-3'-phosphate
  modified_base 19: mod_base = OTHER; note = 2'-O-methyluridine-3'-phosphorothioate
  modified_base 20: mod_base = OTHER; note = 2'-O-methylcytidine-3'-phosphorothioate
  modified_base 21: mod_base = OTHER; note = 2'-O-methyladenosine-3'-phosphate
ttgagattgaatcacatttca

SEQ ID NO: 4735 - RNA, 21 nt, synthetic construct
  source 1..21: mol_type = other RNA
  modified_base 1: mod_base = OTHER; note = 2'-O-methylcytidine-3'-phosphorothioate
  modified_base 2: mod_base = OTHER; note = 2'-O-methyluridine-3'-phosphorothioate
  modified_base 3: mod_base = OTHER; note = 2'-O-methylguanosine-3'-phosphate
  modified_base 4: mod_base = OTHER; note = 2'-O-methyluridine-3'-phosphate
  modified_base 5: mod_base = OTHER; note = 2'-O-methyluridine-3'-phosphate
  modified_base 6: mod_base = OTHER; note = 2'-O-methylcytidine-3'-phosphate
  modified_base 7: mod_base = OTHER; note = 2'-fluoroadenosine-3'-phosphate
  modified_base 8: mod_base = OTHER; note = 2'-O-methylguanosine-3'-phosphate
  modified_base 9: mod_base = OTHER; note = 2'-fluorouridine-3'-phosphate
  modified_base 10: mod_base = OTHER; note = 2'-fluoroguanosine-3'-phosphate
  modified_base 11: mod_base = OTHER; note = 2'-fluorocytidine-3'-phosphate
  modified_base 12: mod_base = OTHER; note = 2'-O-methyluridine-3'-phosphate
  modified_base 13: mod_base = OTHER; note = 2'-O-methyladenosine-3'-phosphate
  modified_base 14: mod_base = OTHER; note = 2'-O-methyluridine-3'-phosphate
  modified_base 15: mod_base = OTHER; note = 2'-O-methyluridine-3'-phosphate
  modified_base 16: mod_base = OTHER; note = 2'-O-methylcytidine-3'-phosphate
  modified_base 17: mod_base = OTHER; note = 2'-O-methyluridine-3'-phosphate
  modified_base 18: mod_base = OTHER; note = 2'-O-methylcytidine-3'-phosphate
  modified_base 19: mod_base = OTHER; note = 2'-O-methylcytidine-3'-phosphorothioate
  modified_base 20: mod_base = OTHER; note = 2'-O-methylcytidine-3'-phosphorothioate
  modified_base 21: mod_base = OTHER; note = 2'-O-methyladenosine-3'-phosphate
ctgttcagtgctattctccca

SEQ ID NO: 4736 - RNA, 21 nt, synthetic construct
  source 1..21: mol_type = other RNA
  modified_base 1: mod_base = OTHER; note = 2'-O-methylcytidine-3'-phosphorothioate
  modified_base 2: mod_base = OTHER; note = 2'-O-methylcytidine-3'-phosphorothioate
  modified_base 3: mod_base = OTHER; note = 2'-O-methyluridine-3'-phosphate
  modified_base 4: mod_base = OTHER; note = 2'-O-methylguanosine-3'-phosphate
  modified_base 5: mod_base = OTHER; note = 2'-O-methylguanosine-3'-phosphate
  modified_base 6: mod_base = OTHER; note = 2'-O-methylcytidine-3'-phosphate
  modified_base 7: mod_base = OTHER; note = 2'-fluorouridine-3'-phosphate
  modified_base 8: mod_base = OTHER; note = 2'-O-methyluridine-3'-phosphate
  modified_base 9: mod_base = OTHER; note = 2'-fluoroadenosine-3'-phosphate
  modified_base 10: mod_base = OTHER; note = 2'-fluorocytidine-3'-phosphate
  modified_base 11: mod_base = OTHER; note = 2'-fluoroadenosine-3'-phosphate
  modified_base 12: mod_base = OTHER; note = 2'-O-methylguanosine-3'-phosphate
  modified_base 13: mod_base = OTHER; note = 2'-O-methylcytidine-3'-phosphate
  modified_base 14: mod_base = OTHER; note = 2'-O-methyladenosine-3'-phosphate
  modified_base 15: mod_base = OTHER; note = 2'-O-methylguanosine-3'-phosphate
  modified_base 16: mod_base = OTHER; note = 2'-O-methyladenosine-3'-phosphate
  modified_base 17: mod_base = OTHER; note = 2'-O-methyluridine-3'-phosphate
  modified_base 18: mod_base = OTHER; note = 2'-O-methylcytidine-3'-phosphate
  modified_base 19: mod_base = OTHER; note = 2'-O-methylcytidine-3'-phosphorothioate
  modified_base 20: mod_base = OTHER; note = 2'-O-methyladenosine-3'-phosphorothioate
  modified_base 21: mod_base = OTHER; note = 2'-O-methyladenosine-3'-phosphate
cctggcttacagcagatccaa

SEQ ID NO: 4737 - RNA, 21 nt, synthetic construct
  source 1..21: mol_type = other RNA
  modified_base 1: mod_base = OTHER; note = 2'-O-methylguanosine-3'-phosphorothioate
  modified_base 2: mod_base = OTHER; note = 2'-O-methyladenosine-3'-phosphorothioate
  modified_base 3: mod_base = OTHER; note = 2'-O-methylcytidine-3'-phosphate
  modified_base 4: mod_base = OTHER; note = 2'-O-methyladenosine-3'-phosphate
  modified_base 5: mod_base = OTHER; note = 2'-O-methylguanosine-3'-phosphate
  modified_base 6: mod_base = OTHER; note = 2'-O-methylcytidine-3'-phosphate
  modified_base 7: mod_base = OTHER; note = 2'-fluoroadenosine-3'-phosphate
  modified_base 8: mod_base = OTHER; note = 2'-O-methylguanosine-3'-phosphate
  modified_base 9: mod_base = OTHER; note = 2'-fluoroadenosine-3'-phosphate
  modified_base 10: mod_base = OTHER; note = 2'-fluoroadenosine-3'-phosphate
  modified_base 11: mod_base = OTHER; note = 2'-fluoroadenosine-3'-phosphate
  modified_base 12: mod_base = OTHER; note = 2'-O-methyladenosine-3'-phosphate
  modified_base 13: mod_base = OTHER; note = 2'-O-methyluridine-3'-phosphate
  modified_base 14: mod_base = OTHER; note = 2'-O-methyluridine-3'-phosphate
  modified_base 15: mod_base = OTHER; note = 2'-O-methyladenosine-3'-phosphate
  modified_base 16: mod_base = OTHER; note = 2'-O-methyluridine-3'-phosphate
  modified_base 17: mod_base = OTHER; note = 2'-O-methyluridine-3'-phosphate
  modified_base 18: mod_base = OTHER; note = 2'-O-methyluridine-3'-phosphate
  modified_base 19: mod_base = OTHER; note = 2'-O-methylcytidine-3'-phosphorothioate
  modified_base 20: mod_base = OTHER; note = 2'-O-methyladenosine-3'-phosphorothioate
  modified_base 21: mod_base = OTHER; note = 2'-O-methyladenosine-3'-phosphate
gacagcagaaaattatttcaa

SEQ ID NO: 4738 - RNA, 21 nt, synthetic construct
  source 1..21: mol_type = other RNA
  modified_base 1: mod_base = OTHER; note = 2'-O-methyluridine-3'-phosphorothioate
  modified_base 2: mod_base = OTHER; note = 2'-O-methyluridine-3'-phosphorothioate
  modified_base 3: mod_base = OTHER; note = 2'-O-methylguanosine-3'-phosphate
  modified_base 4: mod_base = OTHER; note = 2'-O-methylguanosine-3'-phosphate
  modified_base 5: mod_base = OTHER; note = 2'-O-methylguanosine-3'-phosphate
  modified_base 6: mod_base = OTHER; note = 2'-O-methyluridine-3'-phosphate
  modified_base 7: mod_base = OTHER; note = 2'-fluorouridine-3'-phosphate
  modified_base 8: mod_base = OTHER; note = 2'-O-methyluridine-3'-phosphate
  modified_base 9: mod_base = OTHER; note = 2'-fluorocytidine-3'-phosphate
  modified_base 10: mod_base = OTHER; note = 2'-fluorouridine-3'-phosphate
  modified_base 11: mod_base = OTHER; note = 2'-fluorouridine-3'-phosphate
  modified_base 12: mod_base = OTHER; note = 2'-O-methyluridine-3'-phosphate
  modified_base 13: mod_base = OTHER; note = 2'-O-methyladenosine-3'-phosphate
  modified_base 14: mod_base = OTHER; note = 2'-O-methylguanosine-3'-phosphate
  modified_base 15: mod_base = OTHER; note = 2'-O-methyluridine-3'-phosphate
  modified_base 16: mod_base = OTHER; note = 2'-O-methyluridine-3'-phosphate
  modified_base 17: mod_base = OTHER; note = 2'-O-methyluridine-3'-phosphate
  modified_base 18: mod_base = OTHER; note = 2'-O-methyladenosine-3'-phosphate
  modified_base 19: mod_base = OTHER; note = 2'-O-methyluridine-3'-phosphorothioate
  modified_base 20: mod_base = OTHER; note = 2'-O-methylguanosine-3'-phosphorothioate
  modified_base 21: mod_base = OTHER; note = 2'-O-methyladenosine-3'-phosphate
ttgggtttctttagtttatga

SEQ ID NO: 4739 - RNA, 21 nt, synthetic construct
  source 1..21: mol_type = other RNA
  modified_base 1: mod_base = OTHER; note = 2'-O-methylcytidine-3'-phosphorothioate
  modified_base 2: mod_base = OTHER; note = 2'-O-methyladenosine-3'-phosphorothioate
  modified_base 3: mod_base = OTHER; note = 2'-O-methylcytidine-3'-phosphate
  modified_base 4: mod_base = OTHER; note = 2'-O-methylcytidine-3'-phosphate
  modified_base 5: mod_base = OTHER; note = 2'-O-methyladenosine-3'-phosphate
  modified_base 6: mod_base = OTHER; note = 2'-O-methyluridine-3'-phosphate
  modified_base 7: mod_base = OTHER; note = 2'-fluoroguanosine-3'-phosphate
  modified_base 8: mod_base = OTHER; note = 2'-O-methyluridine-3'-phosphate
  modified_base 9: mod_base = OTHER; note = 2'-fluoroadenosine-3'-phosphate
  modified_base 10: mod_base = OTHER; note = 2'-fluoroguanosine-3'-phosphate
  modified_base 11: mod_base = OTHER; note = 2'-fluoroguanosine-3'-phosphate
  modified_base 12: mod_base = OTHER; note = 2'-O-methyluridine-3'-phosphate
  modified_base 13: mod_base = OTHER; note = 2'-O-methylcytidine-3'-phosphate
  modified_base 14: mod_base = OTHER; note = 2'-O-methyluridine-3'-phosphate
  modified_base 15: mod_base = OTHER; note = 2'-O-methylcytidine-3'-phosphate
  modified_base 16: mod_base = OTHER; note = 2'-O-methyladenosine-3'-phosphate
  modified_base 17: mod_base = OTHER; note = 2'-O-methylguanosine-3'-phosphate
  modified_base 18: mod_base = OTHER; note = 2'-O-methyladenosine-3'-phosphate
  modified_base 19: mod_base = OTHER; note = 2'-O-methyladenosine-3'-phosphorothioate
  modified_base 20: mod_base = OTHER; note = 2'-O-methylguanosine-3'-phosphorothioate
  modified_base 21: mod_base = OTHER; note = 2'-O-methyladenosine-3'-phosphate
caccatgtaggtctcagaaga

SEQ ID NO: 4740 - RNA, 21 nt, synthetic construct
  source 1..21: mol_type = other RNA
  modified_base 1: mod_base = OTHER; note = 2'-O-methylguanosine-3'-phosphorothioate
  modified_base 2: mod_base = OTHER; note = 2'-O-methyluridine-3'-phosphorothioate
  modified_base 3: mod_base = OTHER; note = 2'-O-methyluridine-3'-phosphate
  modified_base 4: mod_base = OTHER; note = 2'-O-methylguanosine-3'-phosphate
  modified_base 5: mod_base = OTHER; note = 2'-O-methyluridine-3'-phosphate
  modified_base 6: mod_base = OTHER; note = 2'-O-methylguanosine-3'-phosphate
  modified_base 7: mod_base = OTHER; note = 2'-fluoroguanosine-3'-phosphate
  modified_base 8: mod_base = OTHER; note = 2'-O-methyladenosine-3'-phosphate
  modified_base 9: mod_base = OTHER; note = 2'-fluoroadenosine-3'-phosphate
  modified_base 10: mod_base = OTHER; note = 2'-fluorocytidine-3'-phosphate
  modified_base 11: mod_base = OTHER; note = 2'-fluoroadenosine-3'-phosphate
  modified_base 12: mod_base = OTHER; note = 2'-O-methylguanosine-3'-phosphate
  modified_base 13: mod_base = OTHER; note = 2'-O-methylguanosine-3'-phosphate
  modified_base 14: mod_base = OTHER; note = 2'-O-methyladenosine-3'-phosphate
  modified_base 15: mod_base = OTHER; note = 2'-O-methyladenosine-3'-phosphate
  modified_base 16: mod_base = OTHER; note = 2'-O-methyladenosine-3'-phosphate
  modified_base 17: mod_base = OTHER; note = 2'-O-methyluridine-3'-phosphate
  modified_base 18: mod_base = OTHER; note = 2'-O-methylguanosine-3'-phosphate
  modified_base 19: mod_base = OTHER; note = 2'-O-methyladenosine-3'-phosphorothioate
  modified_base 20: mod_base = OTHER; note = 2'-O-methyladenosine-3'-phosphorothioate
  modified_base 21: mod_base = OTHER; note = 2'-O-methyladenosine-3'-phosphate
gttgtggaacaggaaatgaaa

SEQ ID NO: 4741 - RNA, 21 nt, synthetic construct
  source 1..21: mol_type = other RNA
  modified_base 1: mod_base = OTHER; note = 2'-O-methylguanosine-3'-phosphorothioate
  modified_base 2: mod_base = OTHER; note = 2'-O-methylguanosine-3'-phosphorothioate
  modified_base 3: mod_base = OTHER; note = 2'-O-methyladenosine-3'-phosphate
  modified_base 4: mod_base = OTHER; note = 2'-O-methylguanosine-3'-phosphate
  modified_base 5: mod_base = OTHER; note = 2'-O-methyladenosine-3'-phosphate
  modified_base 6: mod_base = OTHER; note = 2'-O-methyladenosine-3'-phosphate
  modified_base 7: mod_base = OTHER; note = 2'-fluorocytidine-3'-phosphate
  modified_base 8: mod_base = OTHER; note = 2'-O-methyladenosine-3'-phosphate
  modified_base 9: mod_base = OTHER; note = 2'-fluorouridine-3'-phosphate
  modified_base 10: mod_base = OTHER; note = 2'-fluoroadenosine-3'-phosphate
  modified_base 11: mod_base = OTHER; note = 2'-fluorouridine-3'-phosphate
  modified_base 12: mod_base = OTHER; note = 2'-O-methylcytidine-3'-phosphate
  modified_base 13: mod_base = OTHER; note = 2'-O-methyladenosine-3'-phosphate
  modified_base 14: mod_base = OTHER; note = 2'-O-methyluridine-3'-phosphate
  modified_base 15: mod_base = OTHER; note = 2'-O-methyladenosine-3'-phosphate
  modified_base 16: mod_base = OTHER; note = 2'-O-methyluridine-3'-phosphate
  modified_base 17: mod_base = OTHER; note = 2'-O-methyluridine-3'-phosphate
  modified_base 18: mod_base = OTHER; note = 2'-O-methyluridine-3'-phosphate
  modified_base 19: mod_base = OTHER; note = 2'-O-methyluridine-3'-phosphorothioate
  modified_base 20: mod_base = OTHER; note = 2'-O-methylguanosine-3'-phosphorothioate
  modified_base 21: mod_base = OTHER; note = 2'-O-methyladenosine-3'-phosphate
ggagaacatatcatattttga

SEQ ID NO: 4742 - RNA, 21 nt, synthetic construct
  source 1..21: mol_type = other RNA
  modified_base 1: mod_base = OTHER; note = 2'-O-methylcytidine-3'-phosphorothioate
  modified_base 2: mod_base = OTHER; note = 2'-O-methyladenosine-3'-phosphorothioate
  modified_base 3: mod_base = OTHER; note = 2'-O-methylguanosine-3'-phosphate
  modified_base 4: mod_base = OTHER; note = 2'-O-methylcytidine-3'-phosphate
  modified_base 5: mod_base = OTHER; note = 2'-O-methylcytidine-3'-phosphate
  modified_base 6: mod_base = OTHER; note = 2'-O-methyladenosine-3'-phosphate
  modified_base 7: mod_base = OTHER; note = 2'-fluoroadenosine-3'-phosphate
  modified_base 8: mod_base = OTHER; note = 2'-O-methyladenosine-3'-phosphate
  modified_base 9: mod_base = OTHER; note = 2'-fluoroadenosine-3'-phosphate
  modified_base 10: mod_base = OTHER; note = 2'-fluorouridine-3'-phosphate
  modified_base 11: mod_base = OTHER; note = 2'-fluoroguanosine-3'-phosphate
  modified_base 12: mod_base = OTHER; note = 2'-O-methyladenosine-3'-phosphate
  modified_base 13: mod_base = OTHER; note = 2'-O-methyluridine-3'-phosphate
  modified_base 14: mod_base = OTHER; note = 2'-O-methylguanosine-3'-phosphate
  modified_base 15: mod_base = OTHER; note = 2'-O-methylguanosine-3'-phosphate
  modified_base 16: mod_base = OTHER; note = 2'-O-methylcytidine-3'-phosphate
  modified_base 17: mod_base = OTHER; note = 2'-O-methyladenosine-3'-phosphate
  modified_base 18: mod_base = OTHER; note = 2'-O-methyladenosine-3'-phosphate
  modified_base 19: mod_base = OTHER; note = 2'-O-methyladenosine-3'-phosphorothioate
  modified_base 20: mod_base = OTHER; note = 2'-O-methyladenosine-3'-phosphorothioate
  modified_base 21: mod_base = OTHER; note = 2'-O-methyladenosine-3'-phosphate
cagccaaaatgatggcaaaaa

SEQ ID NO: 4743 - RNA, 21 nt, synthetic construct
  source 1..21: mol_type = other RNA
  modified_base 1: mod_base = OTHER; note = 2'-O-methylcytidine-3'-phosphorothioate
  modified_base 2: mod_base = OTHER; note = 2'-O-methylcytidine-3'-phosphorothioate
  modified_base 3: mod_base = OTHER; note = 2'-O-methyladenosine-3'-phosphate
  modified_base 4: mod_base = OTHER; note = 2'-O-methyladenosine-3'-phosphate
  modified_base 5: mod_base = OTHER; note = 2'-O-methyluridine-3'-phosphate
  modified_base 6: mod_base = OTHER; note = 2'-O-methyluridine-3'-phosphate
  modified_base 7: mod_base = OTHER; note = 2'-fluorouridine-3'-phosphate
  modified_base 8: mod_base = OTHER; note = 2'-O-methyluridine-3'-phosphate
  modified_base 9: mod_base = OTHER; note = 2'-fluorouridine-3'-phosphate
  modified_base 10: mod_base = OTHER; note = 2'-fluoroguanosine-3'-phosphate
  modified_base 11: mod_base = OTHER; note = 2'-fluoroadenosine-3'-phosphate
  modified_base 12: mod_base = OTHER; note = 2'-O-methyladenosine-3'-phosphate
  modified_base 13: mod_base = OTHER; note = 2'-O-methylcytidine-3'-phosphate
  modified_base 14: mod_base = OTHER; note = 2'-O-methyluridine-3'-phosphate
  modified_base 15: mod_base = OTHER; note = 2'-O-methyluridine-3'-phosphate
  modified_base 16: mod_base = OTHER; note = 2'-O-methylguanosine-3'-phosphate
  modified_base 17: mod_base = OTHER; note = 2'-O-methyluridine-3'-phosphate
  modified_base 18: mod_base = OTHER; note = 2'-O-methyladenosine-3'-phosphate
  modified_base 19: mod_base = OTHER; note = 2'-O-methylguanosine-3'-phosphorothioate
  modified_base 20: mod_base = OTHER; note = 2'-O-methyladenosine-3'-phosphorothioate
  modified_base 21: mod_base = OTHER; note = 2'-O-methyladenosine-3'-phosphate
ccaatttttgaacttgtagaa

SEQ ID NO: 4744 - RNA, 21 nt, synthetic construct
  source 1..21: mol_type = other RNA
  modified_base 1: mod_base = OTHER; note = 2'-O-methyladenosine-3'-phosphorothioate
  modified_base 2: mod_base = OTHER; note = 2'-O-methyluridine-3'-phosphorothioate
  modified_base 3: mod_base = OTHER; note = 2'-O-methyladenosine-3'-phosphate
  modified_base 4: mod_base = OTHER; note = 2'-O-methylguanosine-3'-phosphate
  modified_base 5: mod_base = OTHER; note = 2'-O-methylguanosine-3'-phosphate
  modified_base 6: mod_base = OTHER; note = 2'-O-methyladenosine-3'-phosphate
  modified_base 7: mod_base = OTHER; note = 2'-fluoroadenosine-3'-phosphate
  modified_base 8: mod_base = OTHER; note = 2'-O-methyluridine-3'-phosphate
  modified_base 9: mod_base = OTHER; note = 2'-fluoroadenosine-3'-phosphate
  modified_base 10: mod_base = OTHER; note = 2'-fluoroguanosine-3'-phosphate
  modified_base 11: mod_base = OTHER; note = 2'-fluorouridine-3'-phosphate
  modified_base 12: mod_base = OTHER; note = 2'-O-methyluridine-3'-phosphate
  modified_base 13: mod_base = OTHER; note = 2'-O-methyluridine-3'-phosphate
  modified_base 14: mod_base = OTHER; note = 2'-O-methylguanosine-3'-phosphate
  modified_base 15: mod_base = OTHER; note = 2'-O-methylcytidine-3'-phosphate
  modified_base 16: mod_base = OTHER; note = 2'-O-methylcytidine-3'-phosphate
  modified_base 17: mod_base = OTHER; note = 2'-O-methyladenosine-3'-phosphate
  modified_base 18: mod_base = OTHER; note = 2'-O-methyladenosine-3'-phosphate
  modified_base 19: mod_base = OTHER; note = 2'-O-methylcytidine-3'-phosphorothioate
  modified_base 20: mod_base = OTHER; note = 2'-O-methyluridine-3'-phosphorothioate
  modified_base 21: mod_base = OTHER; note = 2'-O-methyladenosine-3'-phosphate
ataggaatagtttgccaacta

SEQ ID NO: 4745 - RNA, 21 nt, synthetic construct
  source 1..21: mol_type = other RNA
  modified_base 1: mod_base = OTHER; note = 2'-O-methyluridine-3'-phosphorothioate
  modified_base 2: mod_base = OTHER; note = 2'-O-methyluridine-3'-phosphorothioate
  modified_base 3: mod_base = OTHER; note = 2'-O-methyluridine-3'-phosphate
  modified_base 4: mod_base = OTHER; note = 2'-O-methylguanosine-3'-phosphate
  modified_base 5: mod_base = OTHER; note = 2'-O-methyladenosine-3'-phosphate
  modified_base 6: mod_base = OTHER; note = 2'-O-methyladenosine-3'-phosphate
  modified_base 7: mod_base = OTHER; note = 2'-fluorouridine-3'-phosphate
  modified_base 8: mod_base = OTHER; note = 2'-O-methylguanosine-3'-phosphate
  modified_base 9: mod_base = OTHER; note = 2'-fluorouridine-3'-phosphate
  modified_base 10: mod_base = OTHER; note = 2'-fluorouridine-3'-phosphate
  modified_base 11: mod_base = OTHER; note = 2'-fluorouridine-3'-phosphate
  modified_base 12: mod_base = OTHER; note = 2'-O-methyluridine-3'-phosphate
  modified_base 13: mod_base = OTHER; note = 2'-O-methylguanosine-3'-phosphate
  modified_base 14: mod_base = OTHER; note = 2'-O-methylguanosine-3'-phosphate
  modified_base 15: mod_base = OTHER; note = 2'-O-methyladenosine-3'-phosphate
  modified_base 16: mod_base = OTHER; note = 2'-O-methylguanosine-3'-phosphate
  modified_base 17: mod_base = OTHER; note = 2'-O-methyladenosine-3'-phosphate
  modified_base 18: mod_base = OTHER; note = 2'-O-methyladenosine-3'-phosphate
  modified_base 19: mod_base = OTHER; note = 2'-O-methyladenosine-3'-phosphorothioate
  modified_base 20: mod_base = OTHER; note = 2'-O-methyladenosine-3'-phosphorothioate
  modified_base 21: mod_base = OTHER; note = 2'-O-methyladenosine-3'-phosphate
tttgaatgttttggagaaaaa

SEQ ID NO: 4746 - RNA, 21 nt, synthetic construct
  source 1..21: mol_type = other RNA
  modified_base 1: mod_base = OTHER; note = 2'-O-methylguanosine-3'-phosphorothioate
  modified_base 2: mod_base = OTHER; note = 2'-O-methyluridine-3'-phosphorothioate
  modified_base 3: mod_base = OTHER; note = 2'-O-methylcytidine-3'-phosphate
  modified_base 4: mod_base = OTHER; note = 2'-O-methyladenosine-3'-phosphate
  modified_base 5: mod_base = OTHER; note = 2'-O-methyladenosine-3'-phosphate
  modified_base 6: mod_base = OTHER; note = 2'-O-methyluridine-3'-phosphate
  modified_base 7: mod_base = OTHER; note = 2'-fluoroadenosine-3'-phosphate
  modified_base 8: mod_base = OTHER; note = 2'-O-methyluridine-3'-phosphate
  modified_base 9: mod_base = OTHER; note = 2'-fluorouridine-3'-phosphate
  modified_base 10: mod_base = OTHER; note = 2'-fluorouridine-3'-phosphate
  modified_base 11: mod_base = OTHER; note = 2'-fluoroadenosine-3'-phosphate
  modified_base 12: mod_base = OTHER; note = 2'-O-methyladenosine-3'-phosphate
  modified_base 13: mod_base = OTHER; note = 2'-O-methyluridine-3'-phosphate
  modified_base 14: mod_base = OTHER; note = 2'-O-methylguanosine-3'-phosphate
  modified_base 15: mod_base = OTHER; note = 2'-O-methyladenosine-3'-phosphate
  modified_base 16: mod_base = OTHER; note = 2'-O-methyladenosine-3'-phosphate
  modified_base 17: mod_base = OTHER; note = 2'-O-methyluridine-3'-phosphate
  modified_base 18: mod_base = OTHER; note = 2'-O-methylcytidine-3'-phosphate
  modified_base 19: mod_base = OTHER; note = 2'-O-methyladenosine-3'-phosphorothioate
  modified_base 20: mod_base = OTHER; note = 2'-O-methylcytidine-3'-phosphorothioate
  modified_base 21: mod_base = OTHER; note = 2'-O-methyladenosine-3'-phosphate
gtcaatatttaatgaatcaca

SEQ ID NO: 4747 - RNA, 21 nt, synthetic construct
  source 1..21: mol_type = other RNA
  modified_base 1: mod_base = OTHER; note = 2'-O-methyluridine-3'-phosphorothioate
  modified_base 2: mod_base = OTHER; note = 2'-O-methylguanosine-3'-phosphorothioate
  modified_base 3: mod_base = OTHER; note = 2'-O-methyladenosine-3'-phosphate
  modified_base 4: mod_base = OTHER; note = 2'-O-methylguanosine-3'-phosphate
  modified_base 5: mod_base = OTHER; note = 2'-O-methyladenosine-3'-phosphate
  modified_base 6: mod_base = OTHER; note = 2'-O-methyladenosine-3'-phosphate
  modified_base 7: mod_base = OTHER; note = 2'-fluorouridine-3'-phosphate
  modified_base 8: mod_base = OTHER; note = 2'-O-methyladenosine-3'-phosphate
  modified_base 9: mod_base = OTHER; note = 2'-fluorouridine-3'-phosphate
  modified_base 10: mod_base = OTHER; note = 2'-fluoroadenosine-3'-phosphate
  modified_base 11: mod_base = OTHER; note = 2'-fluorouridine-3'-phosphate
  modified_base 12: mod_base = OTHER; note = 2'-O-methyluridine-3'-phosphate
  modified_base 13: mod_base = OTHER; note = 2'-O-methyladenosine-3'-phosphate
  modified_base 14: mod_base = OTHER; note = 2'-O-methyladenosine-3'-phosphate
  modified_base 15: mod_base = OTHER; note = 2'-O-methyladenosine-3'-phosphate
  modified_base 16: mod_base = OTHER; note = 2'-O-methyluridine-3'-phosphate
  modified_base 17: mod_base = OTHER; note = 2'-O-methylguanosine-3'-phosphate
  modified_base 18: mod_base = OTHER; note = 2'-O-methylcytidine-3'-phosphate
  modified_base 19: mod_base = OTHER; note = 2'-O-methyladenosine-3'-phosphorothioate
  modified_base 20: mod_base = OTHER; note = 2'-O-methylcytidine-3'-phosphorothioate
  modified_base 21: mod_base = OTHER; note = 2'-O-methyladenosine-3'-phosphate
tgagaatatattaaatgcaca

SEQ ID NO: 4748 - RNA, 21 nt, synthetic construct
  source 1..21: mol_type = other RNA
  modified_base 1: mod_base = OTHER; note = 2'-O-methyluridine-3'-phosphorothioate
  modified_base 2: mod_base = OTHER; note = 2'-O-methyladenosine-3'-phosphorothioate
  modified_base 3: mod_base = OTHER; note = 2'-O-methyladenosine-3'-phosphate
  modified_base 4: mod_base = OTHER; note = 2'-O-methylcytidine-3'-phosphate
  modified_base 5: mod_base = OTHER; note = 2'-O-methyladenosine-3'-phosphate
  modified_base 6: mod_base = OTHER; note = 2'-O-methyladenosine-3'-phosphate
  modified_base 7: mod_base = OTHER; note = 2'-fluoroguanosine-3'-phosphate
  modified_base 8: mod_base = OTHER; note = 2'-O-methylguanosine-3'-phosphate
  modified_base 9: mod_base = OTHER; note = 2'-fluoroguanosine-3'-phosphate
  modified_base 10: mod_base = OTHER; note = 2'-fluoroadenosine-3'-phosphate
  modified_base 11: mod_base = OTHER; note = 2'-fluorocytidine-3'-phosphate
  modified_base 12: mod_base = OTHER; note = 2'-O-methyluridine-3'-phosphate
  modified_base 13: mod_base = OTHER; note = 2'-O-methyladenosine-3'-phosphate
  modified_base 14: mod_base = OTHER; note = 2'-O-methyladenosine-3'-phosphate
  modified_base 15: mod_base = OTHER; note = 2'-O-methyladenosine-3'-phosphate
  modified_base 16: mod_base = OTHER; note = 2'-O-methyluridine-3'-phosphate
  modified_base 17: mod_base = OTHER; note = 2'-O-methyladenosine-3'-phosphate
  modified_base 18: mod_base = OTHER; note = 2'-O-methylguanosine-3'-phosphate
  modified_base 19: mod_base = OTHER; note = 2'-O-methylguanosine-3'-phosphorothioate
  modified_base 20: mod_base = OTHER; note = 2'-O-methyladenosine-3'-phosphorothioate
  modified_base 21: mod_base = OTHER; note = 2'-O-methyladenosine-3'-phosphate
taacaagggactaaataggaa

SEQ ID NO: 4749 - RNA, 21 nt, synthetic construct
  source 1..21: mol_type = other RNA
  modified_base 1: mod_base = OTHER; note = 2'-O-methylguanosine-3'-phosphorothioate
  modified_base 2: mod_base = OTHER; note = 2'-O-methylguanosine-3'-phosphorothioate
  modified_base 3: mod_base = OTHER; note = 2'-O-methylcytidine-3'-phosphate
  modified_base 4: mod_base = OTHER; note = 2'-O-methyluridine-3'-phosphate
  modified_base 5: mod_base = OTHER; note = 2'-O-methyluridine-3'-phosphate
  modified_base 6: mod_base = OTHER; note = 2'-O-methylcytidine-3'-phosphate
  modified_base 7: mod_base = OTHER; note = 2'-fluorouridine-3'-phosphate
  modified_base 8: mod_base = OTHER; note = 2'-O-methyluridine-3'-phosphate
  modified_base 9: mod_base = OTHER; note = 2'-fluorocytidine-3'-phosphate
  modified_base 10: mod_base = OTHER; note = 2'-fluorouridine-3'-phosphate
  modified_base 11: mod_base = OTHER; note = 2'-fluorouridine-3'-phosphate
  modified_base 12: mod_base = OTHER; note = 2'-O-methylcytidine-3'-phosphate
  modified_base 13: mod_base = OTHER; note = 2'-O-methylcytidine-3'-phosphate
  modified_base 14: mod_base = OTHER; note = 2'-O-methyladenosine-3'-phosphate
  modified_base 15: mod_base = OTHER; note = 2'-O-methylcytidine-3'-phosphate
  modified_base 16: mod_base = OTHER; note = 2'-O-methylcytidine-3'-phosphate
  modified_base 17: mod_base = OTHER; note = 2'-O-methyluridine-3'-phosphate
  modified_base 18: mod_base = OTHER; note = 2'-O-methylcytidine-3'-phosphate
  modified_base 19: mod_base = OTHER; note = 2'-O-methyluridine-3'-phosphorothioate
  modified_base 20: mod_base = OTHER; note = 2'-O-methylguanosine-3'-phosphorothioate
  modified_base 21: mod_base = OTHER; note = 2'-O-methyladenosine-3'-phosphate
ggcttcttcttccacctctga

SEQ ID NO: 4750 - RNA, 21 nt, synthetic construct
  source 1..21: mol_type = other RNA
  modified_base 1: mod_base = OTHER; note = 2'-O-methyluridine-3'-phosphorothioate
  modified_base 2: mod_base = OTHER; note = 2'-O-methyluridine-3'-phosphorothioate
  modified_base 3: mod_base = OTHER; note = 2'-O-methylguanosine-3'-phosphate
  modified_base 4: mod_base = OTHER; note = 2'-O-methylguanosine-3'-phosphate
  modified_base 5: mod_base = OTHER; note = 2'-O-methyladenosine-3'-phosphate
  modified_base 6: mod_base = OTHER; note = 2'-O-methyladenosine-3'-phosphate
  modified_base 7: mod_base = OTHER; note = 2'-fluorocytidine-3'-phosphate
  modified_base 8: mod_base = OTHER; note = 2'-O-methyladenosine-3'-phosphate
  modified_base 9: mod_base = OTHER; note = 2'-fluorouridine-3'-phosphate
  modified_base 10: mod_base = OTHER; note = 2'-fluoroguanosine-3'-phosphate
  modified_base 11: mod_base = OTHER; note = 2'-fluorouridine-3'-phosphate
  modified_base 12: mod_base = OTHER; note = 2'-O-methylguanosine-3'-phosphate
  modified_base 13: mod_base = OTHER; note = 2'-O-methylguanosine-3'-phosphate
  modified_base 14: mod_base = OTHER; note = 2'-O-methyluridine-3'-phosphate
  modified_base 15: mod_base = OTHER; note = 2'-O-methyluridine-3'-phosphate
  modified_base 16: mod_base = OTHER; note = 2'-O-methyladenosine-3'-phosphate
  modified_base 17: mod_base = OTHER; note = 2'-O-methyluridine-3'-phosphate
  modified_base 18: mod_base = OTHER; note = 2'-O-methylcytidine-3'-phosphate
  modified_base 19: mod_base = OTHER; note = 2'-O-methyluridine-3'-phosphorothioate
  modified_base 20: mod_base = OTHER; note = 2'-O-methyluridine-3'-phosphorothioate
  modified_base 21: mod_base = OTHER; note = 2'-O-methyladenosine-3'-phosphate
ttggaacatgtggttatctta

SEQ ID NO: 4751 - RNA, 21 nt, synthetic construct
  source 1..21: mol_type = other RNA
  modified_base 1: mod_base = OTHER; note = 2'-O-methylcytidine-3'-phosphorothioate
  modified_base 2: mod_base = OTHER; note = 2'-O-methyladenosine-3'-phosphorothioate
  modified_base 3: mod_base = OTHER; note = 2'-O-methylguanosine-3'-phosphate
  modified_base 4: mod_base = OTHER; note = 2'-O-methyladenosine-3'-phosphate
  modified_base 5: mod_base = OTHER; note = 2'-O-methylguanosine-3'-phosphate
  modified_base 6: mod_base = OTHER; note = 2'-O-methyladenosine-3'-phosphate
  modified_base 7: mod_base = OTHER; note = 2'-fluoroadenosine-3'-phosphate
  modified_base 8: mod_base = OTHER; note = 2'-O-methylcytidine-3'-phosphate
  modified_base 9: mod_base = OTHER; note = 2'-fluoroadenosine-3'-phosphate
  modified_base 10: mod_base = OTHER; note = 2'-fluoroguanosine-3'-phosphate
  modified_base 11: mod_base = OTHER; note = 2'-fluoroadenosine-3'-phosphate
  modified_base 12: mod_base = OTHER; note = 2'-O-methyluridine-3'-phosphate
  modified_base 13: mod_base = OTHER; note = 2'-O-methylguanosine-3'-phosphate
  modified_base 14: mod_base = OTHER; note = 2'-O-methyladenosine-3'-phosphate
  modified_base 15: mod_base = OTHER; note = 2'-O-methyluridine-3'-phosphate
  modified_base 16: mod_base = OTHER; note = 2'-O-methyluridine-3'-phosphate
  modified_base 17: mod_base = OTHER; note = 2'-O-methylcytidine-3'-phosphate
  modified_base 18: mod_base = OTHER; note = 2'-O-methyluridine-3'-phosphate
  modified_base 19: mod_base = OTHER; note = 2'-O-methyluridine-3'-phosphorothioate
  modified_base 20: mod_base = OTHER; note = 2'-O-methyluridine-3'-phosphorothioate
  modified_base 21: mod_base = OTHER; note = 2'-O-methyladenosine-3'-phosphate
cagagaacagatgattcttta

SEQ ID NO: 4752 - RNA, 21 nt, synthetic construct
  source 1..21: mol_type = other RNA
  modified_base 1: mod_base = OTHER; note = 2'-O-methylcytidine-3'-phosphorothioate
  modified_base 2: mod_base = OTHER; note = 2'-O-methyluridine-3'-phosphorothioate
  modified_base 3: mod_base = OTHER; note = 2'-O-methylguanosine-3'-phosphate
  modified_base 4: mod_base = OTHER; note = 2'-O-methyluridine-3'-phosphate
  modified_base 5: mod_base = OTHER; note = 2'-O-methyluridine-3'-phosphate
  modified_base 6: mod_base = OTHER; note = 2'-O-methyladenosine-3'-phosphate
  modified_base 7: mod_base = OTHER; note = 2'-fluorouridine-3'-phosphate
  modified_base 8: mod_base = OTHER; note = 2'-O-methyluridine-3'-phosphate
  modified_base 9: mod_base = OTHER; note = 2'-fluorouridine-3'-phosphate
  modified_base 10: mod_base = OTHER; note = 2'-fluorouridine-3'-phosphate
  modified_base 11: mod_base = OTHER; note = 2'-fluoroadenosine-3'-phosphate
  modified_base 12: mod_base = OTHER; note = 2'-O-methyluridine-3'-phosphate
  modified_base 13: mod_base = OTHER; note = 2'-O-methyluridine-3'-phosphate
  modified_base 14: mod_base = OTHER; note = 2'-O-methylguanosine-3'-phosphate
  modified_base 15: mod_base = OTHER; note = 2'-O-methylguanosine-3'-phosphate
  modified_base 16: mod_base = OTHER; note = 2'-O-methylguanosine-3'-phosphate
  modified_base 17: mod_base = OTHER; note = 2'-O-methyluridine-3'-phosphate
  modified_base 18: mod_base = OTHER; note = 2'-O-methyluridine-3'-phosphate
  modified_base 19: mod_base = OTHER; note = 2'-O-methyluridine-3'-phosphorothioate
  modified_base 20: mod_base = OTHER; note = 2'-O-methyluridine-3'-phosphorothioate
  modified_base 21: mod_base = OTHER; note = 2'-O-methyladenosine-3'-phosphate
ctgttattttattgggtttta

SEQ ID NO: 4753 - RNA, 21 nt, synthetic construct
  source 1..21: mol_type = other RNA
  modified_base 1: mod_base = OTHER; note = 2'-O-methyladenosine-3'-phosphorothioate
  modified_base 2: mod_base = OTHER; note = 2'-O-methyluridine-3'-phosphorothioate
  modified_base 3: mod_base = OTHER; note = 2'-O-methylguanosine-3'-phosphate
  modified_base 4: mod_base = OTHER; note = 2'-O-methyladenosine-3'-phosphate
  modified_base 5: mod_base = OTHER; note = 2'-O-methyladenosine-3'-phosphate
  modified_base 6: mod_base = OTHER; note = 2'-O-methylguanosine-3'-phosphate
  modified_base 7: mod_base = OTHER; note = 2'-fluoroadenosine-3'-phosphate
  modified_base 8: mod_base = OTHER; note = 2'-O-methyladenosine-3'-phosphate
  modified_base 9: mod_base = OTHER; note = 2'-fluoroguanosine-3'-phosphate
  modified_base 10: mod_base = OTHER; note = 2'-fluorocytidine-3'-phosphate
  modified_base 11: mod_base = OTHER; note = 2'-fluoroadenosine-3'-phosphate
  modified_base 12: mod_base = OTHER; note = 2'-O-methyladenosine-3'-phosphate
  modified_base 13: mod_base = OTHER; note = 2'-O-methyladenosine-3'-phosphate
  modified_base 14: mod_base = OTHER; note = 2'-O-methyluridine-3'-phosphate
  modified_base 15: mod_base = OTHER; note = 2'-O-methylcytidine-3'-phosphate
  modified_base 16: mod_base = OTHER; note = 2'-O-methyluridine-3'-phosphate
  modified_base 17: mod_base = OTHER; note = 2'-O-methyluridine-3'-phosphate
  modified_base 18: mod_base = OTHER; note = 2'-O-methylguanosine-3'-phosphate
  modified_base 19: mod_base = OTHER; note = 2'-O-methylguanosine-3'-phosphorothioate
  modified_base 20: mod_base = OTHER; note = 2'-O-methyluridine-3'-phosphorothioate
  modified_base 21: mod_base = OTHER; note = 2'-O-methyladenosine-3'-phosphate
atgaagaagcaaatcttggta

SEQ ID NO: 4754 - RNA, 21 nt, synthetic construct
  source 1..21: mol_type = other RNA
  modified_base 1: mod_base = OTHER; note = 2'-O-methyluridine-3'-phosphorothioate
  modified_base 2: mod_base = OTHER; note = 2'-O-methyluridine-3'-phosphorothioate
  modified_base 3: mod_base = OTHER; note = 2'-O-methyluridine-3'-phosphate
  modified_base 4: mod_base = OTHER; note = 2'-O-methylguanosine-3'-phosphate
  modified_base 5: mod_base = OTHER; note = 2'-O-methylguanosine-3'-phosphate
  modified_base 6: mod_base = OTHER; note = 2'-O-methyladenosine-3'-phosphate
  modified_base 7: mod_base = OTHER; note = 2'-fluoroadenosine-3'-phosphate
  modified_base 8: mod_base = OTHER; note = 2'-O-methyluridine-3'-phosphate
  modified_base 9: mod_base = OTHER; note = 2'-fluorocytidine-3'-phosphate
  modified_base 10: mod_base = OTHER; note = 2'-fluoroadenosine-3'-phosphate
  modified_base 11: mod_base = OTHER; note = 2'-fluorouridine-3'-phosphate
  modified_base 12: mod_base = OTHER; note = 2'-O-methylguanosine-3'-phosphate
  modified_base 13: mod_base = OTHER; note = 2'-O-methylcytidine-3'-phosphate
  modified_base 14: mod_base = OTHER; note = 2'-O-methyladenosine-3'-phosphate
  modified_base 15: mod_base = OTHER; note = 2'-O-methyladenosine-3'-phosphate
  modified_base 16: mod_base = OTHER; note = 2'-O-methyluridine-3'-phosphate
  modified_base 17: mod_base = OTHER; note = 2'-O-methyluridine-3'-phosphate
  modified_base 18: mod_base = OTHER; note = 2'-O-methyluridine-3'-phosphate
  modified_base 19: mod_base = OTHER; note = 2'-O-methyluridine-3'-phosphorothioate
  modified_base 20: mod_base = OTHER; note = 2'-O-methylguanosine-3'-phosphorothioate
  modified_base 21: mod_base = OTHER; note = 2'-O-methyladenosine-3'-phosphate
tttggaatcatgcaattttga

SEQ ID NO: 4755 - RNA, 21 nt, synthetic construct
  source 1..21: mol_type = other RNA
  modified_base 1: mod_base = OTHER; note = 2'-O-methylcytidine-3'-phosphorothioate
  modified_base 2: mod_base = OTHER; note = 2'-O-methyladenosine-3'-phosphorothioate
  modified_base 3: mod_base = OTHER; note = 2'-O-methyladenosine-3'-phosphate
  modified_base 4: mod_base = OTHER; note = 2'-O-methyluridine-3'-phosphate
  modified_base 5: mod_base = OTHER; note = 2'-O-methylguanosine-3'-phosphate
  modified_base 6: mod_base = OTHER; note = 2'-O-methyluridine-3'-phosphate
  modified_base 7: mod_base = OTHER; note = 2'-fluorouridine-3'-phosphate
  modified_base 8: mod_base = OTHER; note = 2'-O-methyluridine-3'-phosphate
  modified_base 9: mod_base = OTHER; note = 2'-fluorouridine-3'-phosphate
  modified_base 10: mod_base = OTHER; note = 2'-fluoroguanosine-3'-phosphate
  modified_base 11: mod_base = OTHER; note = 2'-fluorouridine-3'-phosphate
  modified_base 12: mod_base = OTHER; note = 2'-O-methyladenosine-3'-phosphate
  modified_base 13: mod_base = OTHER; note = 2'-O-methyladenosine-3'-phosphate
  modified_base 14: mod_base = OTHER; note = 2'-O-methyladenosine-3'-phosphate
  modified_base 15: mod_base = OTHER; note = 2'-O-methylcytidine-3'-phosphate
  modified_base 16: mod_base = OTHER; note = 2'-O-methyluridine-3'-phosphate
  modified_base 17: mod_base = OTHER; note = 2'-O-methyluridine-3'-phosphate
  modified_base 18: mod_base = OTHER; note = 2'-O-methylguanosine-3'-phosphate
  modified_base 19: mod_base = OTHER; note = 2'-O-methylcytidine-3'-phosphorothioate
  modified_base 20: mod_base = OTHER; note = 2'-O-methyluridine-3'-phosphorothioate
  modified_base 21: mod_base = OTHER; note = 2'-O-methyladenosine-3'-phosphate
caatgttttgtaaacttgcta

SEQ ID NO: 4756 - RNA, 21 nt, synthetic construct
  source 1..21: mol_type = other RNA
  modified_base 1: mod_base = OTHER; note = 2'-O-methylguanosine-3'-phosphorothioate
  modified_base 2: mod_base = OTHER; note = 2'-O-methylguanosine-3'-phosphorothioate
  modified_base 3: mod_base = OTHER; note = 2'-O-methyladenosine-3'-phosphate
  modified_base 4: mod_base = OTHER; note = 2'-O-methyluridine-3'-phosphate
  modified_base 5: mod_base = OTHER; note = 2'-O-methylcytidine-3'-phosphate
  modified_base 6: mod_base = OTHER; note = 2'-O-methylguanosine-3'-phosphate
  modified_base 7: mod_base = OTHER; note = 2'-fluorouridine-3'-phosphate
  modified_base 8: mod_base = OTHER; note = 2'-O-methyladenosine-3'-phosphate
  modified_base 9: mod_base = OTHER; note = 2'-fluoroadenosine-3'-phosphate
  modified_base 10: mod_base = OTHER; note = 2'-fluorouridine-3'-phosphate
  modified_base 11: mod_base = OTHER; note = 2'-fluoroadenosine-3'-phosphate
  modified_base 12: mod_base = OTHER; note = 2'-O-methyladenosine-3'-phosphate
  modified_base 13: mod_base = OTHER; note = 2'-O-methyluridine-3'-phosphate
  modified_base 14: mod_base = OTHER; note = 2'-O-methylguanosine-3'-phosphate
  modified_base 15: mod_base = OTHER; note = 2'-O-methylguanosine-3'-phosphate
  modified_base 16: mod_base = OTHER; note = 2'-O-methylcytidine-3'-phosphate
  modified_base 17: mod_base = OTHER; note = 2'-O-methyladenosine-3'-phosphate
  modified_base 18: mod_base = OTHER; note = 2'-O-methyladenosine-3'-phosphate
  modified_base 19: mod_base = OTHER; note = 2'-O-methyladenosine-3'-phosphorothioate
  modified_base 20: mod_base = OTHER; note = 2'-O-methyladenosine-3'-phosphorothioate
  modified_base 21: mod_base = OTHER; note = 2'-O-methyladenosine-3'-phosphate
ggatcgtaataatggcaaaaa

SEQ ID NO: 4757 - RNA, 21 nt, synthetic construct
  source 1..21: mol_type = other RNA
  modified_base 1: mod_base = OTHER; note = 2'-O-methylguanosine-3'-phosphorothioate
  modified_base 2: mod_base = OTHER; note = 2'-O-methyluridine-3'-phosphorothioate
  modified_base 3: mod_base = OTHER; note = 2'-O-methylguanosine-3'-phosphate
  modified_base 4: mod_base = OTHER; note = 2'-O-methylcytidine-3'-phosphate
  modified_base 5: mod_base = OTHER; note = 2'-O-methyluridine-3'-phosphate
  modified_base 6: mod_base = OTHER; note = 2'-O-methyluridine-3'-phosphate
  modified_base 7: mod_base = OTHER; note = 2'-fluorouridine-3'-phosphate
  modified_base 8: mod_base = OTHER; note = 2'-O-methylcytidine-3'-phosphate
  modified_base 9: mod_base = OTHER; note = 2'-fluorouridine-3'-phosphate
  modified_base 10: mod_base = OTHER; note = 2'-fluorocytidine-3'-phosphate
  modified_base 11: mod_base = OTHER; note = 2'-fluoroadenosine-3'-phosphate
  modified_base 12: mod_base = OTHER; note = 2'-O-methylguanosine-3'-phosphate
  modified_base 13: mod_base = OTHER; note = 2'-O-methylguanosine-3'-phosphate
  modified_base 14: mod_base = OTHER; note = 2'-O-methyluridine-3'-phosphate
  modified_base 15: mod_base = OTHER; note = 2'-O-methyluridine-3'-phosphate
  modified_base 16: mod_base = OTHER; note = 2'-O-methylcytidine-3'-phosphate
  modified_base 17: mod_base = OTHER; note = 2'-O-methylcytidine-3'-phosphate
  modified_base 18: mod_base = OTHER; note = 2'-O-methyluridine-3'-phosphate
  modified_base 19: mod_base = OTHER; note = 2'-O-methylguanosine-3'-phosphorothioate
  modified_base 20: mod_base = OTHER; note = 2'-O-methyluridine-3'-phosphorothioate
  modified_base 21: mod_base = OTHER; note = 2'-O-methyladenosine-3'-phosphate
gtgctttctcaggttcctgta

SEQ ID NO: 4758 - RNA, 21 nt, synthetic construct
  source 1..21: mol_type = other RNA
  modified_base 1: mod_base = OTHER; note = 2'-O-methyladenosine-3'-phosphorothioate
  modified_base 2: mod_base = OTHER; note = 2'-O-methyluridine-3'-phosphorothioate
  modified_base 3: mod_base = OTHER; note = 2'-O-methylguanosine-3'-phosphate
  modified_base 4: mod_base = OTHER; note = 2'-O-methyladenosine-3'-phosphate
  modified_base 5: mod_base = OTHER; note = 2'-O-methyluridine-3'-phosphate
  modified_base 6: mod_base = OTHER; note = 2'-O-methyladenosine-3'-phosphate
  modified_base 7: mod_base = OTHER; note = 2'-fluorocytidine-3'-phosphate
  modified_base 8: mod_base = OTHER; note = 2'-O-methyluridine-3'-phosphate
  modified_base 9: mod_base = OTHER; note = 2'-fluoroguanosine-3'-phosphate
  modified_base 10: mod_base = OTHER; note = 2'-fluoroadenosine-3'-phosphate
  modified_base 11: mod_base = OTHER; note = 2'-fluoroadenosine-3'-phosphate
  modified_base 12: mod_base = OTHER; note = 2'-O-methyladenosine-3'-phosphate
  modified_base 13: mod_base = OTHER; note = 2'-O-methylguanosine-3'-phosphate
  modified_base 14: mod_base = OTHER; note = 2'-O-methyluridine-3'-phosphate
  modified_base 15: mod_base = OTHER; note = 2'-O-methylguanosine-3'-phosphate
  modified_base 16: mod_base = OTHER; note = 2'-O-methylguanosine-3'-phosphate
  modified_base 17: mod_base = OTHER; note = 2'-O-methyluridine-3'-phosphate
  modified_base 18: mod_base = OTHER; note = 2'-O-methylguanosine-3'-phosphate
  modified_base 19: mod_base = OTHER; note = 2'-O-methyladenosine-3'-phosphorothioate
  modified_base 20: mod_base = OTHER; note = 2'-O-methyluridine-3'-phosphorothioate
  modified_base 21: mod_base = OTHER; note = 2'-O-methyladenosine-3'-phosphate
atgatactgaaagtggtgata

SEQ ID NO: 4759 - RNA, 21 nt, synthetic construct
  source 1..21: mol_type = other RNA
  modified_base 1: mod_base = OTHER; note = 2'-O-methyluridine-3'-phosphorothioate
  modified_base 2: mod_base = OTHER; note = 2'-O-methylcytidine-3'-phosphorothioate
  modified_base 3: mod_base = OTHER; note = 2'-O-methyladenosine-3'-phosphate
  modified_base 4: mod_base = OTHER; note = 2'-O-methylcytidine-3'-phosphate
  modified_base 5: mod_base = OTHER; note = 2'-O-methyluridine-3'-phosphate
  modified_base 6: mod_base = OTHER; note = 2'-O-methylguanosine-3'-phosphate
  modified_base 7: mod_base = OTHER; note = 2'-fluoroguanosine-3'-phosphate
  modified_base 8: mod_base = OTHER; note = 2'-O-methyladenosine-3'-phosphate
  modified_base 9: mod_base = OTHER; note = 2'-fluorocytidine-3'-phosphate
  modified_base 10: mod_base = OTHER; note = 2'-fluorocytidine-3'-phosphate
  modified_base 11: mod_base = OTHER; note = 2'-fluorouridine-3'-phosphate
  modified_base 12: mod_base = OTHER; note = 2'-O-methylguanosine-3'-phosphate
  modified_base 13: mod_base = OTHER; note = 2'-O-methyladenosine-3'-phosphate
  modified_base 14: mod_base = OTHER; note = 2'-O-methyluridine-3'-phosphate
  modified_base 15: mod_base = OTHER; note = 2'-O-methyluridine-3'-phosphate
  modified_base 16: mod_base = OTHER; note = 2'-O-methyluridine-3'-phosphate
  modified_base 17: mod_base = OTHER; note = 2'-O-methyluridine-3'-phosphate
  modified_base 18: mod_base = OTHER; note = 2'-O-methyladenosine-3'-phosphate
  modified_base 19: mod_base = OTHER; note = 2'-O-methylguanosine-3'-phosphorothioate
  modified_base 20: mod_base = OTHER; note = 2'-O-methyluridine-3'-phosphorothioate
  modified_base 21: mod_base = OTHER; note = 2'-O-methyladenosine-3'-phosphate
tcactggacctgattttagta

SEQ ID NO: 4760 - RNA, 21 nt, synthetic construct
  source 1..21: mol_type = other RNA
  modified_base 1: mod_base = OTHER; note = 2'-O-methylguanosine-3'-phosphorothioate
  modified_base 2: mod_base = OTHER; note = 2'-O-methyladenosine-3'-phosphorothioate
  modified_base 3: mod_base = OTHER; note = 2'-O-methyladenosine-3'-phosphate
  modified_base 4: mod_base = OTHER; note = 2'-O-methylcytidine-3'-phosphate
  modified_base 5: mod_base = OTHER; note = 2'-O-methyluridine-3'-phosphate
  modified_base 6: mod_base = OTHER; note = 2'-O-methyluridine-3'-phosphate
  modified_base 7: mod_base = OTHER; note = 2'-fluorouridine-3'-phosphate
  modified_base 8: mod_base = OTHER; note = 2'-O-methyluridine-3'-phosphate
  modified_base 9: mod_base = OTHER; note = 2'-fluorouridine-3'-phosphate
  modified_base 10: mod_base = OTHER; note = 2'-fluoroguanosine-3'-phosphate
  modified_base 11: mod_base = OTHER; note = 2'-fluorocytidine-3'-phosphate
  modified_base 12: mod_base = OTHER; note = 2'-O-methyluridine-3'-phosphate
  modified_base 13: mod_base = OTHER; note = 2'-O-methyluridine-3'-phosphate
  modified_base 14: mod_base = OTHER; note = 2'-O-methyluridine-3'-phosphate
  modified_base 15: mod_base = OTHER; note = 2'-O-methyluridine-3'-phosphate
  modified_base 16: mod_base = OTHER; note = 2'-O-methyladenosine-3'-phosphate
  modified_base 17: mod_base = OTHER; note = 2'-O-methyluridine-3'-phosphate
  modified_base 18: mod_base = OTHER; note = 2'-O-methylguanosine-3'-phosphate
  modified_base 19: mod_base = OTHER; note = 2'-O-methyladenosine-3'-phosphorothioate
  modified_base 20: mod_base = OTHER; note = 2'-O-methyladenosine-3'-phosphorothioate
  modified_base 21: mod_base = OTHER; note = 2'-O-methyladenosine-3'-phosphate
gaactttttgcttttatgaaa

SEQ ID NO: 4761 - RNA, 21 nt, synthetic construct
  source 1..21: mol_type = other RNA
  modified_base 1: mod_base = OTHER; note = 2'-O-methylguanosine-3'-phosphorothioate
  modified_base 2: mod_base = OTHER; note = 2'-O-methyladenosine-3'-phosphorothioate
  modified_base 3: mod_base = OTHER; note = 2'-O-methyladenosine-3'-phosphate
  modified_base 4: mod_base = OTHER; note = 2'-O-methylcytidine-3'-phosphate
  modified_base 5: mod_base = OTHER; note = 2'-O-methyladenosine-3'-phosphate
  modified_base 6: mod_base = OTHER; note = 2'-O-methylcytidine-3'-phosphate
  modified_base 7: mod_base = OTHER; note = 2'-fluoroadenosine-3'-phosphate
  modified_base 8: mod_base = OTHER; note = 2'-O-methylguanosine-3'-phosphate
  modified_base 9: mod_base = OTHER; note = 2'-fluorocytidine-3'-phosphate
  modified_base 10: mod_base = OTHER; note = 2'-fluoroadenosine-3'-phosphate
  modified_base 11: mod_base = OTHER; note = 2'-fluorocytidine-3'-phosphate
  modified_base 12: mod_base = OTHER; note = 2'-O-methyladenosine-3'-phosphate
  modified_base 13: mod_base = OTHER; note = 2'-O-methylguanosine-3'-phosphate
  modified_base 14: mod_base = OTHER; note = 2'-O-methyladenosine-3'-phosphate
  modified_base 15: mod_base = OTHER; note = 2'-O-methyluridine-3'-phosphate
  modified_base 16: mod_base = OTHER; note = 2'-O-methyluridine-3'-phosphate
  modified_base 17: mod_base = OTHER; note = 2'-O-methyluridine-3'-phosphate
  modified_base 18: mod_base = OTHER; note = 2'-O-methylguanosine-3'-phosphate
  modified_base 19: mod_base = OTHER; note = 2'-O-methyluridine-3'-phosphorothioate
  modified_base 20: mod_base = OTHER; note = 2'-O-methyluridine-3'-phosphorothioate
  modified_base 21: mod_base = OTHER; note = 2'-O-methyladenosine-3'-phosphate
gaacacagcacagatttgtta

SEQ ID NO: 4762 - RNA, 21 nt, synthetic construct
  source 1..21: mol_type = other RNA
  modified_base 1: mod_base = OTHER; note = 2'-O-methyladenosine-3'-phosphorothioate
  modified_base 2: mod_base = OTHER; note = 2'-O-methyluridine-3'-phosphorothioate
  modified_base 3: mod_base = OTHER; note = 2'-O-methyladenosine-3'-phosphate
  modified_base 4: mod_base = OTHER; note = 2'-O-methyluridine-3'-phosphate
  modified_base 5: mod_base = OTHER; note = 2'-O-methylguanosine-3'-phosphate
  modified_base 6: mod_base = OTHER; note = 2'-O-methylguanosine-3'-phosphate
  modified_base 7: mod_base = OTHER; note = 2'-fluoroadenosine-3'-phosphate
  modified_base 8: mod_base = OTHER; note = 2'-O-methyladenosine-3'-phosphate
  modified_base 9: mod_base = OTHER; note = 2'-fluoroguanosine-3'-phosphate
  modified_base 10: mod_base = OTHER; note = 2'-fluoroguanosine-3'-phosphate
  modified_base 11: mod_base = OTHER; note = 2'-fluoroadenosine-3'-phosphate
  modified_base 12: mod_base = OTHER; note = 2'-O-methyladenosine-3'-phosphate
  modified_base 13: mod_base = OTHER; note = 2'-O-methyladenosine-3'-phosphate
  modified_base 14: mod_base = OTHER; note = 2'-O-methyluridine-3'-phosphate
  modified_base 15: mod_base = OTHER; note = 2'-O-methylcytidine-3'-phosphate
  modified_base 16: mod_base = OTHER; note = 2'-O-methylguanosine-3'-phosphate
  modified_base 17: mod_base = OTHER; note = 2'-O-methyluridine-3'-phosphate
  modified_base 18: mod_base = OTHER; note = 2'-O-methyladenosine-3'-phosphate
  modified_base 19: mod_base = OTHER; note = 2'-O-methylguanosine-3'-phosphorothioate
  modified_base 20: mod_base = OTHER; note = 2'-O-methyladenosine-3'-phosphorothioate
  modified_base 21: mod_base = OTHER; note = 2'-O-methyladenosine-3'-phosphate
atatggaaggaaatcgtagaa

SEQ ID NO: 4763 - RNA, 21 nt, synthetic construct
  source 1..21: mol_type = other RNA
  modified_base 1: mod_base = OTHER; note = 2'-O-methylguanosine-3'-phosphorothioate
  modified_base 2: mod_base = OTHER; note = 2'-O-methylcytidine-3'-phosphorothioate
  modified_base 3: mod_base = OTHER; note = 2'-O-methyluridine-3'-phosphate
  modified_base 4: mod_base = OTHER; note = 2'-O-methyladenosine-3'-phosphate
  modified_base 5: mod_base = OTHER; note = 2'-O-methyluridine-3'-phosphate
  modified_base 6: mod_base = OTHER; note = 2'-O-methylcytidine-3'-phosphate
  modified_base 7: mod_base = OTHER; note = 2'-fluorouridine-3'-phosphate
  modified_base 8: mod_base = OTHER; note = 2'-O-methyladenosine-3'-phosphate
  modified_base 9: mod_base = OTHER; note = 2'-fluoroadenosine-3'-phosphate
  modified_base 10: mod_base = OTHER; note = 2'-fluoroadenosine-3'-phosphate
  modified_base 11: mod_base = OTHER; note = 2'-fluorouridine-3'-phosphate
  modified_base 12: mod_base = OTHER; note = 2'-O-methylguanosine-3'-phosphate
  modified_base 13: mod_base = OTHER; note = 2'-O-methylguanosine-3'-phosphate
  modified_base 14: mod_base = OTHER; note = 2'-O-methylguanosine-3'-phosphate
  modified_base 15: mod_base = OTHER; note = 2'-O-methylcytidine-3'-phosphate
  modified_base 16: mod_base = OTHER; note = 2'-O-methylcytidine-3'-phosphate
  modified_base 17: mod_base = OTHER; note = 2'-O-methyluridine-3'-phosphate
  modified_base 18: mod_base = OTHER; note = 2'-O-methyluridine-3'-phosphate
  modified_base 19: mod_base = OTHER; note = 2'-O-methyluridine-3'-phosphorothioate
  modified_base 20: mod_base = OTHER; note = 2'-O-methyluridine-3'-phosphorothioate
  modified_base 21: mod_base = OTHER; note = 2'-O-methyladenosine-3'-phosphate
gctatctaaatgggcctttta

SEQ ID NO: 4764 - RNA, 21 nt, synthetic construct
  source 1..21: mol_type = other RNA
  modified_base 1: mod_base = OTHER; note = 2'-O-methylcytidine-3'-phosphorothioate
  modified_base 2: mod_base = OTHER; note = 2'-O-methyladenosine-3'-phosphorothioate
  modified_base 3: mod_base = OTHER; note = 2'-O-methyladenosine-3'-phosphate
  modified_base 4: mod_base = OTHER; note = 2'-O-methyladenosine-3'-phosphate
  modified_base 5: mod_base = OTHER; note = 2'-O-methyladenosine-3'-phosphate
  modified_base 6: mod_base = OTHER; note = 2'-O-methylcytidine-3'-phosphate
  modified_base 7: mod_base = OTHER; note = 2'-fluorocytidine-3'-phosphate
  modified_base 8: mod_base = OTHER; note = 2'-O-methyladenosine-3'-phosphate
  modified_base 9: mod_base = OTHER; note = 2'-fluorocytidine-3'-phosphate
  modified_base 10: mod_base = OTHER; note = 2'-fluorocytidine-3'-phosphate
  modified_base 11: mod_base = OTHER; note = 2'-fluoroadenosine-3'-phosphate
  modified_base 12: mod_base = OTHER; note = 2'-O-methyladenosine-3'-phosphate
  modified_base 13: mod_base = OTHER; note = 2'-O-methylguanosine-3'-phosphate
  modified_base 14: mod_base = OTHER; note = 2'-O-methyladenosine-3'-phosphate
  modified_base 15: mod_base = OTHER; note = 2'-O-methyladenosine-3'-phosphate
  modified_base 16: mod_base = OTHER; note = 2'-O-methylguanosine-3'-phosphate
  modified_base 17: mod_base = OTHER; note = 2'-O-methylguanosine-3'-phosphate
  modified_base 18: mod_base = OTHER; note = 2'-O-methyladenosine-3'-phosphate
  modified_base 19: mod_base = OTHER; note = 2'-O-methyladenosine-3'-phosphorothioate
  modified_base 20: mod_base = OTHER; note = 2'-O-methyladenosine-3'-phosphorothioate
  modified_base 21: mod_base = OTHER; note = 2'-O-methyladenosine-3'-phosphate
caaaaccaccaagaaggaaaa

SEQ ID NO: 4765 - RNA, 21 nt, synthetic construct
  source 1..21: mol_type = other RNA
  modified_base 1: mod_base = OTHER; note = 2'-O-methylcytidine-3'-phosphorothioate
  modified_base 2: mod_base = OTHER; note = 2'-O-methylcytidine-3'-phosphorothioate
  modified_base 3: mod_base = OTHER; note = 2'-O-methyladenosine-3'-phosphate
  modified_base 4: mod_base = OTHER; note = 2'-O-methylcytidine-3'-phosphate
  modified_base 5: mod_base = OTHER; note = 2'-O-methyladenosine-3'-phosphate
  modified_base 6: mod_base = OTHER; note = 2'-O-methylguanosine-3'-phosphate
  modified_base 7: mod_base = OTHER; note = 2'-fluoroadenosine-3'-phosphate
  modified_base 8: mod_base = OTHER; note = 2'-O-methyluridine-3'-phosphate
  modified_base 9: mod_base = OTHER; note = 2'-fluoroguanosine-3'-phosphate
  modified_base 10: mod_base = OTHER; note = 2'-fluorouridine-3'-phosphate
  modified_base 11: mod_base = OTHER; note = 2'-fluoroguanosine-3'-phosphate
  modified_base 12: mod_base = OTHER; note = 2'-O-methylcytidine-3'-phosphate
  modified_base 13: mod_base = OTHER; note = 2'-O-methyluridine-3'-phosphate
  modified_base 14: mod_base = OTHER; note = 2'-O-methyladenosine-3'-phosphate
  modified_base 15: mod_base = OTHER; note = 2'-O-methylcytidine-3'-phosphate
  modified_base 16: mod_base = OTHER; note = 2'-O-methyladenosine-3'-phosphate
  modified_base 17: mod_base = OTHER; note = 2'-O-methyluridine-3'-phosphate
  modified_base 18: mod_base = OTHER; note = 2'-O-methylguanosine-3'-phosphate
  modified_base 19: mod_base = OTHER; note = 2'-O-methylcytidine-3'-phosphorothioate
  modified_base 20: mod_base = OTHER; note = 2'-O-methyladenosine-3'-phosphorothioate
  modified_base 21: mod_base = OTHER; note = 2'-O-methyladenosine-3'-phosphate
ccacagatgtgctacatgcaa

SEQ ID NO: 4766 - RNA, 21 nt, synthetic construct
  source 1..21: mol_type = other RNA
  modified_base 1: mod_base = OTHER; note = 2'-O-methyladenosine-3'-phosphorothioate
  modified_base 2: mod_base = OTHER; note = 2'-O-methyladenosine-3'-phosphorothioate
  modified_base 3: mod_base = OTHER; note = 2'-O-methyladenosine-3'-phosphate
  modified_base 4: mod_base = OTHER; note = 2'-O-methylguanosine-3'-phosphate
  modified_base 5: mod_base = OTHER; note = 2'-O-methyluridine-3'-phosphate
  modified_base 6: mod_base = OTHER; note = 2'-O-methylcytidine-3'-phosphate
  modified_base 7: mod_base = OTHER; note = 2'-fluoroadenosine-3'-phosphate
  modified_base 8: mod_base = OTHER; note = 2'-O-methyluridine-3'-phosphate
  modified_base 9: mod_base = OTHER; note = 2'-fluoroadenosine-3'-phosphate
  modified_base 10: mod_base = OTHER; note = 2'-fluorocytidine-3'-phosphate
  modified_base 11: mod_base = OTHER; note = 2'-fluoroadenosine-3'-phosphate
  modified_base 12: mod_base = OTHER; note = 2'-O-methyluridine-3'-phosphate
  modified_base 13: mod_base = OTHER; note = 2'-O-methylguanosine-3'-phosphate
  modified_base 14: mod_base = OTHER; note = 2'-O-methyluridine-3'-phosphate
  modified_base 15: mod_base = OTHER; note = 2'-O-methyladenosine-3'-phosphate
  modified_base 16: mod_base = OTHER; note = 2'-O-methylcytidine-3'-phosphate
  modified_base 17: mod_base = OTHER; note = 2'-O-methyladenosine-3'-phosphate
  modified_base 18: mod_base = OTHER; note = 2'-O-methyladenosine-3'-phosphate
  modified_base 19: mod_base = OTHER; note = 2'-O-methylguanosine-3'-phosphorothioate
  modified_base 20: mod_base = OTHER; note = 2'-O-methylcytidine-3'-phosphorothioate
  modified_base 21: mod_base = OTHER; note = 2'-O-methyladenosine-3'-phosphate
aaagtcatacatgtacaagca

SEQ ID NO: 4767 - RNA, 21 nt, synthetic construct
  source 1..21: mol_type = other RNA
  modified_base 1: mod_base = OTHER; note = 2'-O-methyluridine-3'-phosphorothioate
  modified_base 2: mod_base = OTHER; note = 2'-O-methyladenosine-3'-phosphorothioate
  modified_base 3: mod_base = OTHER; note = 2'-O-methylguanosine-3'-phosphate
  modified_base 4: mod_base = OTHER; note = 2'-O-methyladenosine-3'-phosphate
  modified_base 5: mod_base = OTHER; note = 2'-O-methyladenosine-3'-phosphate
  modified_base 6: mod_base = OTHER; note = 2'-O-methylguanosine-3'-phosphate
  modified_base 7: mod_base = OTHER; note = 2'-fluorocytidine-3'-phosphate
  modified_base 8: mod_base = OTHER; note = 2'-O-methyladenosine-3'-phosphate
  modified_base 9: mod_base = OTHER; note = 2'-fluoroguanosine-3'-phosphate
  modified_base 10: mod_base = OTHER; note = 2'-fluoroadenosine-3'-phosphate
  modified_base 11: mod_base = OTHER; note = 2'-fluoroadenosine-3'-phosphate
  modified_base 12: mod_base = OTHER; note = 2'-O-methylguanosine-3'-phosphate
  modified_base 13: mod_base = OTHER; note = 2'-O-methyladenosine-3'-phosphate
  modified_base 14: mod_base = OTHER; note = 2'-O-methylguanosine-3'-phosphate
  modified_base 15: mod_base = OTHER; note = 2'-O-methylguanosine-3'-phosphate
  modified_base 16: mod_base = OTHER; note = 2'-O-methyladenosine-3'-phosphate
  modified_base 17: mod_base = OTHER; note = 2'-O-methyluridine-3'-phosphate
  modified_base 18: mod_base = OTHER; note = 2'-O-methyladenosine-3'-phosphate
  modified_base 19: mod_base = OTHER; note = 2'-O-methyladenosine-3'-phosphorothioate
  modified_base 20: mod_base = OTHER; note = 2'-O-methyluridine-3'-phosphorothioate
  modified_base 21: mod_base = OTHER; note = 2'-O-methyladenosine-3'-phosphate
tagaagcagaagaggataata

SEQ ID NO: 4768 - RNA, 21 nt, synthetic construct
  source 1..21: mol_type = other RNA
  modified_base 1: mod_base = OTHER; note = 2'-O-methylcytidine-3'-phosphorothioate
  modified_base 2: mod_base = OTHER; note = 2'-O-methylguanosine-3'-phosphorothioate
  modified_base 3: mod_base = OTHER; note = 2'-O-methyluridine-3'-phosphate
  modified_base 4: mod_base = OTHER; note = 2'-O-methylguanosine-3'-phosphate
  modified_base 5: mod_base = OTHER; note = 2'-O-methyluridine-3'-phosphate
  modified_base 6: mod_base = OTHER; note = 2'-O-methylguanosine-3'-phosphate
  modified_base 7: mod_base = OTHER; note = 2'-fluorouridine-3'-phosphate
  modified_base 8: mod_base = OTHER; note = 2'-O-methyluridine-3'-phosphate
  modified_base 9: mod_base = OTHER; note = 2'-fluorocytidine-3'-phosphate
  modified_base 10: mod_base = OTHER; note = 2'-fluoroguanosine-3'-phosphate
  modified_base 11: mod_base = OTHER; note = 2'-fluorocytidine-3'-phosphate
  modified_base 12: mod_base = OTHER; note = 2'-O-methyladenosine-3'-phosphate
  modified_base 13: mod_base = OTHER; note = 2'-O-methylcytidine-3'-phosphate
  modified_base 14: mod_base = OTHER; note = 2'-O-methyladenosine-3'-phosphate
  modified_base 15: mod_base = OTHER; note = 2'-O-methylguanosine-3'-phosphate
  modified_base 16: mod_base = OTHER; note = 2'-O-methylcytidine-3'-phosphate
  modified_base 17: mod_base = OTHER; note = 2'-O-methyluridine-3'-phosphate
  modified_base 18: mod_base = OTHER; note = 2'-O-methyluridine-3'-phosphate
  modified_base 19: mod_base = OTHER; note = 2'-O-methylguanosine-3'-phosphorothioate
  modified_base 20: mod_base = OTHER; note = 2'-O-methyladenosine-3'-phosphorothioate
  modified_base 21: mod_base = OTHER; note = 2'-O-methyladenosine-3'-phosphate
cgtgtgttcgcacagcttgaa

SEQ ID NO: 4769 - RNA, 21 nt, synthetic construct
  source 1..21: mol_type = other RNA
  modified_base 1: mod_base = OTHER; note = 2'-O-methylguanosine-3'-phosphorothioate
  modified_base 2: mod_base = OTHER; note = 2'-O-methylcytidine-3'-phosphorothioate
  modified_base 3: mod_base = OTHER; note = 2'-O-methyluridine-3'-phosphate
  modified_base 4: mod_base = OTHER; note = 2'-O-methylguanosine-3'-phosphate
  modified_base 5: mod_base = OTHER; note = 2'-O-methylguanosine-3'-phosphate
  modified_base 6: mod_base = OTHER; note = 2'-O-methyluridine-3'-phosphate
  modified_base 7: mod_base = OTHER; note = 2'-fluoroguanosine-3'-phosphate
  modified_base 8: mod_base = OTHER; note = 2'-O-methyluridine-3'-phosphate
  modified_base 9: mod_base = OTHER; note = 2'-fluorouridine-3'-phosphate
  modified_base 10: mod_base = OTHER; note = 2'-fluorouridine-3'-phosphate
  modified_base 11: mod_base = OTHER; note = 2'-fluorouridine-3'-phosphate
  modified_base 12: mod_base = OTHER; note = 2'-O-methylguanosine-3'-phosphate
  modified_base 13: mod_base = OTHER; note = 2'-O-methyluridine-3'-phosphate
  modified_base 14: mod_base = OTHER; note = 2'-O-methylcytidine-3'-phosphate
  modified_base 15: mod_base = OTHER; note = 2'-O-methylcytidine-3'-phosphate
  modified_base 16: mod_base = OTHER; note = 2'-O-methyladenosine-3'-phosphate
  modified_base 17: mod_base = OTHER; note = 2'-O-methylguanosine-3'-phosphate
  modified_base 18: mod_base = OTHER; note = 2'-O-methyluridine-3'-phosphate
  modified_base 19: mod_base = OTHER; note = 2'-O-methylcytidine-3'-phosphorothioate
  modified_base 20: mod_base = OTHER; note = 2'-O-methyluridine-3'-phosphorothioate
  modified_base 21: mod_base = OTHER; note = 2'-O-methyladenosine-3'-phosphate
gctggtgttttgtccagtcta

SEQ ID NO: 4770 - RNA, 21 nt, synthetic construct
  source 1..21: mol_type = other RNA
  modified_base 1: mod_base = OTHER; note = 2'-O-methyladenosine-3'-phosphorothioate
  modified_base 2: mod_base = OTHER; note = 2'-O-methyluridine-3'-phosphorothioate
  modified_base 3: mod_base = OTHER; note = 2'-O-methylguanosine-3'-phosphate
  modified_base 4: mod_base = OTHER; note = 2'-O-methylguanosine-3'-phosphate
  modified_base 5: mod_base = OTHER; note = 2'-O-methyladenosine-3'-phosphate
  modified_base 6: mod_base = OTHER; note = 2'-O-methyladenosine-3'-phosphate
  modified_base 7: mod_base = OTHER; note = 2'-fluoroadenosine-3'-phosphate
  modified_base 8: mod_base = OTHER; note = 2'-O-methyladenosine-3'-phosphate
  modified_base 9: mod_base = OTHER; note = 2'-fluorocytidine-3'-phosphate
  modified_base 10: mod_base = OTHER; note = 2'-fluoroadenosine-3'-phosphate
  modified_base 11: mod_base = OTHER; note = 2'-fluoroadenosine-3'-phosphate
  modified_base 12: mod_base = OTHER; note = 2'-O-methyluridine-3'-phosphate
  modified_base 13: mod_base = OTHER; note = 2'-O-methylcytidine-3'-phosphate
  modified_base 14: mod_base = OTHER; note = 2'-O-methyluridine-3'-phosphate
  modified_base 15: mod_base = OTHER; note = 2'-O-methyladenosine-3'-phosphate
  modified_base 16: mod_base = OTHER; note = 2'-O-methyladenosine-3'-phosphate
  modified_base 17: mod_base = OTHER; note = 2'-O-methyladenosine-3'-phosphate
  modified_base 18: mod_base = OTHER; note = 2'-O-methyluridine-3'-phosphate
  modified_base 19: mod_base = OTHER; note = 2'-O-methylcytidine-3'-phosphorothioate
  modified_base 20: mod_base = OTHER; note = 2'-O-methylcytidine-3'-phosphorothioate
  modified_base 21: mod_base = OTHER; note = 2'-O-methyladenosine-3'-phosphate
atggaaaacaatctaaatcca

SEQ ID NO: 4771 - RNA, 21 nt, synthetic construct
  source 1..21: mol_type = other RNA
  modified_base 1: mod_base = OTHER; note = 2'-O-methylcytidine-3'-phosphorothioate
  modified_base 2: mod_base = OTHER; note = 2'-O-methyladenosine-3'-phosphorothioate
  modified_base 3: mod_base = OTHER; note = 2'-O-methyluridine-3'-phosphate
  modified_base 4: mod_base = OTHER; note = 2'-O-methyluridine-3'-phosphate
  modified_base 5: mod_base = OTHER; note = 2'-O-methyladenosine-3'-phosphate
  modified_base 6: mod_base = OTHER; note = 2'-O-methylguanosine-3'-phosphate
  modified_base 7: mod_base = OTHER; note = 2'-fluoroadenosine-3'-phosphate
  modified_base 8: mod_base = OTHER; note = 2'-O-methyladenosine-3'-phosphate
  modified_base 9: mod_base = OTHER; note = 2'-fluoroadenosine-3'-phosphate
  modified_base 10: mod_base = OTHER; note = 2'-fluoroadenosine-3'-phosphate
  modified_base 11: mod_base = OTHER; note = 2'-fluorouridine-3'-phosphate
  modified_base 12: mod_base = OTHER; note = 2'-O-methylguanosine-3'-phosphate
  modified_base 13: mod_base = OTHER; note = 2'-O-methylguanosine-3'-phosphate
  modified_base 14: mod_base = OTHER; note = 2'-O-methylcytidine-3'-phosphate
  modified_base 15: mod_base = OTHER; note = 2'-O-methyluridine-3'-phosphate
  modified_base 16: mod_base = OTHER; note = 2'-O-methyladenosine-3'-phosphate
  modified_base 17: mod_base = OTHER; note = 2'-O-methyluridine-3'-phosphate
  modified_base 18: mod_base = OTHER; note = 2'-O-methylcytidine-3'-phosphate
  modified_base 19: mod_base = OTHER; note = 2'-O-methylguanosine-3'-phosphorothioate
  modified_base 20: mod_base = OTHER; note = 2'-O-methyladenosine-3'-phosphorothioate
  modified_base 21: mod_base = OTHER; note = 2'-O-methyladenosine-3'-phosphate
cattagaaaatggctatcgaa

SEQ ID NO: 4772 - RNA, 21 nt, synthetic construct
  source 1..21: mol_type = other RNA
  modified_base 1: mod_base = OTHER; note = 2'-O-methyladenosine-3'-phosphorothioate
  modified_base 2: mod_base = OTHER; note = 2'-O-methyluridine-3'-phosphorothioate
  modified_base 3: mod_base = OTHER; note = 2'-O-methylguanosine-3'-phosphate
  modified_base 4: mod_base = OTHER; note = 2'-O-methylguanosine-3'-phosphate
  modified_base 5: mod_base = OTHER; note = 2'-O-methyladenosine-3'-phosphate
  modified_base 6: mod_base = OTHER; note = 2'-O-methylcytidine-3'-phosphate
  modified_base 7: mod_base = OTHER; note = 2'-fluoroadenosine-3'-phosphate
  modified_base 8: mod_base = OTHER; note = 2'-O-methylguanosine-3'-phosphate
  modified_base 9: mod_base = OTHER; note = 2'-fluoroadenosine-3'-phosphate
  modified_base 10: mod_base = OTHER; note = 2'-fluoroadenosine-3'-phosphate
  modified_base 11: mod_base = OTHER; note = 2'-fluoroguanosine-3'-phosphate
  modified_base 12: mod_base = OTHER; note = 2'-O-methylguanosine-3'-phosphate
  modified_base 13: mod_base = OTHER; note = 2'-O-methylcytidine-3'-phosphate
  modified_base 14: mod_base = OTHER; note = 2'-O-methyladenosine-3'-phosphate
  modified_base 15: mod_base = OTHER; note = 2'-O-methyluridine-3'-phosphate
  modified_base 16: mod_base = OTHER; note = 2'-O-methyluridine-3'-phosphate
  modified_base 17: mod_base = OTHER; note = 2'-O-methylguanosine-3'-phosphate
  modified_base 18: mod_base = OTHER; note = 2'-O-methyluridine-3'-phosphate
  modified_base 19: mod_base = OTHER; note = 2'-O-methylcytidine-3'-phosphorothioate
  modified_base 20: mod_base = OTHER; note = 2'-O-methyladenosine-3'-phosphorothioate
  modified_base 21: mod_base = OTHER; note = 2'-O-methyladenosine-3'-phosphate
atggacagaaggcattgtcaa

SEQ ID NO: 4773 - RNA, 21 nt, synthetic construct
  source 1..21: mol_type = other RNA
  modified_base 1: mod_base = OTHER; note = 2'-O-methylcytidine-3'-phosphorothioate
  modified_base 2: mod_base = OTHER; note = 2'-O-methyladenosine-3'-phosphorothioate
  modified_base 3: mod_base = OTHER; note = 2'-O-methylguanosine-3'-phosphate
  modified_base 4: mod_base = OTHER; note = 2'-O-methyladenosine-3'-phosphate
  modified_base 5: mod_base = OTHER; note = 2'-O-methyluridine-3'-phosphate
  modified_base 6: mod_base = OTHER; note = 2'-O-methyluridine-3'-phosphate
  modified_base 7: mod_base = OTHER; note = 2'-fluoroguanosine-3'-phosphate
  modified_base 8: mod_base = OTHER; note = 2'-O-methylcytidine-3'-phosphate
  modified_base 9: mod_base = OTHER; note = 2'-fluorouridine-3'-phosphate
  modified_base 10: mod_base = OTHER; note = 2'-fluoroguanosine-3'-phosphate
  modified_base 11: mod_base = OTHER; note = 2'-fluorocytidine-3'-phosphate
  modified_base 12: mod_base = OTHER; note = 2'-O-methyladenosine-3'-phosphate
  modified_base 13: mod_base = OTHER; note = 2'-O-methylguanosine-3'-phosphate
  modified_base 14: mod_base = OTHER; note = 2'-O-methyluridine-3'-phosphate
  modified_base 15: mod_base = OTHER; note = 2'-O-methylguanosine-3'-phosphate
  modified_base 16: mod_base = OTHER; note = 2'-O-methylguanosine-3'-phosphate
  modified_base 17: mod_base = OTHER; note = 2'-O-methyladenosine-3'-phosphate
  modified_base 18: mod_base = OTHER; note = 2'-O-methyladenosine-3'-phosphate
  modified_base 19: mod_base = OTHER; note = 2'-O-methyladenosine-3'-phosphorothioate
  modified_base 20: mod_base = OTHER; note = 2'-O-methyladenosine-3'-phosphorothioate
  modified_base 21: mod_base = OTHER; note = 2'-O-methyladenosine-3'-phosphate
cagattgctgcagtggaaaaa

SEQ ID NO: 4774 - RNA, 21 nt, synthetic construct
  source 1..21: mol_type = other RNA
  modified_base 1: mod_base = OTHER; note = 2'-O-methyladenosine-3'-phosphorothioate
  modified_base 2: mod_base = OTHER; note = 2'-O-methylguanosine-3'-phosphorothioate
  modified_base 3: mod_base = OTHER; note = 2'-O-methylguanosine-3'-phosphate
  modified_base 4: mod_base = OTHER; note = 2'-O-methyluridine-3'-phosphate
  modified_base 5: mod_base = OTHER; note = 2'-O-methylguanosine-3'-phosphate
  modified_base 6: mod_base = OTHER; note = 2'-O-methylguanosine-3'-phosphate
  modified_base 7: mod_base = OTHER; note = 2'-fluoroadenosine-3'-phosphate
  modified_base 8: mod_base = OTHER; note = 2'-O-methyladenosine-3'-phosphate
  modified_base 9: mod_base = OTHER; note = 2'-fluoroadenosine-3'-phosphate
  modified_base 10: mod_base = OTHER; note = 2'-fluorouridine-3'-phosphate
  modified_base 11: mod_base = OTHER; note = 2'-fluoroguanosine-3'-phosphate
  modified_base 12: mod_base = OTHER; note = 2'-O-methylguanosine-3'-phosphate
  modified_base 13: mod_base = OTHER; note = 2'-O-methyladenosine-3'-phosphate
  modified_base 14: mod_base = OTHER; note = 2'-O-methylguanosine-3'-phosphate
  modified_base 15: mod_base = OTHER; note = 2'-O-methyluridine-3'-phosphate
  modified_base 16: mod_base = OTHER; note = 2'-O-methyluridine-3'-phosphate
  modified_base 17: mod_base = OTHER; note = 2'-O-methylguanosine-3'-phosphate
  modified_base 18: mod_base = OTHER; note = 2'-O-methyladenosine-3'-phosphate
  modified_base 19: mod_base = OTHER; note = 2'-O-methyluridine-3'-phosphorothioate
  modified_base 20: mod_base = OTHER; note = 2'-O-methylcytidine-3'-phosphorothioate
  modified_base 21: mod_base = OTHER; note = 2'-O-methyladenosine-3'-phosphate
aggtggaaatggagttgatca

SEQ ID NO: 4775 - RNA, 21 nt, synthetic construct
  source 1..21: mol_type = other RNA
  modified_base 1: mod_base = OTHER; note = 2'-O-methylcytidine-3'-phosphorothioate
  modified_base 2: mod_base = OTHER; note = 2'-O-methyluridine-3'-phosphorothioate
  modified_base 3: mod_base = OTHER; note = 2'-O-methylguanosine-3'-phosphate
  modified_base 4: mod_base = OTHER; note = 2'-O-methylguanosine-3'-phosphate
  modified_base 5: mod_base = OTHER; note = 2'-O-methylguanosine-3'-phosphate
  modified_base 6: mod_base = OTHER; note = 2'-O-methylcytidine-3'-phosphate
  modified_base 7: mod_base = OTHER; note = 2'-fluoroadenosine-3'-phosphate
  modified_base 8: mod_base = OTHER; note = 2'-O-methyladenosine-3'-phosphate
  modified_base 9: mod_base = OTHER; note = 2'-fluorouridine-3'-phosphate
  modified_base 10: mod_base = OTHER; note = 2'-fluoroguanosine-3'-phosphate
  modified_base 11: mod_base = OTHER; note = 2'-fluorocytidine-3'-phosphate
  modified_base 12: mod_base = OTHER; note = 2'-O-methyladenosine-3'-phosphate
  modified_base 13: mod_base = OTHER; note = 2'-O-methylcytidine-3'-phosphate
  modified_base 14: mod_base = OTHER; note = 2'-O-methylcytidine-3'-phosphate
  modified_base 15: mod_base = OTHER; note = 2'-O-methyluridine-3'-phosphate
  modified_base 16: mod_base = OTHER; note = 2'-O-methyladenosine-3'-phosphate
  modified_base 17: mod_base = OTHER; note = 2'-O-methyladenosine-3'-phosphate
  modified_base 18: mod_base = OTHER; note = 2'-O-methyluridine-3'-phosphate
  modified_base 19: mod_base = OTHER; note = 2'-O-methyladenosine-3'-phosphorothioate
  modified_base 20: mod_base = OTHER; note = 2'-O-methylcytidine-3'-phosphorothioate
  modified_base 21: mod_base = OTHER; note = 2'-O-methyladenosine-3'-phosphate
ctgggcaatgcacctaataca

SEQ ID NO: 4776 - RNA, 21 nt, synthetic construct
  source 1..21: mol_type = other RNA
  modified_base 1: mod_base = OTHER; note = 2'-O-methyladenosine-3'-phosphorothioate
  modified_base 2: mod_base = OTHER; note = 2'-O-methyluridine-3'-phosphorothioate
  modified_base 3: mod_base = OTHER; note = 2'-O-methyluridine-3'-phosphate
  modified_base 4: mod_base = OTHER; note = 2'-O-methyluridine-3'-phosphate
  modified_base 5: mod_base = OTHER; note = 2'-O-methylcytidine-3'-phosphate
  modified_base 6: mod_base = OTHER; note = 2'-O-methylcytidine-3'-phosphate
  modified_base 7: mod_base = OTHER; note = 2'-fluorocytidine-3'-phosphate
  modified_base 8: mod_base = OTHER; note = 2'-O-methyluridine-3'-phosphate
  modified_base 9: mod_base = OTHER; note = 2'-fluorocytidine-3'-phosphate
  modified_base 10: mod_base = OTHER; note = 2'-fluorouridine-3'-phosphate
  modified_base 11: mod_base = OTHER; note = 2'-fluoroguanosine-3'-phosphate
  modified_base 12: mod_base = OTHER; note = 2'-O-methylcytidine-3'-phosphate
  modified_base 13: mod_base = OTHER; note = 2'-O-methylcytidine-3'-phosphate
  modified_base 14: mod_base = OTHER; note = 2'-O-methyluridine-3'-phosphate
  modified_base 15: mod_base = OTHER; note = 2'-O-methyladenosine-3'-phosphate
  modified_base 16: mod_base = OTHER; note = 2'-O-methyladenosine-3'-phosphate
  modified_base 17: mod_base = OTHER; note = 2'-O-methyladenosine-3'-phosphate
  modified_base 18: mod_base = OTHER; note = 2'-O-methylguanosine-3'-phosphate
  modified_base 19: mod_base = OTHER; note = 2'-O-methyladenosine-3'-phosphorothioate
  modified_base 20: mod_base = OTHER; note = 2'-O-methylcytidine-3'-phosphorothioate
  modified_base 21: mod_base = OTHER; note = 2'-O-methyladenosine-3'-phosphate
atttccctctgcctaaagaca

SEQ ID NO: 4777 - RNA, 21 nt, synthetic construct
  source 1..21: mol_type = other RNA
  modified_base 1: mod_base = OTHER; note = 2'-O-methylcytidine-3'-phosphorothioate
  modified_base 2: mod_base = OTHER; note = 2'-O-methylguanosine-3'-phosphorothioate
  modified_base 3: mod_base = OTHER; note = 2'-O-methylcytidine-3'-phosphate
  modified_base 4: mod_base = OTHER; note = 2'-O-methyluridine-3'-phosphate
  modified_base 5: mod_base = OTHER; note = 2'-O-methyluridine-3'-phosphate
  modified_base 6: mod_base = OTHER; note = 2'-O-methylcytidine-3'-phosphate
  modified_base 7: mod_base = OTHER; note = 2'-fluorouridine-3'-phosphate
  modified_base 8: mod_base = OTHER; note = 2'-O-methylguanosine-3'-phosphate
  modified_base 9: mod_base = OTHER; note = 2'-fluorocytidine-3'-phosphate
  modified_base 10: mod_base = OTHER; note = 2'-fluoroadenosine-3'-phosphate
  modified_base 11: mod_base = OTHER; note = 2'-fluoroadenosine-3'-phosphate
  modified_base 12: mod_base = OTHER; note = 2'-O-methylcytidine-3'-phosphate
  modified_base 13: mod_base = OTHER; note = 2'-O-methylguanosine-3'-phosphate
  modified_base 14: mod_base = OTHER; note = 2'-O-methyluridine-3'-phosphate
  modified_base 15: mod_base = OTHER; note = 2'-O-methylguanosine-3'-phosphate
  modified_base 16: mod_base = OTHER; note = 2'-O-methylguanosine-3'-phosphate
  modified_base 17: mod_base = OTHER; note = 2'-O-methyladenosine-3'-phosphate
  modified_base 18: mod_base = OTHER; note = 2'-O-methylguanosine-3'-phosphate
  modified_base 19: mod_base = OTHER; note = 2'-O-methylcytidine-3'-phosphorothioate
  modified_base 20: mod_base = OTHER; note = 2'-O-methyluridine-3'-phosphorothioate
  modified_base 21: mod_base = OTHER; note = 2'-O-methyladenosine-3'-phosphate
cgcttctgcaacgtggagcta

SEQ ID NO: 4778 - RNA, 21 nt, synthetic construct
  source 1..21: mol_type = other RNA
  modified_base 1: mod_base = OTHER; note = 2'-O-methyladenosine-3'-phosphorothioate
  modified_base 2: mod_base = OTHER; note = 2'-O-methylguanosine-3'-phosphorothioate
  modified_base 3: mod_base = OTHER; note = 2'-O-methyladenosine-3'-phosphate
  modified_base 4: mod_base = OTHER; note = 2'-O-methyluridine-3'-phosphate
  modified_base 5: mod_base = OTHER; note = 2'-O-methyluridine-3'-phosphate
  modified_base 6: mod_base = OTHER; note = 2'-O-methylcytidine-3'-phosphate
  modified_base 7: mod_base = OTHER; note = 2'-fluoroadenosine-3'-phosphate
  modified_base 8: mod_base = OTHER; note = 2'-O-methyluridine-3'-phosphate
  modified_base 9: mod_base = OTHER; note = 2'-fluoroadenosine-3'-phosphate
  modified_base 10: mod_base = OTHER; note = 2'-fluorouridine-3'-phosphate
  modified_base 11: mod_base = OTHER; note = 2'-fluorouridine-3'-phosphate
  modified_base 12: mod_base = OTHER; note = 2'-O-methylguanosine-3'-phosphate
  modified_base 13: mod_base = OTHER; note = 2'-O-methyluridine-3'-phosphate
  modified_base 14: mod_base = OTHER; note = 2'-O-methyladenosine-3'-phosphate
  modified_base 15: mod_base = OTHER; note = 2'-O-methyluridine-3'-phosphate
  modified_base 16: mod_base = OTHER; note = 2'-O-methyluridine-3'-phosphate
  modified_base 17: mod_base = OTHER; note = 2'-O-methyluridine-3'-phosphate
  modified_base 18: mod_base = OTHER; note = 2'-O-methylcytidine-3'-phosphate
  modified_base 19: mod_base = OTHER; note = 2'-O-methylcytidine-3'-phosphorothioate
  modified_base 20: mod_base = OTHER; note = 2'-O-methylcytidine-3'-phosphorothioate
  modified_base 21: mod_base = OTHER; note = 2'-O-methyladenosine-3'-phosphate
agattcatattgtatttccca

SEQ ID NO: 4779 - RNA, 21 nt, synthetic construct
  source 1..21: mol_type = other RNA
  modified_base 1: mod_base = OTHER; note = 2'-O-methyladenosine-3'-phosphorothioate
  modified_base 2: mod_base = OTHER; note = 2'-O-methylguanosine-3'-phosphorothioate
  modified_base 3: mod_base = OTHER; note = 2'-O-methylguanosine-3'-phosphate
  modified_base 4: mod_base = OTHER; note = 2'-O-methyladenosine-3'-phosphate
  modified_base 5: mod_base = OTHER; note = 2'-O-methylcytidine-3'-phosphate
  modified_base 6: mod_base = OTHER; note = 2'-O-methyladenosine-3'-phosphate
  modified_base 7: mod_base = OTHER; note = 2'-fluoroadenosine-3'-phosphate
  modified_base 8: mod_base = OTHER; note = 2'-O-methyladenosine-3'-phosphate
  modified_base 9: mod_base = OTHER; note = 2'-fluorouridine-3'-phosphate
  modified_base 10: mod_base = OTHER; note = 2'-fluoroguanosine-3'-phosphate
  modified_base 11: mod_base = OTHER; note = 2'-fluorocytidine-3'-phosphate
  modified_base 12: mod_base = OTHER; note = 2'-O-methyladenosine-3'-phosphate
  modified_base 13: mod_base = OTHER; note = 2'-O-methyluridine-3'-phosphate
  modified_base 14: mod_base = OTHER; note = 2'-O-methyluridine-3'-phosphate
  modified_base 15: mod_base = OTHER; note = 2'-O-methyluridine-3'-phosphate
  modified_base 16: mod_base = OTHER; note = 2'-O-methylcytidine-3'-phosphate
  modified_base 17: mod_base = OTHER; note = 2'-O-methyluridine-3'-phosphate
  modified_base 18: mod_base = OTHER; note = 2'-O-methyladenosine-3'-phosphate
  modified_base 19: mod_base = OTHER; note = 2'-O-methylguanosine-3'-phosphorothioate
  modified_base 20: mod_base = OTHER; note = 2'-O-methyluridine-3'-phosphorothioate
  modified_base 21: mod_base = OTHER; note = 2'-O-methyladenosine-3'-phosphate
aggacaaatgcatttctagta

SEQ ID NO: 4780 - RNA, 21 nt, synthetic construct
  source 1..21: mol_type = other RNA
  modified_base 1: mod_base = OTHER; note = 2'-O-methyluridine-3'-phosphorothioate
  modified_base 2: mod_base = OTHER; note = 2'-O-methyluridine-3'-phosphorothioate
  modified_base 3: mod_base = OTHER; note = 2'-O-methyladenosine-3'-phosphate
  modified_base 4: mod_base = OTHER; note = 2'-O-methylguanosine-3'-phosphate
  modified_base 5: mod_base = OTHER; note = 2'-O-methyladenosine-3'-phosphate
  modified_base 6: mod_base = OTHER; note = 2'-O-methylcytidine-3'-phosphate
  modified_base 7: mod_base = OTHER; note = 2'-fluoroguanosine-3'-phosphate
  modified_base 8: mod_base = OTHER; note = 2'-O-methyluridine-3'-phosphate
  modified_base 9: mod_base = OTHER; note = 2'-fluoroguanosine-3'-phosphate
  modified_base 10: mod_base = OTHER; note = 2'-fluorouridine-3'-phosphate
  modified_base 11: mod_base = OTHER; note = 2'-fluorouridine-3'-phosphate
  modified_base 12: mod_base = OTHER; note = 2'-O-methylguanosine-3'-phosphate
  modified_base 13: mod_base = OTHER; note = 2'-O-methyladenosine-3'-phosphate
  modified_base 14: mod_base = OTHER; note = 2'-O-methylguanosine-3'-phosphate
  modified_base 15: mod_base = OTHER; note = 2'-O-methyluridine-3'-phosphate
  modified_base 16: mod_base = OTHER; note = 2'-O-methylguanosine-3'-phosphate
  modified_base 17: mod_base = OTHER; note = 2'-O-methyladenosine-3'-phosphate
  modified_base 18: mod_base = OTHER; note = 2'-O-methylguanosine-3'-phosphate
  modified_base 19: mod_base = OTHER; note = 2'-O-methyluridine-3'-phosphorothioate
  modified_base 20: mod_base = OTHER; note = 2'-O-methylguanosine-3'-phosphorothioate
  modified_base 21: mod_base = OTHER; note = 2'-O-methyladenosine-3'-phosphate
ttagacgtgttgagtgagtga

SEQ ID NO: 4781 - RNA, 21 nt, synthetic construct
  source 1..21: mol_type = other RNA
  modified_base 1: mod_base = OTHER; note = 2'-O-methylcytidine-3'-phosphorothioate
  modified_base 2: mod_base = OTHER; note = 2'-O-methyluridine-3'-phosphorothioate
  modified_base 3: mod_base = OTHER; note = 2'-O-methylguanosine-3'-phosphate
  modified_base 4: mod_base = OTHER; note = 2'-O-methyluridine-3'-phosphate
  modified_base 5: mod_base = OTHER; note = 2'-O-methylguanosine-3'-phosphate
  modified_base 6: mod_base = OTHER; note = 2'-O-methylguanosine-3'-phosphate
  modified_base 7: mod_base = OTHER; note = 2'-fluoroadenosine-3'-phosphate
  modified_base 8: mod_base = OTHER; note = 2'-O-methylcytidine-3'-phosphate
  modified_base 9: mod_base = OTHER; note = 2'-fluoroadenosine-3'-phosphate
  modified_base 10: mod_base = OTHER; note = 2'-fluorouridine-3'-phosphate
  modified_base 11: mod_base = OTHER; note = 2'-fluorocytidine-3'-phosphate
  modified_base 12: mod_base = OTHER; note = 2'-O-methyladenosine-3'-phosphate
  modified_base 13: mod_base = OTHER; note = 2'-O-methyladenosine-3'-phosphate
  modified_base 14: mod_base = OTHER; note = 2'-O-methyladenosine-3'-phosphate
  modified_base 15: mod_base = OTHER; note = 2'-O-methyluridine-3'-phosphate
  modified_base 16: mod_base = OTHER; note = 2'-O-methylguanosine-3'-phosphate
  modified_base 17: mod_base = OTHER; note = 2'-O-methylcytidine-3'-phosphate
  modified_base 18: mod_base = OTHER; note = 2'-O-methyluridine-3'-phosphate
  modified_base 19: mod_base = OTHER; note = 2'-O-methylguanosine-3'-phosphorothioate
  modified_base 20: mod_base = OTHER; note = 2'-O-methyladenosine-3'-phosphorothioate
  modified_base 21: mod_base = OTHER; note = 2'-O-methyladenosine-3'-phosphate
ctgtggacatcaaatgctgaa

SEQ ID NO: 4782 - RNA, 21 nt, synthetic construct
  source 1..21: mol_type = other RNA
  modified_base 1: mod_base = OTHER; note = 2'-O-methyladenosine-3'-phosphorothioate
  modified_base 2: mod_base = OTHER; note = 2'-O-methylguanosine-3'-phosphorothioate
  modified_base 3: mod_base = OTHER; note = 2'-O-methylguanosine-3'-phosphate
  modified_base 4: mod_base = OTHER; note = 2'-O-methylcytidine-3'-phosphate
  modified_base 5: mod_base = OTHER; note = 2'-O-methylcytidine-3'-phosphate
  modified_base 6: mod_base = OTHER; note = 2'-O-methyluridine-3'-phosphate
  modified_base 7: mod_base = OTHER; note = 2'-fluorouridine-3'-phosphate
  modified_base 8: mod_base = OTHER; note = 2'-O-methyladenosine-3'-phosphate
  modified_base 9: mod_base = OTHER; note = 2'-fluoroadenosine-3'-phosphate
  modified_base 10: mod_base = OTHER; note = 2'-fluorouridine-3'-phosphate
  modified_base 11: mod_base = OTHER; note = 2'-fluoroadenosine-3'-phosphate
  modified_base 12: mod_base = OTHER; note = 2'-O-methylcytidine-3'-phosphate
  modified_base 13: mod_base = OTHER; note = 2'-O-methyluridine-3'-phosphate
  modified_base 14: mod_base = OTHER; note = 2'-O-methylguanosine-3'-phosphate
  modified_base 15: mod_base = OTHER; note = 2'-O-methyluridine-3'-phosphate
  modified_base 16: mod_base = OTHER; note = 2'-O-methylguanosine-3'-phosphate
  modified_base 17: mod_base = OTHER; note = 2'-O-methyladenosine-3'-phosphate
  modified_base 18: mod_base = OTHER; note = 2'-O-methylguanosine-3'-phosphate
  modified_base 19: mod_base = OTHER; note = 2'-O-methyladenosine-3'-phosphorothioate
  modified_base 20: mod_base = OTHER; note = 2'-O-methylguanosine-3'-phosphorothioate
  modified_base 21: mod_base = OTHER; note = 2'-O-methyladenosine-3'-phosphate
aggccttaatactgtgagaga

SEQ ID NO: 4783 - RNA, 21 nt, synthetic construct
  source 1..21: mol_type = other RNA
  modified_base 1: mod_base = OTHER; note = 2'-O-methyladenosine-3'-phosphorothioate
  modified_base 2: mod_base = OTHER; note = 2'-O-methylguanosine-3'-phosphorothioate
  modified_base 3: mod_base = OTHER; note = 2'-O-methyladenosine-3'-phosphate
  modified_base 4: mod_base = OTHER; note = 2'-O-methyladenosine-3'-phosphate
  modified_base 5: mod_base = OTHER; note = 2'-O-methyladenosine-3'-phosphate
  modified_base 6: mod_base = OTHER; note = 2'-O-methyluridine-3'-phosphate
  modified_base 7: mod_base = OTHER; note = 2'-fluorocytidine-3'-phosphate
  modified_base 8: mod_base = OTHER; note = 2'-O-methyladenosine-3'-phosphate
  modified_base 9: mod_base = OTHER; note = 2'-fluorouridine-3'-phosphate
  modified_base 10: mod_base = OTHER; note = 2'-fluorouridine-3'-phosphate
  modified_base 11: mod_base = OTHER; note = 2'-fluoroguanosine-3'-phosphate
  modified_base 12: mod_base = OTHER; note = 2'-O-methylcytidine-3'-phosphate
  modified_base 13: mod_base = OTHER; note = 2'-O-methylcytidine-3'-phosphate
  modified_base 14: mod_base = OTHER; note = 2'-O-methyluridine-3'-phosphate
  modified_base 15: mod_base = OTHER; note = 2'-O-methyladenosine-3'-phosphate
  modified_base 16: mod_base = OTHER; note = 2'-O-methylguanosine-3'-phosphate
  modified_base 17: mod_base = OTHER; note = 2'-O-methyluridine-3'-phosphate
  modified_base 18: mod_base = OTHER; note = 2'-O-methylguanosine-3'-phosphate
  modified_base 19: mod_base = OTHER; note = 2'-O-methyluridine-3'-phosphorothioate
  modified_base 20: mod_base = OTHER; note = 2'-O-methyluridine-3'-phosphorothioate
  modified_base 21: mod_base = OTHER; note = 2'-O-methyladenosine-3'-phosphate
agaaatcattgcctagtgtta

SEQ ID NO: 4784 - RNA, 21 nt, synthetic construct
  source 1..21: mol_type = other RNA
  modified_base 1: mod_base = OTHER; note = 2'-O-methyluridine-3'-phosphorothioate
  modified_base 2: mod_base = OTHER; note = 2'-O-methylguanosine-3'-phosphorothioate
  modified_base 3: mod_base = OTHER; note = 2'-O-methyladenosine-3'-phosphate
  modified_base 4: mod_base = OTHER; note = 2'-O-methylguanosine-3'-phosphate
  modified_base 5: mod_base = OTHER; note = 2'-O-methyluridine-3'-phosphate
  modified_base 6: mod_base = OTHER; note = 2'-O-methylguanosine-3'-phosphate
  modified_base 7: mod_base = OTHER; note = 2'-fluorocytidine-3'-phosphate
  modified_base 8: mod_base = OTHER; note = 2'-O-methyluridine-3'-phosphate
  modified_base 9: mod_base = OTHER; note = 2'-fluoroguanosine-3'-phosphate
  modified_base 10: mod_base = OTHER; note = 2'-fluoroadenosine-3'-phosphate
  modified_base 11: mod_base = OTHER; note = 2'-fluoroguanosine-3'-phosphate
  modified_base 12: mod_base = OTHER; note = 2'-O-methyluridine-3'-phosphate
  modified_base 13: mod_base = OTHER; note = 2'-O-methyluridine-3'-phosphate
  modified_base 14: mod_base = OTHER; note = 2'-O-methylcytidine-3'-phosphate
  modified_base 15: mod_base = OTHER; note = 2'-O-methylcytidine-3'-phosphate
  modified_base 16: mod_base = OTHER; note = 2'-O-methyluridine-3'-phosphate
  modified_base 17: mod_base = OTHER; note = 2'-O-methyluridine-3'-phosphate
  modified_base 18: mod_base = OTHER; note = 2'-O-methylguanosine-3'-phosphate
  modified_base 19: mod_base = OTHER; note = 2'-O-methylcytidine-3'-phosphorothioate
  modified_base 20: mod_base = OTHER; note = 2'-O-methyluridine-3'-phosphorothioate
  modified_base 21: mod_base = OTHER; note = 2'-O-methyladenosine-3'-phosphate
tgagtgctgagttccttgcta

SEQ ID NO: 4785 - RNA, 21 nt, synthetic construct
  source 1..21: mol_type = other RNA
  modified_base 1: mod_base = OTHER; note = 2'-O-methylguanosine-3'-phosphorothioate
  modified_base 2: mod_base = OTHER; note = 2'-O-methylcytidine-3'-phosphorothioate
  modified_base 3: mod_base = OTHER; note = 2'-O-methylcytidine-3'-phosphate
  modified_base 4: mod_base = OTHER; note = 2'-O-methyladenosine-3'-phosphate
  modified_base 5: mod_base = OTHER; note = 2'-O-methyluridine-3'-phosphate
  modified_base 6: mod_base = OTHER; note = 2'-O-methylguanosine-3'-phosphate
  modified_base 7: mod_base = OTHER; note = 2'-fluorocytidine-3'-phosphate
  modified_base 8: mod_base = OTHER; note = 2'-O-methyladenosine-3'-phosphate
  modified_base 9: mod_base = OTHER; note = 2'-fluorouridine-3'-phosphate
  modified_base 10: mod_base = OTHER; note = 2'-fluoroguanosine-3'-phosphate
  modified_base 11: mod_base = OTHER; note = 2'-fluoroadenosine-3'-phosphate
  modified_base 12: mod_base = OTHER; note = 2'-O-methyluridine-3'-phosphate
  modified_base 13: mod_base = OTHER; note = 2'-O-methyluridine-3'-phosphate
  modified_base 14: mod_base = OTHER; note = 2'-O-methyladenosine-3'-phosphate
  modified_base 15: mod_base = OTHER; note = 2'-O-methyluridine-3'-phosphate
  modified_base 16: mod_base = OTHER; note = 2'-O-methylguanosine-3'-phosphate
  modified_base 17: mod_base = OTHER; note = 2'-O-methyladenosine-3'-phosphate
  modified_base 18: mod_base = OTHER; note = 2'-O-methyluridine-3'-phosphate
  modified_base 19: mod_base = OTHER; note = 2'-O-methylcytidine-3'-phosphorothioate
  modified_base 20: mod_base = OTHER; note = 2'-O-methyladenosine-3'-phosphorothioate
  modified_base 21: mod_base = OTHER; note = 2'-O-methyladenosine-3'-phosphate
gccatgcatgattatgatcaa

SEQ ID NO: 4786 - RNA, 21 nt, synthetic construct
  source 1..21: mol_type = other RNA
  modified_base 1: mod_base = OTHER; note = 2'-O-methyluridine-3'-phosphorothioate
  modified_base 2: mod_base = OTHER; note = 2'-O-methylguanosine-3'-phosphorothioate
  modified_base 3: mod_base = OTHER; note = 2'-O-methylcytidine-3'-phosphate
  modified_base 4: mod_base = OTHER; note = 2'-O-methyluridine-3'-phosphate
  modified_base 5: mod_base = OTHER; note = 2'-O-methylguanosine-3'-phosphate
  modified_base 6: mod_base = OTHER; note = 2'-O-methylcytidine-3'-phosphate
  modified_base 7: mod_base = OTHER; note = 2'-fluorouridine-3'-phosphate
  modified_base 8: mod_base = OTHER; note = 2'-O-methylguanosine-3'-phosphate
  modified_base 9: mod_base = OTHER; note = 2'-fluoroguanosine-3'-phosphate
  modified_base 10: mod_base = OTHER; note = 2'-fluorouridine-3'-phosphate
  modified_base 11: mod_base = OTHER; note = 2'-fluorouridine-3'-phosphate
  modified_base 12: mod_base = OTHER; note = 2'-O-methyluridine-3'-phosphate
  modified_base 13: mod_base = OTHER; note = 2'-O-methylguanosine-3'-phosphate
  modified_base 14: mod_base = OTHER; note = 2'-O-methylcytidine-3'-phosphate
  modified_base 15: mod_base = OTHER; note = 2'-O-methyluridine-3'-phosphate
  modified_base 16: mod_base = OTHER; note = 2'-O-methyladenosine-3'-phosphate
  modified_base 17: mod_base = OTHER; note = 2'-O-methylcytidine-3'-phosphate
  modified_base 18: mod_base = OTHER; note = 2'-O-methylcytidine-3'-phosphate
  modified_base 19: mod_base = OTHER; note = 2'-O-methyladenosine-3'-phosphorothioate
  modified_base 20: mod_base = OTHER; note = 2'-O-methylguanosine-3'-phosphorothioate
  modified_base 21: mod_base = OTHER; note = 2'-O-methyladenosine-3'-phosphate
tgctgctggtttgctaccaga

SEQ ID NO: 4787 - RNA, 21 nt, synthetic construct
  source 1..21: mol_type = other RNA
  modified_base 1: mod_base = OTHER; note = 2'-O-methylcytidine-3'-phosphorothioate
  modified_base 2: mod_base = OTHER; note = 2'-O-methyladenosine-3'-phosphorothioate
  modified_base 3: mod_base = OTHER; note = 2'-O-methylguanosine-3'-phosphate
  modified_base 4: mod_base = OTHER; note = 2'-O-methyladenosine-3'-phosphate
  modified_base 5: mod_base = OTHER; note = 2'-O-methyluridine-3'-phosphate
  modified_base 6: mod_base = OTHER; note = 2'-O-methylguanosine-3'-phosphate
  modified_base 7: mod_base = OTHER; note = 2'-fluoroadenosine-3'-phosphate
  modified_base 8: mod_base = OTHER; note = 2'-O-methyladenosine-3'-phosphate
  modified_base 9: mod_base = OTHER; note = 2'-fluoroguanosine-3'-phosphate
  modified_base 10: mod_base = OTHER; note = 2'-fluoroadenosine-3'-phosphate
  modified_base 11: mod_base = OTHER; note = 2'-fluoroguanosine-3'-phosphate
  modified_base 12: mod_base = OTHER; note = 2'-O-methylguanosine-3'-phosphate
  modified_base 13: mod_base = OTHER; note = 2'-O-methyladenosine-3'-phosphate
  modified_base 14: mod_base = OTHER; note = 2'-O-methyladenosine-3'-phosphate
  modified_base 15: mod_base = OTHER; note = 2'-O-methyluridine-3'-phosphate
  modified_base 16: mod_base = OTHER; note = 2'-O-methyladenosine-3'-phosphate
  modified_base 17: mod_base = OTHER; note = 2'-O-methylguanosine-3'-phosphate
  modified_base 18: mod_base = OTHER; note = 2'-O-methylcytidine-3'-phosphate
  modified_base 19: mod_base = OTHER; note = 2'-O-methylguanosine-3'-phosphorothioate
  modified_base 20: mod_base = OTHER; note = 2'-O-methyladenosine-3'-phosphorothioate
  modified_base 21: mod_base = OTHER; note = 2'-O-methyladenosine-3'-phosphate
cagatgaagaggaatagcgaa

SEQ ID NO: 4788 - RNA, 21 nt, synthetic construct
  source 1..21: mol_type = other RNA
  modified_base 1: mod_base = OTHER; note = 2'-O-methyladenosine-3'-phosphorothioate
  modified_base 2: mod_base = OTHER; note = 2'-O-methyluridine-3'-phosphorothioate
  modified_base 3: mod_base = OTHER; note = 2'-O-methylcytidine-3'-phosphate
  modified_base 4: mod_base = OTHER; note = 2'-O-methylcytidine-3'-phosphate
  modified_base 5: mod_base = OTHER; note = 2'-O-methyladenosine-3'-phosphate
  modified_base 6: mod_base = OTHER; note = 2'-O-methylguanosine-3'-phosphate
  modified_base 7: mod_base = OTHER; note = 2'-fluoroguanosine-3'-phosphate
  modified_base 8: mod_base = OTHER; note = 2'-O-methyluridine-3'-phosphate
  modified_base 9: mod_base = OTHER; note = 2'-fluoroguanosine-3'-phosphate
  modified_base 10: mod_base = OTHER; note = 2'-fluorocytidine-3'-phosphate
  modified_base 11: mod_base = OTHER; note = 2'-fluoroadenosine-3'-phosphate
  modified_base 12: mod_base = OTHER; note = 2'-O-methyluridine-3'-phosphate
  modified_base 13: mod_base = OTHER; note = 2'-O-methylcytidine-3'-phosphate
  modified_base 14: mod_base = OTHER; note = 2'-O-methyladenosine-3'-phosphate
  modified_base 15: mod_base = OTHER; note = 2'-O-methyladenosine-3'-phosphate
  modified_base 16: mod_base = OTHER; note = 2'-O-methyluridine-3'-phosphate
  modified_base 17: mod_base = OTHER; note = 2'-O-methyluridine-3'-phosphate
  modified_base 18: mod_base = OTHER; note = 2'-O-methyluridine-3'-phosphate
  modified_base 19: mod_base = OTHER; note = 2'-O-methylcytidine-3'-phosphorothioate
  modified_base 20: mod_base = OTHER; note = 2'-O-methyluridine-3'-phosphorothioate
  modified_base 21: mod_base = OTHER; note = 2'-O-methyladenosine-3'-phosphate
atccaggtgcatcaatttcta

SEQ ID NO: 4789 - RNA, 21 nt, synthetic construct
  source 1..21: mol_type = other RNA
  modified_base 1: mod_base = OTHER; note = 2'-O-methyladenosine-3'-phosphorothioate
  modified_base 2: mod_base = OTHER; note = 2'-O-methyladenosine-3'-phosphorothioate
  modified_base 3: mod_base = OTHER; note = 2'-O-methyluridine-3'-phosphate
  modified_base 4: mod_base = OTHER; note = 2'-O-methyladenosine-3'-phosphate
  modified_base 5: mod_base = OTHER; note = 2'-O-methyladenosine-3'-phosphate
  modified_base 6: mod_base = OTHER; note = 2'-O-methylguanosine-3'-phosphate
  modified_base 7: mod_base = OTHER; note = 2'-fluorocytidine-3'-phosphate
  modified_base 8: mod_base = OTHER; note = 2'-O-methylcytidine-3'-phosphate
  modified_base 9: mod_base = OTHER; note = 2'-fluoroadenosine-3'-phosphate
  modified_base 10: mod_base = OTHER; note = 2'-fluoroadenosine-3'-phosphate
  modified_base 11: mod_base = OTHER; note = 2'-fluoroguanosine-3'-phosphate
  modified_base 12: mod_base = OTHER; note = 2'-O-methylcytidine-3'-phosphate
  modified_base 13: mod_base = OTHER; note = 2'-O-methylguanosine-3'-phosphate
  modified_base 14: mod_base = OTHER; note = 2'-O-methyluridine-3'-phosphate
  modified_base 15: mod_base = OTHER; note = 2'-O-methyluridine-3'-phosphate
  modified_base 16: mod_base = OTHER; note = 2'-O-methyladenosine-3'-phosphate
  modified_base 17: mod_base = OTHER; note = 2'-O-methyluridine-3'-phosphate
  modified_base 18: mod_base = OTHER; note = 2'-O-methylcytidine-3'-phosphate
  modified_base 19: mod_base = OTHER; note = 2'-O-methyluridine-3'-phosphorothioate
  modified_base 20: mod_base = OTHER; note = 2'-O-methyluridine-3'-phosphorothioate
  modified_base 21: mod_base = OTHER; note = 2'-O-methyladenosine-3'-phosphate
aataagccaagcgttatctta

SEQ ID NO: 4790 - RNA, 21 nt, synthetic construct
  source 1..21: mol_type = other RNA
  modified_base 1: mod_base = OTHER; note = 2'-O-methylguanosine-3'-phosphorothioate
  modified_base 2: mod_base = OTHER; note = 2'-O-methyladenosine-3'-phosphorothioate
  modified_base 3: mod_base = OTHER; note = 2'-O-methylguanosine-3'-phosphate
  modified_base 4: mod_base = OTHER; note = 2'-O-methyladenosine-3'-phosphate
  modified_base 5: mod_base = OTHER; note = 2'-O-methylguanosine-3'-phosphate
  modified_base 6: mod_base = OTHER; note = 2'-O-methylguanosine-3'-phosphate
  modified_base 7: mod_base = OTHER; note = 2'-fluoroadenosine-3'-phosphate
  modified_base 8: mod_base = OTHER; note = 2'-O-methyluridine-3'-phosphate
  modified_base 9: mod_base = OTHER; note = 2'-fluorocytidine-3'-phosphate
  modified_base 10: mod_base = OTHER; note = 2'-fluorocytidine-3'-phosphate
  modified_base 11: mod_base = OTHER; note = 2'-fluorouridine-3'-phosphate
  modified_base 12: mod_base = OTHER; note = 2'-O-methyluridine-3'-phosphate
  modified_base 13: mod_base = OTHER; note = 2'-O-methylguanosine-3'-phosphate
  modified_base 14: mod_base = OTHER; note = 2'-O-methylcytidine-3'-phosphate
  modified_base 15: mod_base = OTHER; note = 2'-O-methyluridine-3'-phosphate
  modified_base 16: mod_base = OTHER; note = 2'-O-methylcytidine-3'-phosphate
  modified_base 17: mod_base = OTHER; note = 2'-O-methyluridine-3'-phosphate
  modified_base 18: mod_base = OTHER; note = 2'-O-methylguanosine-3'-phosphate
  modified_base 19: mod_base = OTHER; note = 2'-O-methylcytidine-3'-phosphorothioate
  modified_base 20: mod_base = OTHER; note = 2'-O-methyluridine-3'-phosphorothioate
  modified_base 21: mod_base = OTHER; note = 2'-O-methyladenosine-3'-phosphate
gagaggatccttgctctgcta

SEQ ID NO: 4791 - RNA, 21 nt, synthetic construct
  source 1..21: mol_type = other RNA
  modified_base 1: mod_base = OTHER; note = 2'-O-methyladenosine-3'-phosphorothioate
  modified_base 2: mod_base = OTHER; note = 2'-O-methyluridine-3'-phosphorothioate
  modified_base 3: mod_base = OTHER; note = 2'-O-methylguanosine-3'-phosphate
  modified_base 4: mod_base = OTHER; note = 2'-O-methyladenosine-3'-phosphate
  modified_base 5: mod_base = OTHER; note = 2'-O-methyluridine-3'-phosphate
  modified_base 6: mod_base = OTHER; note = 2'-O-methylguanosine-3'-phosphate
  modified_base 7: mod_base = OTHER; note = 2'-fluoroadenosine-3'-phosphate
  modified_base 8: mod_base = OTHER; note = 2'-O-methyladenosine-3'-phosphate
  modified_base 9: mod_base = OTHER; note = 2'-fluoroguanosine-3'-phosphate
  modified_base 10: mod_base = OTHER; note = 2'-fluoroadenosine-3'-phosphate
  modified_base 11: mod_base = OTHER; note = 2'-fluorocytidine-3'-phosphate
  modified_base 12: mod_base = OTHER; note = 2'-O-methylguanosine-3'-phosphate
  modified_base 13: mod_base = OTHER; note = 2'-O-methylguanosine-3'-phosphate
  modified_base 14: mod_base = OTHER; note = 2'-O-methyluridine-3'-phosphate
  modified_base 15: mod_base = OTHER; note = 2'-O-methylguanosine-3'-phosphate
  modified_base 16: mod_base = OTHER; note = 2'-O-methyladenosine-3'-phosphate
  modified_base 17: mod_base = OTHER; note = 2'-O-methyladenosine-3'-phosphate
  modified_base 18: mod_base = OTHER; note = 2'-O-methylguanosine-3'-phosphate
  modified_base 19: mod_base = OTHER; note = 2'-O-methyladenosine-3'-phosphorothioate
  modified_base 20: mod_base = OTHER; note = 2'-O-methyladenosine-3'-phosphorothioate
  modified_base 21: mod_base = OTHER; note = 2'-O-methyladenosine-3'-phosphate
atgatgaagacggtgaagaaa

SEQ ID NO: 4792 - RNA, 21 nt, synthetic construct
  source 1..21: mol_type = other RNA
  modified_base 1: mod_base = OTHER; note = 2'-O-methyluridine-3'-phosphorothioate
  modified_base 2: mod_base = OTHER; note = 2'-O-methylcytidine-3'-phosphorothioate
  modified_base 3: mod_base = OTHER; note = 2'-O-methylguanosine-3'-phosphate
  modified_base 4: mod_base = OTHER; note = 2'-O-methyluridine-3'-phosphate
  modified_base 5: mod_base = OTHER; note = 2'-O-methyladenosine-3'-phosphate
  modified_base 6: mod_base = OTHER; note = 2'-O-methyladenosine-3'-phosphate
  modified_base 7: mod_base = OTHER; note = 2'-fluoroguanosine-3'-phosphate
  modified_base 8: mod_base = OTHER; note = 2'-O-methyluridine-3'-phosphate
  modified_base 9: mod_base = OTHER; note = 2'-fluoroguanosine-3'-phosphate
  modified_base 10: mod_base = OTHER; note = 2'-fluorouridine-3'-phosphate
  modified_base 11: mod_base = OTHER; note = 2'-fluoroadenosine-3'-phosphate
  modified_base 12: mod_base = OTHER; note = 2'-O-methyladenosine-3'-phosphate
  modified_base 13: mod_base = OTHER; note = 2'-O-methylguanosine-3'-phosphate
  modified_base 14: mod_base = OTHER; note = 2'-O-methyladenosine-3'-phosphate
  modified_base 15: mod_base = OTHER; note = 2'-O-methyladenosine-3'-phosphate
  modified_base 16: mod_base = OTHER; note = 2'-O-methyladenosine-3'-phosphate
  modified_base 17: mod_base = OTHER; note = 2'-O-methylguanosine-3'-phosphate
  modified_base 18: mod_base = OTHER; note = 2'-O-methyladenosine-3'-phosphate
  modified_base 19: mod_base = OTHER; note = 2'-O-methyladenosine-3'-phosphorothioate
  modified_base 20: mod_base = OTHER; note = 2'-O-methyluridine-3'-phosphorothioate
  modified_base 21: mod_base = OTHER; note = 2'-O-methyladenosine-3'-phosphate
tcgtaagtgtaagaaagaata

SEQ ID NO: 4793 - RNA, 21 nt, synthetic construct
  source 1..21: mol_type = other RNA
  modified_base 1: mod_base = OTHER; note = 2'-O-methyladenosine-3'-phosphorothioate
  modified_base 2: mod_base = OTHER; note = 2'-O-methyluridine-3'-phosphorothioate
  modified_base 3: mod_base = OTHER; note = 2'-O-methylcytidine-3'-phosphate
  modified_base 4: mod_base = OTHER; note = 2'-O-methyluridine-3'-phosphate
  modified_base 5: mod_base = OTHER; note = 2'-O-methylguanosine-3'-phosphate
  modified_base 6: mod_base = OTHER; note = 2'-O-methyluridine-3'-phosphate
  modified_base 7: mod_base = OTHER; note = 2'-fluoroguanosine-3'-phosphate
  modified_base 8: mod_base = OTHER; note = 2'-O-methyluridine-3'-phosphate
  modified_base 9: mod_base = OTHER; note = 2'-fluoroadenosine-3'-phosphate
  modified_base 10: mod_base = OTHER; note = 2'-fluoroadenosine-3'-phosphate
  modified_base 11: mod_base = OTHER; note = 2'-fluorocytidine-3'-phosphate
  modified_base 12: mod_base = OTHER; note = 2'-O-methyladenosine-3'-phosphate
  modified_base 13: mod_base = OTHER; note = 2'-O-methylguanosine-3'-phosphate
  modified_base 14: mod_base = OTHER; note = 2'-O-methylcytidine-3'-phosphate
  modified_base 15: mod_base = OTHER; note = 2'-O-methyluridine-3'-phosphate
  modified_base 16: mod_base = OTHER; note = 2'-O-methylguanosine-3'-phosphate
  modified_base 17: mod_base = OTHER; note = 2'-O-methyluridine-3'-phosphate
  modified_base 18: mod_base = OTHER; note = 2'-O-methylguanosine-3'-phosphate
  modified_base 19: mod_base = OTHER; note = 2'-O-methylguanosine-3'-phosphorothioate
  modified_base 20: mod_base = OTHER; note = 2'-O-methyladenosine-3'-phosphorothioate
  modified_base 21: mod_base = OTHER; note = 2'-O-methyladenosine-3'-phosphate
atctgtgtaacagctgtggaa

SEQ ID NO: 4794 - RNA, 21 nt, synthetic construct
  source 1..21: mol_type = other RNA
  modified_base 1: mod_base = OTHER; note = 2'-O-methyladenosine-3'-phosphorothioate
  modified_base 2: mod_base = OTHER; note = 2'-O-methyluridine-3'-phosphorothioate
  modified_base 3: mod_base = OTHER; note = 2'-O-methyluridine-3'-phosphate
  modified_base 4: mod_base = OTHER; note = 2'-O-methyluridine-3'-phosphate
  modified_base 5: mod_base = OTHER; note = 2'-O-methyladenosine-3'-phosphate
  modified_base 6: mod_base = OTHER; note = 2'-O-methyladenosine-3'-phosphate
  modified_base 7: mod_base = OTHER; note = 2'-fluoroadenosine-3'-phosphate
  modified_base 8: mod_base = OTHER; note = 2'-O-methyladenosine-3'-phosphate
  modified_base 9: mod_base = OTHER; note = 2'-fluorouridine-3'-phosphate
  modified_base 10: mod_base = OTHER; note = 2'-fluorouridine-3'-phosphate
  modified_base 11: mod_base = OTHER; note = 2'-fluorocytidine-3'-phosphate
  modified_base 12: mod_base = OTHER; note = 2'-O-methylcytidine-3'-phosphate
  modified_base 13: mod_base = OTHER; note = 2'-O-methylcytidine-3'-phosphate
  modified_base 14: mod_base = OTHER; note = 2'-O-methyladenosine-3'-phosphate
  modified_base 15: mod_base = OTHER; note = 2'-O-methylcytidine-3'-phosphate
  modified_base 16: mod_base = OTHER; note = 2'-O-methyluridine-3'-phosphate
  modified_base 17: mod_base = OTHER; note = 2'-O-methylcytidine-3'-phosphate
  modified_base 18: mod_base = OTHER; note = 2'-O-methyladenosine-3'-phosphate
  modified_base 19: mod_base = OTHER; note = 2'-O-methyladenosine-3'-phosphorothioate
  modified_base 20: mod_base = OTHER; note = 2'-O-methylcytidine-3'-phosphorothioate
  modified_base 21: mod_base = OTHER; note = 2'-O-methyladenosine-3'-phosphate
atttaaaattcccactcaaca

SEQ ID NO: 4795 - RNA, 21 nt, synthetic construct
  source 1..21: mol_type = other RNA
  modified_base 1: mod_base = OTHER; note = 2'-O-methylguanosine-3'-phosphorothioate
  modified_base 2: mod_base = OTHER; note = 2'-O-methyladenosine-3'-phosphorothioate
  modified_base 3: mod_base = OTHER; note = 2'-O-methylcytidine-3'-phosphate
  modified_base 4: mod_base = OTHER; note = 2'-O-methylcytidine-3'-phosphate
  modified_base 5: mod_base = OTHER; note = 2'-O-methyladenosine-3'-phosphate
  modified_base 6: mod_base = OTHER; note = 2'-O-methylguanosine-3'-phosphate
  modified_base 7: mod_base = OTHER; note = 2'-fluorouridine-3'-phosphate
  modified_base 8: mod_base = OTHER; note = 2'-O-methylguanosine-3'-phosphate
  modified_base 9: mod_base = OTHER; note = 2'-fluorouridine-3'-phosphate
  modified_base 10: mod_base = OTHER; note = 2'-fluorocytidine-3'-phosphate
  modified_base 11: mod_base = OTHER; note = 2'-fluorouridine-3'-phosphate
  modified_base 12: mod_base = OTHER; note = 2'-O-methyladenosine-3'-phosphate
  modified_base 13: mod_base = OTHER; note = 2'-O-methylcytidine-3'-phosphate
  modified_base 14: mod_base = OTHER; note = 2'-O-methyluridine-3'-phosphate
  modified_base 15: mod_base = OTHER; note = 2'-O-methylguanosine-3'-phosphate
  modified_base 16: mod_base = OTHER; note = 2'-O-methylguanosine-3'-phosphate
  modified_base 17: mod_base = OTHER; note = 2'-O-methylcytidine-3'-phosphate
  modified_base 18: mod_base = OTHER; note = 2'-O-methyluridine-3'-phosphate
  modified_base 19: mod_base = OTHER; note = 2'-O-methylcytidine-3'-phosphorothioate
  modified_base 20: mod_base = OTHER; note = 2'-O-methyluridine-3'-phosphorothioate
  modified_base 21: mod_base = OTHER; note = 2'-O-methyladenosine-3'-phosphate
gaccagtgtctactggctcta

SEQ ID NO: 4796 - RNA, 21 nt, synthetic construct
  source 1..21: mol_type = other RNA
  modified_base 1: mod_base = OTHER; note = 2'-O-methylcytidine-3'-phosphorothioate
  modified_base 2: mod_base = OTHER; note = 2'-O-methylguanosine-3'-phosphorothioate
  modified_base 3: mod_base = OTHER; note = 2'-O-methylcytidine-3'-phosphate
  modified_base 4: mod_base = OTHER; note = 2'-O-methyluridine-3'-phosphate
  modified_base 5: mod_base = OTHER; note = 2'-O-methyluridine-3'-phosphate
  modified_base 6: mod_base = OTHER; note = 2'-O-methyluridine-3'-phosphate
  modified_base 7: mod_base = OTHER; note = 2'-fluorocytidine-3'-phosphate
  modified_base 8: mod_base = OTHER; note = 2'-O-methylguanosine-3'-phosphate
  modified_base 9: mod_base = OTHER; note = 2'-fluorouridine-3'-phosphate
  modified_base 10: mod_base = OTHER; note = 2'-fluorouridine-3'-phosphate
  modified_base 11: mod_base = OTHER; note = 2'-fluorouridine-3'-phosphate
  modified_base 12: mod_base = OTHER; note = 2'-O-methyluridine-3'-phosphate
  modified_base 13: mod_base = OTHER; note = 2'-O-methyluridine-3'-phosphate
  modified_base 14: mod_base = OTHER; note = 2'-O-methyluridine-3'-phosphate
  modified_base 15: mod_base = OTHER; note = 2'-O-methyladenosine-3'-phosphate
  modified_base 16: mod_base = OTHER; note = 2'-O-methylguanosine-3'-phosphate
  modified_base 17: mod_base = OTHER; note = 2'-O-methyluridine-3'-phosphate
  modified_base 18: mod_base = OTHER; note = 2'-O-methylcytidine-3'-phosphate
  modified_base 19: mod_base = OTHER; note = 2'-O-methyladenosine-3'-phosphorothioate
  modified_base 20: mod_base = OTHER; note = 2'-O-methyluridine-3'-phosphorothioate
  modified_base 21: mod_base = OTHER; note = 2'-O-methyladenosine-3'-phosphate
cgctttcgttttttagtcata

SEQ ID NO: 4797 - RNA, 21 nt, synthetic construct
  source 1..21: mol_type = other RNA
  modified_base 1: mod_base = OTHER; note = 2'-O-methyluridine-3'-phosphorothioate
  modified_base 2: mod_base = OTHER; note = 2'-O-methylcytidine-3'-phosphorothioate
  modified_base 3: mod_base = OTHER; note = 2'-O-methylcytidine-3'-phosphate
  modified_base 4: mod_base = OTHER; note = 2'-O-methylguanosine-3'-phosphate
  modified_base 5: mod_base = OTHER; note = 2'-O-methyluridine-3'-phosphate
  modified_base 6: mod_base = OTHER; note = 2'-O-methylguanosine-3'-phosphate
  modified_base 7: mod_base = OTHER; note = 2'-fluorouridine-3'-phosphate
  modified_base 8: mod_base = OTHER; note = 2'-O-methyluridine-3'-phosphate
  modified_base 9: mod_base = OTHER; note = 2'-fluoroguanosine-3'-phosphate
  modified_base 10: mod_base = OTHER; note = 2'-fluoroadenosine-3'-phosphate
  modified_base 11: mod_base = OTHER; note = 2'-fluorocytidine-3'-phosphate
  modified_base 12: mod_base = OTHER; note = 2'-O-methylcytidine-3'-phosphate
  modified_base 13: mod_base = OTHER; note = 2'-O-methylcytidine-3'-phosphate
  modified_base 14: mod_base = OTHER; note = 2'-O-methyladenosine-3'-phosphate
  modified_base 15: mod_base = OTHER; note = 2'-O-methyluridine-3'-phosphate
  modified_base 16: mod_base = OTHER; note = 2'-O-methylguanosine-3'-phosphate
  modified_base 17: mod_base = OTHER; note = 2'-O-methyluridine-3'-phosphate
  modified_base 18: mod_base = OTHER; note = 2'-O-methyluridine-3'-phosphate
  modified_base 19: mod_base = OTHER; note = 2'-O-methylguanosine-3'-phosphorothioate
  modified_base 20: mod_base = OTHER; note = 2'-O-methylcytidine-3'-phosphorothioate
  modified_base 21: mod_base = OTHER; note = 2'-O-methyladenosine-3'-phosphate
tccgtgttgacccatgttgca

SEQ ID NO: 4798 - RNA, 21 nt, synthetic construct
  source 1..21: mol_type = other RNA
  modified_base 1: mod_base = OTHER; note = 2'-O-methyladenosine-3'-phosphorothioate
  modified_base 2: mod_base = OTHER; note = 2'-O-methyluridine-3'-phosphorothioate
  modified_base 3: mod_base = OTHER; note = 2'-O-methyladenosine-3'-phosphate
  modified_base 4: mod_base = OTHER; note = 2'-O-methylcytidine-3'-phosphate
  modified_base 5: mod_base = OTHER; note = 2'-O-methyladenosine-3'-phosphate
  modified_base 6: mod_base = OTHER; note = 2'-O-methylguanosine-3'-phosphate
  modified_base 7: mod_base = OTHER; note = 2'-fluoroadenosine-3'-phosphate
  modified_base 8: mod_base = OTHER; note = 2'-O-methyladenosine-3'-phosphate
  modified_base 9: mod_base = OTHER; note = 2'-fluoroguanosine-3'-phosphate
  modified_base 10: mod_base = OTHER; note = 2'-fluoroadenosine-3'-phosphate
  modified_base 11: mod_base = OTHER; note = 2'-fluorouridine-3'-phosphate
  modified_base 12: mod_base = OTHER; note = 2'-O-methylguanosine-3'-phosphate
  modified_base 13: mod_base = OTHER; note = 2'-O-methyladenosine-3'-phosphate
  modified_base 14: mod_base = OTHER; note = 2'-O-methyladenosine-3'-phosphate
  modified_base 15: mod_base = OTHER; note = 2'-O-methylguanosine-3'-phosphate
  modified_base 16: mod_base = OTHER; note = 2'-O-methyladenosine-3'-phosphate
  modified_base 17: mod_base = OTHER; note = 2'-O-methyladenosine-3'-phosphate
  modified_base 18: mod_base = OTHER; note = 2'-O-methyladenosine-3'-phosphate
  modified_base 19: mod_base = OTHER; note = 2'-O-methyluridine-3'-phosphorothioate
  modified_base 20: mod_base = OTHER; note = 2'-O-methylguanosine-3'-phosphorothioate
  modified_base 21: mod_base = OTHER; note = 2'-O-methyladenosine-3'-phosphate
atacagaagatgaagaaatga

SEQ ID NO: 4799 - RNA, 21 nt, synthetic construct
  source 1..21: mol_type = other RNA
  modified_base 1: mod_base = OTHER; note = 2'-O-methyluridine-3'-phosphorothioate
  modified_base 2: mod_base = OTHER; note = 2'-O-methylcytidine-3'-phosphorothioate
  modified_base 3: mod_base = OTHER; note = 2'-O-methyluridine-3'-phosphate
  modified_base 4: mod_base = OTHER; note = 2'-O-methylcytidine-3'-phosphate
  modified_base 5: mod_base = OTHER; note = 2'-O-methylcytidine-3'-phosphate
  modified_base 6: mod_base = OTHER; note = 2'-O-methylcytidine-3'-phosphate
  modified_base 7: mod_base = OTHER; note = 2'-fluoroguanosine-3'-phosphate
  modified_base 8: mod_base = OTHER; note = 2'-O-methyladenosine-3'-phosphate
  modified_base 9: mod_base = OTHER; note = 2'-fluoroguanosine-3'-phosphate
  modified_base 10: mod_base = OTHER; note = 2'-fluorocytidine-3'-phosphate
  modified_base 11: mod_base = OTHER; note = 2'-fluorouridine-3'-phosphate
  modified_base 12: mod_base = OTHER; note = 2'-O-methylguanosine-3'-phosphate
  modified_base 13: mod_base = OTHER; note = 2'-O-methyladenosine-3'-phosphate
  modified_base 14: mod_base = OTHER; note = 2'-O-methyladenosine-3'-phosphate
  modified_base 15: mod_base = OTHER; note = 2'-O-methyladenosine-3'-phosphate
  modified_base 16: mod_base = OTHER; note = 2'-O-methylcytidine-3'-phosphate
  modified_base 17: mod_base = OTHER; note = 2'-O-methyluridine-3'-phosphate
  modified_base 18: mod_base = OTHER; note = 2'-O-methyluridine-3'-phosphate
  modified_base 19: mod_base = OTHER; note = 2'-O-methyladenosine-3'-phosphorothioate
  modified_base 20: mod_base = OTHER; note = 2'-O-methyladenosine-3'-phosphorothioate
  modified_base 21: mod_base = OTHER; note = 2'-O-methyladenosine-3'-phosphate
tctcccgagctgaaacttaaa

SEQ ID NO: 4800 - RNA, 21 nt, synthetic construct
  source 1..21: mol_type = other RNA
  modified_base 1: mod_base = OTHER; note = 2'-O-methyluridine-3'-phosphorothioate
  modified_base 2: mod_base = OTHER; note = 2'-O-methylguanosine-3'-phosphorothioate
  modified_base 3: mod_base = OTHER; note = 2'-O-methylcytidine-3'-phosphate
  modified_base 4: mod_base = OTHER; note = 2'-O-methyladenosine-3'-phosphate
  modified_base 5: mod_base = OTHER; note = 2'-O-methyluridine-3'-phosphate
  modified_base 6: mod_base = OTHER; note = 2'-O-methylcytidine-3'-phosphate
  modified_base 7: mod_base = OTHER; note = 2'-fluoroadenosine-3'-phosphate
  modified_base 8: mod_base = OTHER; note = 2'-O-methyladenosine-3'-phosphate
  modified_base 9: mod_base = OTHER; note = 2'-fluoroadenosine-3'-phosphate
  modified_base 10: mod_base = OTHER; note = 2'-fluorocytidine-3'-phosphate
  modified_base 11: mod_base = OTHER; note = 2'-fluorouridine-3'-phosphate
  modified_base 12: mod_base = OTHER; note = 2'-O-methylguanosine-3'-phosphate
  modified_base 13: mod_base = OTHER; note = 2'-O-methylguanosine-3'-phosphate
  modified_base 14: mod_base = OTHER; note = 2'-O-methylcytidine-3'-phosphate
  modified_base 15: mod_base = OTHER; note = 2'-O-methyladenosine-3'-phosphate
  modified_base 16: mod_base = OTHER; note = 2'-O-methylguanosine-3'-phosphate
  modified_base 17: mod_base = OTHER; note = 2'-O-methyladenosine-3'-phosphate
  modified_base 18: mod_base = OTHER; note = 2'-O-methyluridine-3'-phosphate
  modified_base 19: mod_base = OTHER; note = 2'-O-methyladenosine-3'-phosphorothioate
  modified_base 20: mod_base = OTHER; note = 2'-O-methyluridine-3'-phosphorothioate
  modified_base 21: mod_base = OTHER; note = 2'-O-methyladenosine-3'-phosphate
tgcatcaaactggcagatata

SEQ ID NO: 4801 - RNA, 21 nt, synthetic construct
  source 1..21: mol_type = other RNA
  modified_base 1: mod_base = OTHER; note = 2'-O-methyluridine-3'-phosphorothioate
  modified_base 2: mod_base = OTHER; note = 2'-O-methyluridine-3'-phosphorothioate
  modified_base 3: mod_base = OTHER; note = 2'-O-methylguanosine-3'-phosphate
  modified_base 4: mod_base = OTHER; note = 2'-O-methylcytidine-3'-phosphate
  modified_base 5: mod_base = OTHER; note = 2'-O-methyladenosine-3'-phosphate
  modified_base 6: mod_base = OTHER; note = 2'-O-methyladenosine-3'-phosphate
  modified_base 7: mod_base = OTHER; note = 2'-fluoroadenosine-3'-phosphate
  modified_base 8: mod_base = OTHER; note = 2'-O-methyladenosine-3'-phosphate
  modified_base 9: mod_base = OTHER; note = 2'-fluorouridine-3'-phosphate
  modified_base 10: mod_base = OTHER; note = 2'-fluoroadenosine-3'-phosphate
  modified_base 11: mod_base = OTHER; note = 2'-fluorouridine-3'-phosphate
  modified_base 12: mod_base = OTHER; note = 2'-O-methyluridine-3'-phosphate
  modified_base 13: mod_base = OTHER; note = 2'-O-methylcytidine-3'-phosphate
  modified_base 14: mod_base = OTHER; note = 2'-O-methyladenosine-3'-phosphate
  modified_base 15: mod_base = OTHER; note = 2'-O-methylguanosine-3'-phosphate
  modified_base 16: mod_base = OTHER; note = 2'-O-methylguanosine-3'-phosphate
  modified_base 17: mod_base = OTHER; note = 2'-O-methyladenosine-3'-phosphate
  modified_base 18: mod_base = OTHER; note = 2'-O-methylguanosine-3'-phosphate
  modified_base 19: mod_base = OTHER; note = 2'-O-methyladenosine-3'-phosphorothioate
  modified_base 20: mod_base = OTHER; note = 2'-O-methylcytidine-3'-phosphorothioate
  modified_base 21: mod_base = OTHER; note = 2'-O-methyladenosine-3'-phosphate
ttgcaaaatattcaggagaca

SEQ ID NO: 4802 - RNA, 21 nt, synthetic construct
  source 1..21: mol_type = other RNA
  modified_base 1: mod_base = OTHER; note = 2'-O-methyladenosine-3'-phosphorothioate
  modified_base 2: mod_base = OTHER; note = 2'-O-methylcytidine-3'-phosphorothioate
  modified_base 3: mod_base = OTHER; note = 2'-O-methyladenosine-3'-phosphate
  modified_base 4: mod_base = OTHER; note = 2'-O-methyladenosine-3'-phosphate
  modified_base 5: mod_base = OTHER; note = 2'-O-methyluridine-3'-phosphate
  modified_base 6: mod_base = OTHER; note = 2'-O-methylcytidine-3'-phosphate
  modified_base 7: mod_base = OTHER; note = 2'-fluoroguanosine-3'-phosphate
  modified_base 8: mod_base = OTHER; note = 2'-O-methyluridine-3'-phosphate
  modified_base 9: mod_base = OTHER; note = 2'-fluoroadenosine-3'-phosphate
  modified_base 10: mod_base = OTHER; note = 2'-fluorouridine-3'-phosphate
  modified_base 11: mod_base = OTHER; note = 2'-fluoroadenosine-3'-phosphate
  modified_base 12: mod_base = OTHER; note = 2'-O-methylcytidine-3'-phosphate
  modified_base 13: mod_base = OTHER; note = 2'-O-methyladenosine-3'-phosphate
  modified_base 14: mod_base = OTHER; note = 2'-O-methyluridine-3'-phosphate
  modified_base 15: mod_base = OTHER; note = 2'-O-methylguanosine-3'-phosphate
  modified_base 16: mod_base = OTHER; note = 2'-O-methylcytidine-3'-phosphate
  modified_base 17: mod_base = OTHER; note = 2'-O-methylcytidine-3'-phosphate
  modified_base 18: mod_base = OTHER; note = 2'-O-methyladenosine-3'-phosphate
  modified_base 19: mod_base = OTHER; note = 2'-O-methylcytidine-3'-phosphorothioate
  modified_base 20: mod_base = OTHER; note = 2'-O-methyladenosine-3'-phosphorothioate
  modified_base 21: mod_base = OTHER; note = 2'-O-methyladenosine-3'-phosphate
acaatcgtatacatgccacaa

SEQ ID NO: 4803 - RNA, 21 nt, synthetic construct
  source 1..21: mol_type = other RNA
  modified_base 1: mod_base = OTHER; note = 2'-O-methyladenosine-3'-phosphorothioate
  modified_base 2: mod_base = OTHER; note = 2'-O-methyladenosine-3'-phosphorothioate
  modified_base 3: mod_base = OTHER; note = 2'-O-methyluridine-3'-phosphate
  modified_base 4: mod_base = OTHER; note = 2'-O-methyladenosine-3'-phosphate
  modified_base 5: mod_base = OTHER; note = 2'-O-methylguanosine-3'-phosphate
  modified_base 6: mod_base = OTHER; note = 2'-O-methyladenosine-3'-phosphate
  modified_base 7: mod_base = OTHER; note = 2'-fluoroadenosine-3'-phosphate
  modified_base 8: mod_base = OTHER; note = 2'-O-methyladenosine-3'-phosphate
  modified_base 9: mod_base = OTHER; note = 2'-fluoroadenosine-3'-phosphate
  modified_base 10: mod_base = OTHER; note = 2'-fluoroguanosine-3'-phosphate
  modified_base 11: mod_base = OTHER; note = 2'-fluoroadenosine-3'-phosphate
  modified_base 12: mod_base = OTHER; note = 2'-O-methyluridine-3'-phosphate
  modified_base 13: mod_base = OTHER; note = 2'-O-methylguanosine-3'-phosphate
  modified_base 14: mod_base = OTHER; note = 2'-O-methyladenosine-3'-phosphate
  modified_base 15: mod_base = OTHER; note = 2'-O-methylguanosine-3'-phosphate
  modified_base 16: mod_base = OTHER; note = 2'-O-methylcytidine-3'-phosphate
  modified_base 17: mod_base = OTHER; note = 2'-O-methyladenosine-3'-phosphate
  modified_base 18: mod_base = OTHER; note = 2'-O-methyladenosine-3'-phosphate
  modified_base 19: mod_base = OTHER; note = 2'-O-methylcytidine-3'-phosphorothioate
  modified_base 20: mod_base = OTHER; note = 2'-O-methyluridine-3'-phosphorothioate
  modified_base 21: mod_base = OTHER; note = 2'-O-methyladenosine-3'-phosphate
aatagaaaagatgagcaacta

SEQ ID NO: 4804 - RNA, 21 nt, synthetic construct
  source 1..21: mol_type = other RNA
  modified_base 1: mod_base = OTHER; note = 2'-O-methyluridine-3'-phosphorothioate
  modified_base 2: mod_base = OTHER; note = 2'-O-methyladenosine-3'-phosphorothioate
  modified_base 3: mod_base = OTHER; note = 2'-O-methyluridine-3'-phosphate
  modified_base 4: mod_base = OTHER; note = 2'-O-methylcytidine-3'-phosphate
  modified_base 5: mod_base = OTHER; note = 2'-O-methyluridine-3'-phosphate
  modified_base 6: mod_base = OTHER; note = 2'-O-methyluridine-3'-phosphate
  modified_base 7: mod_base = OTHER; note = 2'-fluoroadenosine-3'-phosphate
  modified_base 8: mod_base = OTHER; note = 2'-O-methyluridine-3'-phosphate
  modified_base 9: mod_base = OTHER; note = 2'-fluoroguanosine-3'-phosphate
  modified_base 10: mod_base = OTHER; note = 2'-fluorouridine-3'-phosphate
  modified_base 11: mod_base = OTHER; note = 2'-fluorouridine-3'-phosphate
  modified_base 12: mod_base = OTHER; note = 2'-O-methylcytidine-3'-phosphate
  modified_base 13: mod_base = OTHER; note = 2'-O-methylcytidine-3'-phosphate
  modified_base 14: mod_base = OTHER; note = 2'-O-methyladenosine-3'-phosphate
  modified_base 15: mod_base = OTHER; note = 2'-O-methyluridine-3'-phosphate
  modified_base 16: mod_base = OTHER; note = 2'-O-methylguanosine-3'-phosphate
  modified_base 17: mod_base = OTHER; note = 2'-O-methylguanosine-3'-phosphate
  modified_base 18: mod_base = OTHER; note = 2'-O-methylcytidine-3'-phosphate
  modified_base 19: mod_base = OTHER; note = 2'-O-methyluridine-3'-phosphorothioate
  modified_base 20: mod_base = OTHER; note = 2'-O-methylguanosine-3'-phosphorothioate
  modified_base 21: mod_base = OTHER; note = 2'-O-methyladenosine-3'-phosphate
tatcttatgttccatggctga

SEQ ID NO: 4805 - RNA, 21 nt, synthetic construct
  source 1..21: mol_type = other RNA
  modified_base 1: mod_base = OTHER; note = 2'-O-methylcytidine-3'-phosphorothioate
  modified_base 2: mod_base = OTHER; note = 2'-O-methyluridine-3'-phosphorothioate
  modified_base 3: mod_base = OTHER; note = 2'-O-methyladenosine-3'-phosphate
  modified_base 4: mod_base = OTHER; note = 2'-O-methylcytidine-3'-phosphate
  modified_base 5: mod_base = OTHER; note = 2'-O-methylguanosine-3'-phosphate
  modified_base 6: mod_base = OTHER; note = 2'-O-methyluridine-3'-phosphate
  modified_base 7: mod_base = OTHER; note = 2'-fluoroguanosine-3'-phosphate
  modified_base 8: mod_base = OTHER; note = 2'-O-methyladenosine-3'-phosphate
  modified_base 9: mod_base = OTHER; note = 2'-fluoroadenosine-3'-phosphate
  modified_base 10: mod_base = OTHER; note = 2'-fluoroguanosine-3'-phosphate
  modified_base 11: mod_base = OTHER; note = 2'-fluoroadenosine-3'-phosphate
  modified_base 12: mod_base = OTHER; note = 2'-O-methylguanosine-3'-phosphate
  modified_base 13: mod_base = OTHER; note = 2'-O-methylcytidine-3'-phosphate
  modified_base 14: mod_base = OTHER; note = 2'-O-methyluridine-3'-phosphate
  modified_base 15: mod_base = OTHER; note = 2'-O-methylguanosine-3'-phosphate
  modified_base 16: mod_base = OTHER; note = 2'-O-methylcytidine-3'-phosphate
  modified_base 17: mod_base = OTHER; note = 2'-O-methylguanosine-3'-phosphate
  modified_base 18: mod_base = OTHER; note = 2'-O-methyluridine-3'-phosphate
  modified_base 19: mod_base = OTHER; note = 2'-O-methylguanosine-3'-phosphorothioate
  modified_base 20: mod_base = OTHER; note = 2'-O-methyladenosine-3'-phosphorothioate
  modified_base 21: mod_base = OTHER; note = 2'-O-methyladenosine-3'-phosphate
ctacgtgaagagctgcgtgaa

SEQ ID NO: 4806 - RNA, 21 nt, synthetic construct
  source 1..21: mol_type = other RNA
  modified_base 1: mod_base = OTHER; note = 2'-O-methylguanosine-3'-phosphorothioate
  modified_base 2: mod_base = OTHER; note = 2'-O-methyladenosine-3'-phosphorothioate
  modified_base 3: mod_base = OTHER; note = 2'-O-methyladenosine-3'-phosphate
  modified_base 4: mod_base = OTHER; note = 2'-O-methyluridine-3'-phosphate
  modified_base 5: mod_base = OTHER; note = 2'-O-methyluridine-3'-phosphate
  modified_base 6: mod_base = OTHER; note = 2'-O-methylguanosine-3'-phosphate
  modified_base 7: mod_base = OTHER; note = 2'-fluoroadenosine-3'-phosphate
  modified_base 8: mod_base = OTHER; note = 2'-O-methyluridine-3'-phosphate
  modified_base 9: mod_base = OTHER; note = 2'-fluoroguanosine-3'-phosphate
  modified_base 10: mod_base = OTHER; note = 2'-fluoroguanosine-3'-phosphate
  modified_base 11: mod_base = OTHER; note = 2'-fluorocytidine-3'-phosphate
  modified_base 12: mod_base = OTHER; note = 2'-O-methyluridine-3'-phosphate
  modified_base 13: mod_base = OTHER; note = 2'-O-methylcytidine-3'-phosphate
  modified_base 14: mod_base = OTHER; note = 2'-O-methyluridine-3'-phosphate
  modified_base 15: mod_base = OTHER; note = 2'-O-methyladenosine-3'-phosphate
  modified_base 16: mod_base = OTHER; note = 2'-O-methyluridine-3'-phosphate
  modified_base 17: mod_base = OTHER; note = 2'-O-methyladenosine-3'-phosphate
  modified_base 18: mod_base = OTHER; note = 2'-O-methylcytidine-3'-phosphate
  modified_base 19: mod_base = OTHER; note = 2'-O-methylguanosine-3'-phosphorothioate
  modified_base 20: mod_base = OTHER; note = 2'-O-methyluridine-3'-phosphorothioate
  modified_base 21: mod_base = OTHER; note = 2'-O-methyladenosine-3'-phosphate
gaattgatggctctatacgta

SEQ ID NO: 4807 - RNA, 21 nt, synthetic construct
  source 1..21: mol_type = other RNA
  modified_base 1: mod_base = OTHER; note = 2'-O-methyluridine-3'-phosphorothioate
  modified_base 2: mod_base = OTHER; note = 2'-O-methyluridine-3'-phosphorothioate
  modified_base 3: mod_base = OTHER; note = 2'-O-methylcytidine-3'-phosphate
  modified_base 4: mod_base = OTHER; note = 2'-O-methyladenosine-3'-phosphate
  modified_base 5: mod_base = OTHER; note = 2'-O-methylguanosine-3'-phosphate
  modified_base 6: mod_base = OTHER; note = 2'-O-methylguanosine-3'-phosphate
  modified_base 7: mod_base = OTHER; note = 2'-fluorouridine-3'-phosphate
  modified_base 8: mod_base = OTHER; note = 2'-O-methyladenosine-3'-phosphate
  modified_base 9: mod_base = OTHER; note = 2'-fluoroadenosine-3'-phosphate
  modified_base 10: mod_base = OTHER; note = 2'-fluorouridine-3'-phosphate
  modified_base 11: mod_base = OTHER; note = 2'-fluorouridine-3'-phosphate
  modified_base 12: mod_base = OTHER; note = 2'-O-methylguanosine-3'-phosphate
  modified_base 13: mod_base = OTHER; note = 2'-O-methyladenosine-3'-phosphate
  modified_base 14: mod_base = OTHER; note = 2'-O-methyladenosine-3'-phosphate
  modified_base 15: mod_base = OTHER; note = 2'-O-methylguanosine-3'-phosphate
  modified_base 16: mod_base = OTHER; note = 2'-O-methyladenosine-3'-phosphate
  modified_base 17: mod_base = OTHER; note = 2'-O-methylguanosine-3'-phosphate
  modified_base 18: mod_base = OTHER; note = 2'-O-methylguanosine-3'-phosphate
  modified_base 19: mod_base = OTHER; note = 2'-O-methylcytidine-3'-phosphorothioate
  modified_base 20: mod_base = OTHER; note = 2'-O-methyladenosine-3'-phosphorothioate
  modified_base 21: mod_base = OTHER; note = 2'-O-methyladenosine-3'-phosphate
ttcaggtaattgaagaggcaa

SEQ ID NO: 4808 - RNA, 21 nt, synthetic construct
  source 1..21: mol_type = other RNA
  modified_base 1: mod_base = OTHER; note = 2'-O-methyladenosine-3'-phosphorothioate
  modified_base 2: mod_base = OTHER; note = 2'-O-methyladenosine-3'-phosphorothioate
  modified_base 3: mod_base = OTHER; note = 2'-O-methylguanosine-3'-phosphate
  modified_base 4: mod_base = OTHER; note = 2'-O-methylguanosine-3'-phosphate
  modified_base 5: mod_base = OTHER; note = 2'-O-methyladenosine-3'-phosphate
  modified_base 6: mod_base = OTHER; note = 2'-O-methylcytidine-3'-phosphate
  modified_base 7: mod_base = OTHER; note = 2'-fluorouridine-3'-phosphate
  modified_base 8: mod_base = OTHER; note = 2'-O-methylguanosine-3'-phosphate
  modified_base 9: mod_base = OTHER; note = 2'-fluoroadenosine-3'-phosphate
  modified_base 10: mod_base = OTHER; note = 2'-fluoroguanosine-3'-phosphate
  modified_base 11: mod_base = OTHER; note = 2'-fluorouridine-3'-phosphate
  modified_base 12: mod_base = OTHER; note = 2'-O-methylguanosine-3'-phosphate
  modified_base 13: mod_base = OTHER; note = 2'-O-methyladenosine-3'-phosphate
  modified_base 14: mod_base = OTHER; note = 2'-O-methylcytidine-3'-phosphate
  modified_base 15: mod_base = OTHER; note = 2'-O-methylcytidine-3'-phosphate
  modified_base 16: mod_base = OTHER; note = 2'-O-methyluridine-3'-phosphate
  modified_base 17: mod_base = OTHER; note = 2'-O-methyluridine-3'-phosphate
  modified_base 18: mod_base = OTHER; note = 2'-O-methyluridine-3'-phosphate
  modified_base 19: mod_base = OTHER; note = 2'-O-methylguanosine-3'-phosphorothioate
  modified_base 20: mod_base = OTHER; note = 2'-O-methyluridine-3'-phosphorothioate
  modified_base 21: mod_base = OTHER; note = 2'-O-methyladenosine-3'-phosphate
aaggactgagtgacctttgta

SEQ ID NO: 4809 - RNA, 21 nt, synthetic construct
  source 1..21: mol_type = other RNA
  modified_base 1: mod_base = OTHER; note = 2'-O-methylcytidine-3'-phosphorothioate
  modified_base 2: mod_base = OTHER; note = 2'-O-methylguanosine-3'-phosphorothioate
  modified_base 3: mod_base = OTHER; note = 2'-O-methyladenosine-3'-phosphate
  modified_base 4: mod_base = OTHER; note = 2'-O-methylguanosine-3'-phosphate
  modified_base 5: mod_base = OTHER; note = 2'-O-methyladenosine-3'-phosphate
  modified_base 6: mod_base = OTHER; note = 2'-O-methylguanosine-3'-phosphate
  modified_base 7: mod_base = OTHER; note = 2'-fluorouridine-3'-phosphate
  modified_base 8: mod_base = OTHER; note = 2'-O-methylcytidine-3'-phosphate
  modified_base 9: mod_base = OTHER; note = 2'-fluorouridine-3'-phosphate
  modified_base 10: mod_base = OTHER; note = 2'-fluoroguanosine-3'-phosphate
  modified_base 11: mod_base = OTHER; note = 2'-fluoroadenosine-3'-phosphate
  modified_base 12: mod_base = OTHER; note = 2'-O-methylguanosine-3'-phosphate
  modified_base 13: mod_base = OTHER; note = 2'-O-methylguanosine-3'-phosphate
  modified_base 14: mod_base = OTHER; note = 2'-O-methyladenosine-3'-phosphate
  modified_base 15: mod_base = OTHER; note = 2'-O-methyladenosine-3'-phosphate
  modified_base 16: mod_base = OTHER; note = 2'-O-methylcytidine-3'-phosphate
  modified_base 17: mod_base = OTHER; note = 2'-O-methylguanosine-3'-phosphate
  modified_base 18: mod_base = OTHER; note = 2'-O-methylguanosine-3'-phosphate
  modified_base 19: mod_base = OTHER; note = 2'-O-methylcytidine-3'-phosphorothioate
  modified_base 20: mod_base = OTHER; note = 2'-O-methyluridine-3'-phosphorothioate
  modified_base 21: mod_base = OTHER; note = 2'-O-methyladenosine-3'-phosphate
cgagagtctgaggaacggcta

SEQ ID NO: 4810 - RNA, 21 nt, synthetic construct
  source 1..21: mol_type = other RNA
  modified_base 1: mod_base = OTHER; note = 2'-O-methyladenosine-3'-phosphorothioate
  modified_base 2: mod_base = OTHER; note = 2'-O-methyluridine-3'-phosphorothioate
  modified_base 3: mod_base = OTHER; note = 2'-O-methyluridine-3'-phosphate
  modified_base 4: mod_base = OTHER; note = 2'-O-methylcytidine-3'-phosphate
  modified_base 5: mod_base = OTHER; note = 2'-O-methyluridine-3'-phosphate
  modified_base 6: mod_base = OTHER; note = 2'-O-methyluridine-3'-phosphate
  modified_base 7: mod_base = OTHER; note = 2'-fluorouridine-3'-phosphate
  modified_base 8: mod_base = OTHER; note = 2'-O-methylguanosine-3'-phosphate
  modified_base 9: mod_base = OTHER; note = 2'-fluoroguanosine-3'-phosphate
  modified_base 10: mod_base = OTHER; note = 2'-fluoroguanosine-3'-phosphate
  modified_base 11: mod_base = OTHER; note = 2'-fluoroadenosine-3'-phosphate
  modified_base 12: mod_base = OTHER; note = 2'-O-methyluridine-3'-phosphate
  modified_base 13: mod_base = OTHER; note = 2'-O-methyluridine-3'-phosphate
  modified_base 14: mod_base = OTHER; note = 2'-O-methylguanosine-3'-phosphate
  modified_base 15: mod_base = OTHER; note = 2'-O-methylguanosine-3'-phosphate
  modified_base 16: mod_base = OTHER; note = 2'-O-methylguanosine-3'-phosphate
  modified_base 17: mod_base = OTHER; note = 2'-O-methyladenosine-3'-phosphate
  modified_base 18: mod_base = OTHER; note = 2'-O-methylcytidine-3'-phosphate
  modified_base 19: mod_base = OTHER; note = 2'-O-methyluridine-3'-phosphorothioate
  modified_base 20: mod_base = OTHER; note = 2'-O-methyluridine-3'-phosphorothioate
  modified_base 21: mod_base = OTHER; note = 2'-O-methyladenosine-3'-phosphate
attctttgggattgggactta

SEQ ID NO: 4811 - RNA, 21 nt, synthetic construct
  source 1..21: mol_type = other RNA
  modified_base 1: mod_base = OTHER; note = 2'-O-methyluridine-3'-phosphorothioate
  modified_base 2: mod_base = OTHER; note = 2'-O-methyladenosine-3'-phosphorothioate
  modified_base 3: mod_base = OTHER; note = 2'-O-methylcytidine-3'-phosphate
  modified_base 4: mod_base = OTHER; note = 2'-O-methylcytidine-3'-phosphate
  modified_base 5: mod_base = OTHER; note = 2'-O-methyladenosine-3'-phosphate
  modified_base 6: mod_base = OTHER; note = 2'-O-methylguanosine-3'-phosphate
  modified_base 7: mod_base = OTHER; note = 2'-fluoroguanosine-3'-phosphate
  modified_base 8: mod_base = OTHER; note = 2'-O-methyluridine-3'-phosphate
  modified_base 9: mod_base = OTHER; note = 2'-fluorocytidine-3'-phosphate
  modified_base 10: mod_base = OTHER; note = 2'-fluoroadenosine-3'-phosphate
  modified_base 11: mod_base = OTHER; note = 2'-fluoroguanosine-3'-phosphate
  modified_base 12: mod_base = OTHER; note = 2'-O-methyluridine-3'-phosphate
  modified_base 13: mod_base = OTHER; note = 2'-O-methylguanosine-3'-phosphate
  modified_base 14: mod_base = OTHER; note = 2'-O-methylguanosine-3'-phosphate
  modified_base 15: mod_base = OTHER; note = 2'-O-methyluridine-3'-phosphate
  modified_base 16: mod_base = OTHER; note = 2'-O-methyluridine-3'-phosphate
  modified_base 17: mod_base = OTHER; note = 2'-O-methyladenosine-3'-phosphate
  modified_base 18: mod_base = OTHER; note = 2'-O-methylguanosine-3'-phosphate
  modified_base 19: mod_base = OTHER; note = 2'-O-methyladenosine-3'-phosphorothioate
  modified_base 20: mod_base = OTHER; note = 2'-O-methyladenosine-3'-phosphorothioate
  modified_base 21: mod_base = OTHER; note = 2'-O-methyladenosine-3'-phosphate
taccaggtcagtggttagaaa

SEQ ID NO: 4812 - RNA, 21 nt, synthetic construct
  source 1..21: mol_type = other RNA
  modified_base 1: mod_base = OTHER; note = 2'-O-methyladenosine-3'-phosphorothioate
  modified_base 2: mod_base = OTHER; note = 2'-O-methyluridine-3'-phosphorothioate
  modified_base 3: mod_base = OTHER; note = 2'-O-methyluridine-3'-phosphate
  modified_base 4: mod_base = OTHER; note = 2'-O-methylcytidine-3'-phosphate
  modified_base 5: mod_base = OTHER; note = 2'-O-methyladenosine-3'-phosphate
  modified_base 6: mod_base = OTHER; note = 2'-O-methylguanosine-3'-phosphate
  modified_base 7: mod_base = OTHER; note = 2'-fluoroguanosine-3'-phosphate
  modified_base 8: mod_base = OTHER; note = 2'-O-methyluridine-3'-phosphate
  modified_base 9: mod_base = OTHER; note = 2'-fluorouridine-3'-phosphate
  modified_base 10: mod_base = OTHER; note = 2'-fluorouridine-3'-phosphate
  modified_base 11: mod_base = OTHER; note = 2'-fluoroguanosine-3'-phosphate
  modified_base 12: mod_base = OTHER; note = 2'-O-methylcytidine-3'-phosphate
  modified_base 13: mod_base = OTHER; note = 2'-O-methylcytidine-3'-phosphate
  modified_base 14: mod_base = OTHER; note = 2'-O-methyladenosine-3'-phosphate
  modified_base 15: mod_base = OTHER; note = 2'-O-methyluridine-3'-phosphate
  modified_base 16: mod_base = OTHER; note = 2'-O-methylguanosine-3'-phosphate
  modified_base 17: mod_base = OTHER; note = 2'-O-methylguanosine-3'-phosphate
  modified_base 18: mod_base = OTHER; note = 2'-O-methyladenosine-3'-phosphate
  modified_base 19: mod_base = OTHER; note = 2'-O-methylcytidine-3'-phosphorothioate
  modified_base 20: mod_base = OTHER; note = 2'-O-methyladenosine-3'-phosphorothioate
  modified_base 21: mod_base = OTHER; note = 2'-O-methyladenosine-3'-phosphate
attcaggtttgccatggacaa

SEQ ID NO: 4813 - RNA, 21 nt, synthetic construct
  source 1..21: mol_type = other RNA
  modified_base 1: mod_base = OTHER; note = 2'-O-methylguanosine-3'-phosphorothioate
  modified_base 2: mod_base = OTHER; note = 2'-O-methylcytidine-3'-phosphorothioate
  modified_base 3: mod_base = OTHER; note = 2'-O-methyladenosine-3'-phosphate
  modified_base 4: mod_base = OTHER; note = 2'-O-methylguanosine-3'-phosphate
  modified_base 5: mod_base = OTHER; note = 2'-O-methylcytidine-3'-phosphate
  modified_base 6: mod_base = OTHER; note = 2'-O-methyluridine-3'-phosphate
  modified_base 7: mod_base = OTHER; note = 2'-fluoroadenosine-3'-phosphate
  modified_base 8: mod_base = OTHER; note = 2'-O-methyladenosine-3'-phosphate
  modified_base 9: mod_base = OTHER; note = 2'-fluoroadenosine-3'-phosphate
  modified_base 10: mod_base = OTHER; note = 2'-fluorocytidine-3'-phosphate
  modified_base 11: mod_base = OTHER; note = 2'-fluorouridine-3'-phosphate
  modified_base 12: mod_base = OTHER; note = 2'-O-methylguanosine-3'-phosphate
  modified_base 13: mod_base = OTHER; note = 2'-O-methylguanosine-3'-phosphate
  modified_base 14: mod_base = OTHER; note = 2'-O-methyluridine-3'-phosphate
  modified_base 15: mod_base = OTHER; note = 2'-O-methylcytidine-3'-phosphate
  modified_base 16: mod_base = OTHER; note = 2'-O-methylcytidine-3'-phosphate
  modified_base 17: mod_base = OTHER; note = 2'-O-methyluridine-3'-phosphate
  modified_base 18: mod_base = OTHER; note = 2'-O-methylguanosine-3'-phosphate
  modified_base 19: mod_base = OTHER; note = 2'-O-methylguanosine-3'-phosphorothioate
  modified_base 20: mod_base = OTHER; note = 2'-O-methyladenosine-3'-phosphorothioate
  modified_base 21: mod_base = OTHER; note = 2'-O-methyladenosine-3'-phosphate
gcagctaaactggtcctggaa

SEQ ID NO: 4814 - RNA, 21 nt, synthetic construct
  source 1..21: mol_type = other RNA
  modified_base 1: mod_base = OTHER; note = 2'-O-methyladenosine-3'-phosphorothioate
  modified_base 2: mod_base = OTHER; note = 2'-O-methylguanosine-3'-phosphorothioate
  modified_base 3: mod_base = OTHER; note = 2'-O-methyluridine-3'-phosphate
  modified_base 4: mod_base = OTHER; note = 2'-O-methyladenosine-3'-phosphate
  modified_base 5: mod_base = OTHER; note = 2'-O-methyladenosine-3'-phosphate
  modified_base 6: mod_base = OTHER; note = 2'-O-methyluridine-3'-phosphate
  modified_base 7: mod_base = OTHER; note = 2'-fluoroguanosine-3'-phosphate
  modified_base 8: mod_base = OTHER; note = 2'-O-methylguanosine-3'-phosphate
  modified_base 9: mod_base = OTHER; note = 2'-fluorocytidine-3'-phosphate
  modified_base 10: mod_base = OTHER; note = 2'-fluoroadenosine-3'-phosphate
  modified_base 11: mod_base = OTHER; note = 2'-fluorouridine-3'-phosphate
  modified_base 12: mod_base = OTHER; note = 2'-O-methyladenosine-3'-phosphate
  modified_base 13: mod_base = OTHER; note = 2'-O-methylguanosine-3'-phosphate
  modified_base 14: mod_base = OTHER; note = 2'-O-methyladenosine-3'-phosphate
  modified_base 15: mod_base = OTHER; note = 2'-O-methyladenosine-3'-phosphate
  modified_base 16: mod_base = OTHER; note = 2'-O-methyluridine-3'-phosphate
  modified_base 17: mod_base = OTHER; note = 2'-O-methylguanosine-3'-phosphate
  modified_base 18: mod_base = OTHER; note = 2'-O-methylguanosine-3'-phosphate
  modified_base 19: mod_base = OTHER; note = 2'-O-methyladenosine-3'-phosphorothioate
  modified_base 20: mod_base = OTHER; note = 2'-O-methylguanosine-3'-phosphorothioate
  modified_base 21: mod_base = OTHER; note = 2'-O-methyladenosine-3'-phosphate
agtaatggcatagaatggaga

SEQ ID NO: 4815 - RNA, 21 nt, synthetic construct
  source 1..21: mol_type = other RNA
  modified_base 1: mod_base = OTHER; note = 2'-O-methyladenosine-3'-phosphorothioate
  modified_base 2: mod_base = OTHER; note = 2'-O-methyladenosine-3'-phosphorothioate
  modified_base 3: mod_base = OTHER; note = 2'-O-methyluridine-3'-phosphate
  modified_base 4: mod_base = OTHER; note = 2'-O-methyluridine-3'-phosphate
  modified_base 5: mod_base = OTHER; note = 2'-O-methylguanosine-3'-phosphate
  modified_base 6: mod_base = OTHER; note = 2'-O-methylcytidine-3'-phosphate
  modified_base 7: mod_base = OTHER; note = 2'-fluoroadenosine-3'-phosphate
  modified_base 8: mod_base = OTHER; note = 2'-O-methyladenosine-3'-phosphate
  modified_base 9: mod_base = OTHER; note = 2'-fluoroguanosine-3'-phosphate
  modified_base 10: mod_base = OTHER; note = 2'-fluoroadenosine-3'-phosphate
  modified_base 11: mod_base = OTHER; note = 2'-fluoroadenosine-3'-phosphate
  modified_base 12: mod_base = OTHER; note = 2'-O-methyladenosine-3'-phosphate
  modified_base 13: mod_base = OTHER; note = 2'-O-methyladenosine-3'-phosphate
  modified_base 14: mod_base = OTHER; note = 2'-O-methyluridine-3'-phosphate
  modified_base 15: mod_base = OTHER; note = 2'-O-methylguanosine-3'-phosphate
  modified_base 16: mod_base = OTHER; note = 2'-O-methylguanosine-3'-phosphate
  modified_base 17: mod_base = OTHER; note = 2'-O-methyladenosine-3'-phosphate
  modified_base 18: mod_base = OTHER; note = 2'-O-methylcytidine-3'-phosphate
  modified_base 19: mod_base = OTHER; note = 2'-O-methylcytidine-3'-phosphorothioate
  modified_base 20: mod_base = OTHER; note = 2'-O-methyladenosine-3'-phosphorothioate
  modified_base 21: mod_base = OTHER; note = 2'-O-methyladenosine-3'-phosphate
aattgcaagaaaatggaccaa

SEQ ID NO: 4816 - RNA, 21 nt, synthetic construct
  source 1..21: mol_type = other RNA
  modified_base 1: mod_base = OTHER; note = 2'-O-methylcytidine-3'-phosphorothioate
  modified_base 2: mod_base = OTHER; note = 2'-O-methylguanosine-3'-phosphorothioate
  modified_base 3: mod_base = OTHER; note = 2'-O-methylguanosine-3'-phosphate
  modified_base 4: mod_base = OTHER; note = 2'-O-methylcytidine-3'-phosphate
  modified_base 5: mod_base = OTHER; note = 2'-O-methyladenosine-3'-phosphate
  modified_base 6: mod_base = OTHER; note = 2'-O-methylcytidine-3'-phosphate
  modified_base 7: mod_base = OTHER; note = 2'-fluorouridine-3'-phosphate
  modified_base 8: mod_base = OTHER; note = 2'-O-methylguanosine-3'-phosphate
  modified_base 9: mod_base = OTHER; note = 2'-fluorocytidine-3'-phosphate
  modified_base 10: mod_base = OTHER; note = 2'-fluoroguanosine-3'-phosphate
  modified_base 11: mod_base = OTHER; note = 2'-fluorouridine-3'-phosphate
  modified_base 12: mod_base = OTHER; note = 2'-O-methyluridine-3'-phosphate
  modified_base 13: mod_base = OTHER; note = 2'-O-methylcytidine-3'-phosphate
  modified_base 14: mod_base = OTHER; note = 2'-O-methyluridine-3'-phosphate
  modified_base 15: mod_base = OTHER; note = 2'-O-methylguanosine-3'-phosphate
  modified_base 16: mod_base = OTHER; note = 2'-O-methylguanosine-3'-phosphate
  modified_base 17: mod_base = OTHER; note = 2'-O-methyluridine-3'-phosphate
  modified_base 18: mod_base = OTHER; note = 2'-O-methylguanosine-3'-phosphate
  modified_base 19: mod_base = OTHER; note = 2'-O-methylcytidine-3'-phosphorothioate
  modified_base 20: mod_base = OTHER; note = 2'-O-methyluridine-3'-phosphorothioate
  modified_base 21: mod_base = OTHER; note = 2'-O-methyladenosine-3'-phosphate
cggcactgcgttctggtgcta

SEQ ID NO: 4817 - RNA, 21 nt, synthetic construct
  source 1..21: mol_type = other RNA
  modified_base 1: mod_base = OTHER; note = 2'-O-methyladenosine-3'-phosphorothioate
  modified_base 2: mod_base = OTHER; note = 2'-O-methylguanosine-3'-phosphorothioate
  modified_base 3: mod_base = OTHER; note = 2'-O-methyluridine-3'-phosphate
  modified_base 4: mod_base = OTHER; note = 2'-O-methylcytidine-3'-phosphate
  modified_base 5: mod_base = OTHER; note = 2'-O-methyladenosine-3'-phosphate
  modified_base 6: mod_base = OTHER; note = 2'-O-methyluridine-3'-phosphate
  modified_base 7: mod_base = OTHER; note = 2'-fluoroadenosine-3'-phosphate
  modified_base 8: mod_base = OTHER; note = 2'-O-methyluridine-3'-phosphate
  modified_base 9: mod_base = OTHER; note = 2'-fluorouridine-3'-phosphate
  modified_base 10: mod_base = OTHER; note = 2'-fluoroguanosine-3'-phosphate
  modified_base 11: mod_base = OTHER; note = 2'-fluoroadenosine-3'-phosphate
  modified_base 12: mod_base = OTHER; note = 2'-O-methyladenosine-3'-phosphate
  modified_base 13: mod_base = OTHER; note = 2'-O-methylguanosine-3'-phosphate
  modified_base 14: mod_base = OTHER; note = 2'-O-methyladenosine-3'-phosphate
  modified_base 15: mod_base = OTHER; note = 2'-O-methyladenosine-3'-phosphate
  modified_base 16: mod_base = OTHER; note = 2'-O-methylguanosine-3'-phosphate
  modified_base 17: mod_base = OTHER; note = 2'-O-methylcytidine-3'-phosphate
  modified_base 18: mod_base = OTHER; note = 2'-O-methylcytidine-3'-phosphate
  modified_base 19: mod_base = OTHER; note = 2'-O-methylcytidine-3'-phosphorothioate
  modified_base 20: mod_base = OTHER; note = 2'-O-methyladenosine-3'-phosphorothioate
  modified_base 21: mod_base = OTHER; note = 2'-O-methyladenosine-3'-phosphate
agtcatattgaagaagcccaa

SEQ ID NO: 4818 - RNA, 21 nt, synthetic construct
  source 1..21: mol_type = other RNA
  modified_base 1: mod_base = OTHER; note = 2'-O-methyluridine-3'-phosphorothioate
  modified_base 2: mod_base = OTHER; note = 2'-O-methylcytidine-3'-phosphorothioate
  modified_base 3: mod_base = OTHER; note = 2'-O-methyladenosine-3'-phosphate
  modified_base 4: mod_base = OTHER; note = 2'-O-methyluridine-3'-phosphate
  modified_base 5: mod_base = OTHER; note = 2'-O-methylcytidine-3'-phosphate
  modified_base 6: mod_base = OTHER; note = 2'-O-methyladenosine-3'-phosphate
  modified_base 7: mod_base = OTHER; note = 2'-fluorouridine-3'-phosphate
  modified_base 8: mod_base = OTHER; note = 2'-O-methylguanosine-3'-phosphate
  modified_base 9: mod_base = OTHER; note = 2'-fluorocytidine-3'-phosphate
  modified_base 10: mod_base = OTHER; note = 2'-fluorouridine-3'-phosphate
  modified_base 11: mod_base = OTHER; note = 2'-fluoroguanosine-3'-phosphate
  modified_base 12: mod_base = OTHER; note = 2'-O-methylcytidine-3'-phosphate
  modified_base 13: mod_base = OTHER; note = 2'-O-methylguanosine-3'-phosphate
  modified_base 14: mod_base = OTHER; note = 2'-O-methyluridine-3'-phosphate
  modified_base 15: mod_base = OTHER; note = 2'-O-methylcytidine-3'-phosphate
  modified_base 16: mod_base = OTHER; note = 2'-O-methyladenosine-3'-phosphate
  modified_base 17: mod_base = OTHER; note = 2'-O-methylguanosine-3'-phosphate
  modified_base 18: mod_base = OTHER; note = 2'-O-methylcytidine-3'-phosphate
  modified_base 19: mod_base = OTHER; note = 2'-O-methyluridine-3'-phosphorothioate
  modified_base 20: mod_base = OTHER; note = 2'-O-methyluridine-3'-phosphorothioate
  modified_base 21: mod_base = OTHER; note = 2'-O-methyladenosine-3'-phosphate
tcatcatgctgcgtcagctta

SEQ ID NO: 4819 - RNA, 21 nt, synthetic construct
  source 1..21: mol_type = other RNA
  modified_base 1: mod_base = OTHER; note = 2'-O-methyladenosine-3'-phosphorothioate
  modified_base 2: mod_base = OTHER; note = 2'-O-methyladenosine-3'-phosphorothioate
  modified_base 3: mod_base = OTHER; note = 2'-O-methyladenosine-3'-phosphate
  modified_base 4: mod_base = OTHER; note = 2'-O-methyluridine-3'-phosphate
  modified_base 5: mod_base = OTHER; note = 2'-O-methylguanosine-3'-phosphate
  modified_base 6: mod_base = OTHER; note = 2'-O-methyladenosine-3'-phosphate
  modified_base 7: mod_base = OTHER; note = 2'-fluorouridine-3'-phosphate
  modified_base 8: mod_base = OTHER; note = 2'-O-methylcytidine-3'-phosphate
  modified_base 9: mod_base = OTHER; note = 2'-fluoroguanosine-3'-phosphate
  modified_base 10: mod_base = OTHER; note = 2'-fluorocytidine-3'-phosphate
  modified_base 11: mod_base = OTHER; note = 2'-fluorocytidine-3'-phosphate
  modified_base 12: mod_base = OTHER; note = 2'-O-methyluridine-3'-phosphate
  modified_base 13: mod_base = OTHER; note = 2'-O-methylcytidine-3'-phosphate
  modified_base 14: mod_base = OTHER; note = 2'-O-methyluridine-3'-phosphate
  modified_base 15: mod_base = OTHER; note = 2'-O-methyluridine-3'-phosphate
  modified_base 16: mod_base = OTHER; note = 2'-O-methylguanosine-3'-phosphate
  modified_base 17: mod_base = OTHER; note = 2'-O-methylguanosine-3'-phosphate
  modified_base 18: mod_base = OTHER; note = 2'-O-methyluridine-3'-phosphate
  modified_base 19: mod_base = OTHER; note = 2'-O-methyladenosine-3'-phosphorothioate
  modified_base 20: mod_base = OTHER; note = 2'-O-methyluridine-3'-phosphorothioate
  modified_base 21: mod_base = OTHER; note = 2'-O-methyladenosine-3'-phosphate
aaatgatcgcctcttggtata

SEQ ID NO: 4820 - RNA, 21 nt, synthetic construct
  source 1..21: mol_type = other RNA
  modified_base 1: mod_base = OTHER; note = 2'-O-methyladenosine-3'-phosphorothioate
  modified_base 2: mod_base = OTHER; note = 2'-O-methyluridine-3'-phosphorothioate
  modified_base 3: mod_base = OTHER; note = 2'-O-methyluridine-3'-phosphate
  modified_base 4: mod_base = OTHER; note = 2'-O-methyluridine-3'-phosphate
  modified_base 5: mod_base = OTHER; note = 2'-O-methylguanosine-3'-phosphate
  modified_base 6: mod_base = OTHER; note = 2'-O-methyladenosine-3'-phosphate
  modified_base 7: mod_base = OTHER; note = 2'-fluoroadenosine-3'-phosphate
  modified_base 8: mod_base = OTHER; note = 2'-O-methylguanosine-3'-phosphate
  modified_base 9: mod_base = OTHER; note = 2'-fluoroadenosine-3'-phosphate
  modified_base 10: mod_base = OTHER; note = 2'-fluorouridine-3'-phosphate
  modified_base 11: mod_base = OTHER; note = 2'-fluoroadenosine-3'-phosphate
  modified_base 12: mod_base = OTHER; note = 2'-O-methyluridine-3'-phosphate
  modified_base 13: mod_base = OTHER; note = 2'-O-methyladenosine-3'-phosphate
  modified_base 14: mod_base = OTHER; note = 2'-O-methyladenosine-3'-phosphate
  modified_base 15: mod_base = OTHER; note = 2'-O-methyladenosine-3'-phosphate
  modified_base 16: mod_base = OTHER; note = 2'-O-methylguanosine-3'-phosphate
  modified_base 17: mod_base = OTHER; note = 2'-O-methyladenosine-3'-phosphate
  modified_base 18: mod_base = OTHER; note = 2'-O-methylguanosine-3'-phosphate
  modified_base 19: mod_base = OTHER; note = 2'-O-methylcytidine-3'-phosphorothioate
  modified_base 20: mod_base = OTHER; note = 2'-O-methyladenosine-3'-phosphorothioate
  modified_base 21: mod_base = OTHER; note = 2'-O-methyladenosine-3'-phosphate
atttgaagatataaagagcaa

SEQ ID NO: 4821 - RNA, 21 nt, synthetic construct
  source 1..21: mol_type = other RNA
  modified_base 1: mod_base = OTHER; note = 2'-O-methylguanosine-3'-phosphorothioate
  modified_base 2: mod_base = OTHER; note = 2'-O-methylguanosine-3'-phosphorothioate
  modified_base 3: mod_base = OTHER; note = 2'-O-methyluridine-3'-phosphate
  modified_base 4: mod_base = OTHER; note = 2'-O-methylcytidine-3'-phosphate
  modified_base 5: mod_base = OTHER; note = 2'-O-methyluridine-3'-phosphate
  modified_base 6: mod_base = OTHER; note = 2'-O-methylcytidine-3'-phosphate
  modified_base 7: mod_base = OTHER; note = 2'-fluorocytidine-3'-phosphate
  modified_base 8: mod_base = OTHER; note = 2'-O-methyluridine-3'-phosphate
  modified_base 9: mod_base = OTHER; note = 2'-fluorouridine-3'-phosphate
  modified_base 10: mod_base = OTHER; note = 2'-fluorocytidine-3'-phosphate
  modified_base 11: mod_base = OTHER; note = 2'-fluoroadenosine-3'-phosphate
  modified_base 12: mod_base = OTHER; note = 2'-O-methylcytidine-3'-phosphate
  modified_base 13: mod_base = OTHER; note = 2'-O-methylcytidine-3'-phosphate
  modified_base 14: mod_base = OTHER; note = 2'-O-methyladenosine-3'-phosphate
  modified_base 15: mod_base = OTHER; note = 2'-O-methylguanosine-3'-phosphate
  modified_base 16: mod_base = OTHER; note = 2'-O-methylcytidine-3'-phosphate
  modified_base 17: mod_base = OTHER; note = 2'-O-methylcytidine-3'-phosphate
  modified_base 18: mod_base = OTHER; note = 2'-O-methyluridine-3'-phosphate
  modified_base 19: mod_base = OTHER; note = 2'-O-methylcytidine-3'-phosphorothioate
  modified_base 20: mod_base = OTHER; note = 2'-O-methylguanosine-3'-phosphorothioate
  modified_base 21: mod_base = OTHER; note = 2'-O-methyladenosine-3'-phosphate
ggtctccttcaccagcctcga

SEQ ID NO: 4822 - RNA, 21 nt, synthetic construct
  source 1..21: mol_type = other RNA
  modified_base 1: mod_base = OTHER; note = 2'-O-methylguanosine-3'-phosphorothioate
  modified_base 2: mod_base = OTHER; note = 2'-O-methyladenosine-3'-phosphorothioate
  modified_base 3: mod_base = OTHER; note = 2'-O-methyladenosine-3'-phosphate
  modified_base 4: mod_base = OTHER; note = 2'-O-methyladenosine-3'-phosphate
  modified_base 5: mod_base = OTHER; note = 2'-O-methylcytidine-3'-phosphate
  modified_base 6: mod_base = OTHER; note = 2'-O-methyladenosine-3'-phosphate
  modified_base 7: mod_base = OTHER; note = 2'-fluoroguanosine-3'-phosphate
  modified_base 8: mod_base = OTHER; note = 2'-O-methyladenosine-3'-phosphate
  modified_base 9: mod_base = OTHER; note = 2'-fluoroguanosine-3'-phosphate
  modified_base 10: mod_base = OTHER; note = 2'-fluoroadenosine-3'-phosphate
  modified_base 11: mod_base = OTHER; note = 2'-fluoroadenosine-3'-phosphate
  modified_base 12: mod_base = OTHER; note = 2'-O-methylguanosine-3'-phosphate
  modified_base 13: mod_base = OTHER; note = 2'-O-methyladenosine-3'-phosphate
  modified_base 14: mod_base = OTHER; note = 2'-O-methyladenosine-3'-phosphate
  modified_base 15: mod_base = OTHER; note = 2'-O-methyladenosine-3'-phosphate
  modified_base 16: mod_base = OTHER; note = 2'-O-methylguanosine-3'-phosphate
  modified_base 17: mod_base = OTHER; note = 2'-O-methyladenosine-3'-phosphate
  modified_base 18: mod_base = OTHER; note = 2'-O-methylcytidine-3'-phosphate
  modified_base 19: mod_base = OTHER; note = 2'-O-methyladenosine-3'-phosphorothioate
  modified_base 20: mod_base = OTHER; note = 2'-O-methylguanosine-3'-phosphorothioate
  modified_base 21: mod_base = OTHER; note = 2'-O-methyladenosine-3'-phosphate
gaaacagagaagaaagacaga

SEQ ID NO: 4823 - RNA, 21 nt, synthetic construct
  source 1..21: mol_type = other RNA
  modified_base 1: mod_base = OTHER; note = 2'-O-methyluridine-3'-phosphorothioate
  modified_base 2: mod_base = OTHER; note = 2'-O-methyluridine-3'-phosphorothioate
  modified_base 3: mod_base = OTHER; note = 2'-O-methylcytidine-3'-phosphate
  modified_base 4: mod_base = OTHER; note = 2'-O-methyluridine-3'-phosphate
  modified_base 5: mod_base = OTHER; note = 2'-O-methyladenosine-3'-phosphate
  modified_base 6: mod_base = OTHER; note = 2'-O-methylguanosine-3'-phosphate
  modified_base 7: mod_base = OTHER; note = 2'-fluorouridine-3'-phosphate
  modified_base 8: mod_base = OTHER; note = 2'-O-methylguanosine-3'-phosphate
  modified_base 9: mod_base = OTHER; note = 2'-fluoroguanosine-3'-phosphate
  modified_base 10: mod_base = OTHER; note = 2'-fluorocytidine-3'-phosphate
  modified_base 11: mod_base = OTHER; note = 2'-fluorouridine-3'-phosphate
  modified_base 12: mod_base = OTHER; note = 2'-O-methyladenosine-3'-phosphate
  modified_base 13: mod_base = OTHER; note = 2'-O-methylcytidine-3'-phosphate
  modified_base 14: mod_base = OTHER; note = 2'-O-methyladenosine-3'-phosphate
  modified_base 15: mod_base = OTHER; note = 2'-O-methyladenosine-3'-phosphate
  modified_base 16: mod_base = OTHER; note = 2'-O-methyladenosine-3'-phosphate
  modified_base 17: mod_base = OTHER; note = 2'-O-methyluridine-3'-phosphate
  modified_base 18: mod_base = OTHER; note = 2'-O-methylguanosine-3'-phosphate
  modified_base 19: mod_base = OTHER; note = 2'-O-methylcytidine-3'-phosphorothioate
  modified_base 20: mod_base = OTHER; note = 2'-O-methylcytidine-3'-phosphorothioate
  modified_base 21: mod_base = OTHER; note = 2'-O-methyladenosine-3'-phosphate
ttctagtggctacaaatgcca

SEQ ID NO: 4824 - RNA, 21 nt, synthetic construct
  source 1..21: mol_type = other RNA
  modified_base 1: mod_base = OTHER; note = 2'-O-methylguanosine-3'-phosphorothioate
  modified_base 2: mod_base = OTHER; note = 2'-O-methylguanosine-3'-phosphorothioate
  modified_base 3: mod_base = OTHER; note = 2'-O-methyladenosine-3'-phosphate
  modified_base 4: mod_base = OTHER; note = 2'-O-methylguanosine-3'-phosphate
  modified_base 5: mod_base = OTHER; note = 2'-O-methyladenosine-3'-phosphate
  modified_base 6: mod_base = OTHER; note = 2'-O-methylguanosine-3'-phosphate
  modified_base 7: mod_base = OTHER; note = 2'-fluoroadenosine-3'-phosphate
  modified_base 8: mod_base = OTHER; note = 2'-O-methyladenosine-3'-phosphate
  modified_base 9: mod_base = OTHER; note = 2'-fluoroadenosine-3'-phosphate
  modified_base 10: mod_base = OTHER; note = 2'-fluorouridine-3'-phosphate
  modified_base 11: mod_base = OTHER; note = 2'-fluorocytidine-3'-phosphate
  modified_base 12: mod_base = OTHER; note = 2'-O-methyladenosine-3'-phosphate
  modified_base 13: mod_base = OTHER; note = 2'-O-methylguanosine-3'-phosphate
  modified_base 14: mod_base = OTHER; note = 2'-O-methylguanosine-3'-phosphate
  modified_base 15: mod_base = OTHER; note = 2'-O-methyladenosine-3'-phosphate
  modified_base 16: mod_base = OTHER; note = 2'-O-methyladenosine-3'-phosphate
  modified_base 17: mod_base = OTHER; note = 2'-O-methylguanosine-3'-phosphate
  modified_base 18: mod_base = OTHER; note = 2'-O-methylguanosine-3'-phosphate
  modified_base 19: mod_base = OTHER; note = 2'-O-methyladenosine-3'-phosphorothioate
  modified_base 20: mod_base = OTHER; note = 2'-O-methyluridine-3'-phosphorothioate
  modified_base 21: mod_base = OTHER; note = 2'-O-methyladenosine-3'-phosphate
ggagagaaatcaggaaggata

SEQ ID NO: 4825 - RNA, 21 nt, synthetic construct
  source 1..21: mol_type = other RNA
  modified_base 1: mod_base = OTHER; note = 2'-O-methyladenosine-3'-phosphorothioate
  modified_base 2: mod_base = OTHER; note = 2'-O-methyluridine-3'-phosphorothioate
  modified_base 3: mod_base = OTHER; note = 2'-O-methyladenosine-3'-phosphate
  modified_base 4: mod_base = OTHER; note = 2'-O-methyluridine-3'-phosphate
  modified_base 5: mod_base = OTHER; note = 2'-O-methyladenosine-3'-phosphate
  modified_base 6: mod_base = OTHER; note = 2'-O-methylguanosine-3'-phosphate
  modified_base 7: mod_base = OTHER; note = 2'-fluorouridine-3'-phosphate
  modified_base 8: mod_base = OTHER; note = 2'-O-methylguanosine-3'-phosphate
  modified_base 9: mod_base = OTHER; note = 2'-fluoroadenosine-3'-phosphate
  modified_base 10: mod_base = OTHER; note = 2'-fluoroguanosine-3'-phosphate
  modified_base 11: mod_base = OTHER; note = 2'-fluorocytidine-3'-phosphate
  modified_base 12: mod_base = OTHER; note = 2'-O-methylcytidine-3'-phosphate
  modified_base 13: mod_base = OTHER; note = 2'-O-methylcytidine-3'-phosphate
  modified_base 14: mod_base = OTHER; note = 2'-O-methyluridine-3'-phosphate
  modified_base 15: mod_base = OTHER; note = 2'-O-methyladenosine-3'-phosphate
  modified_base 16: mod_base = OTHER; note = 2'-O-methyladenosine-3'-phosphate
  modified_base 17: mod_base = OTHER; note = 2'-O-methyladenosine-3'-phosphate
  modified_base 18: mod_base = OTHER; note = 2'-O-methylguanosine-3'-phosphate
  modified_base 19: mod_base = OTHER; note = 2'-O-methylguanosine-3'-phosphorothioate
  modified_base 20: mod_base = OTHER; note = 2'-O-methyladenosine-3'-phosphorothioate
  modified_base 21: mod_base = OTHER; note = 2'-O-methyladenosine-3'-phosphate
atatagtgagccctaaaggaa

SEQ ID NO: 4826 - RNA, 21 nt, synthetic construct
  source 1..21: mol_type = other RNA
  modified_base 1: mod_base = OTHER; note = 2'-O-methylguanosine-3'-phosphorothioate
  modified_base 2: mod_base = OTHER; note = 2'-O-methylcytidine-3'-phosphorothioate
  modified_base 3: mod_base = OTHER; note = 2'-O-methyluridine-3'-phosphate
  modified_base 4: mod_base = OTHER; note = 2'-O-methylguanosine-3'-phosphate
  modified_base 5: mod_base = OTHER; note = 2'-O-methylcytidine-3'-phosphate
  modified_base 6: mod_base = OTHER; note = 2'-O-methylcytidine-3'-phosphate
  modified_base 7: mod_base = OTHER; note = 2'-fluorouridine-3'-phosphate
  modified_base 8: mod_base = OTHER; note = 2'-O-methyluridine-3'-phosphate
  modified_base 9: mod_base = OTHER; note = 2'-fluorouridine-3'-phosphate
  modified_base 10: mod_base = OTHER; note = 2'-fluoroguanosine-3'-phosphate
  modified_base 11: mod_base = OTHER; note = 2'-fluorouridine-3'-phosphate
  modified_base 12: mod_base = OTHER; note = 2'-O-methylcytidine-3'-phosphate
  modified_base 13: mod_base = OTHER; note = 2'-O-methylcytidine-3'-phosphate
  modified_base 14: mod_base = OTHER; note = 2'-O-methyluridine-3'-phosphate
  modified_base 15: mod_base = OTHER; note = 2'-O-methylcytidine-3'-phosphate
  modified_base 16: mod_base = OTHER; note = 2'-O-methylguanosine-3'-phosphate
  modified_base 17: mod_base = OTHER; note = 2'-O-methylcytidine-3'-phosphate
  modified_base 18: mod_base = OTHER; note = 2'-O-methylcytidine-3'-phosphate
  modified_base 19: mod_base = OTHER; note = 2'-O-methylcytidine-3'-phosphorothioate
  modified_base 20: mod_base = OTHER; note = 2'-O-methyluridine-3'-phosphorothioate
  modified_base 21: mod_base = OTHER; note = 2'-O-methyladenosine-3'-phosphate
gctgcctttgtcctcgcccta

SEQ ID NO: 4827 - RNA, 21 nt, synthetic construct
  source 1..21: mol_type = other RNA
  modified_base 1: mod_base = OTHER; note = 2'-O-methylguanosine-3'-phosphorothioate
  modified_base 2: mod_base = OTHER; note = 2'-O-methylguanosine-3'-phosphorothioate
  modified_base 3: mod_base = OTHER; note = 2'-O-methylcytidine-3'-phosphate
  modified_base 4: mod_base = OTHER; note = 2'-O-methyladenosine-3'-phosphate
  modified_base 5: mod_base = OTHER; note = 2'-O-methyladenosine-3'-phosphate
  modified_base 6: mod_base = OTHER; note = 2'-O-methyladenosine-3'-phosphate
  modified_base 7: mod_base = OTHER; note = 2'-fluoroadenosine-3'-phosphate
  modified_base 8: mod_base = OTHER; note = 2'-O-methylguanosine-3'-phosphate
  modified_base 9: mod_base = OTHER; note = 2'-fluoroadenosine-3'-phosphate
  modified_base 10: mod_base = OTHER; note = 2'-fluorocytidine-3'-phosphate
  modified_base 11: mod_base = OTHER; note = 2'-fluorocytidine-3'-phosphate
  modified_base 12: mod_base = OTHER; note = 2'-O-methyluridine-3'-phosphate
  modified_base 13: mod_base = OTHER; note = 2'-O-methylcytidine-3'-phosphate
  modified_base 14: mod_base = OTHER; note = 2'-O-methyladenosine-3'-phosphate
  modified_base 15: mod_base = OTHER; note = 2'-O-methylcytidine-3'-phosphate
  modified_base 16: mod_base = OTHER; note = 2'-O-methylcytidine-3'-phosphate
  modified_base 17: mod_base = OTHER; note = 2'-O-methyladenosine-3'-phosphate
  modified_base 18: mod_base = OTHER; note = 2'-O-methyladenosine-3'-phosphate
  modified_base 19: mod_base = OTHER; note = 2'-O-methylguanosine-3'-phosphorothioate
  modified_base 20: mod_base = OTHER; note = 2'-O-methyladenosine-3'-phosphorothioate
  modified_base 21: mod_base = OTHER; note = 2'-O-methyladenosine-3'-phosphate
ggcaaaagacctcaccaagaa

SEQ ID NO: 4828 - RNA, 21 nt, synthetic construct
  source 1..21: mol_type = other RNA
  modified_base 1: mod_base = OTHER; note = 2'-O-methyluridine-3'-phosphorothioate
  modified_base 2: mod_base = OTHER; note = 2'-O-methyluridine-3'-phosphorothioate
  modified_base 3: mod_base = OTHER; note = 2'-O-methylcytidine-3'-phosphate
  modified_base 4: mod_base = OTHER; note = 2'-O-methyladenosine-3'-phosphate
  modified_base 5: mod_base = OTHER; note = 2'-O-methylguanosine-3'-phosphate
  modified_base 6: mod_base = OTHER; note = 2'-O-methylcytidine-3'-phosphate
  modified_base 7: mod_base = OTHER; note = 2'-fluoroadenosine-3'-phosphate
  modified_base 8: mod_base = OTHER; note = 2'-O-methyluridine-3'-phosphate
  modified_base 9: mod_base = OTHER; note = 2'-fluorocytidine-3'-phosphate
  modified_base 10: mod_base = OTHER; note = 2'-fluoroguanosine-3'-phosphate
  modified_base 11: mod_base = OTHER; note = 2'-fluorocytidine-3'-phosphate
  modified_base 12: mod_base = OTHER; note = 2'-O-methylcytidine-3'-phosphate
  modified_base 13: mod_base = OTHER; note = 2'-O-methyluridine-3'-phosphate
  modified_base 14: mod_base = OTHER; note = 2'-O-methylguanosine-3'-phosphate
  modified_base 15: mod_base = OTHER; note = 2'-O-methyluridine-3'-phosphate
  modified_base 16: mod_base = OTHER; note = 2'-O-methylguanosine-3'-phosphate
  modified_base 17: mod_base = OTHER; note = 2'-O-methylcytidine-3'-phosphate
  modified_base 18: mod_base = OTHER; note = 2'-O-methylcytidine-3'-phosphate
  modified_base 19: mod_base = OTHER; note = 2'-O-methyluridine-3'-phosphorothioate
  modified_base 20: mod_base = OTHER; note = 2'-O-methyluridine-3'-phosphorothioate
  modified_base 21: mod_base = OTHER; note = 2'-O-methyladenosine-3'-phosphate
ttcagcatcgcctgtgcctta

SEQ ID NO: 4829 - RNA, 21 nt, synthetic construct
  source 1..21: mol_type = other RNA
  modified_base 1: mod_base = OTHER; note = 2'-O-methylguanosine-3'-phosphorothioate
  modified_base 2: mod_base = OTHER; note = 2'-O-methylcytidine-3'-phosphorothioate
  modified_base 3: mod_base = OTHER; note = 2'-O-methyluridine-3'-phosphate
  modified_base 4: mod_base = OTHER; note = 2'-O-methyladenosine-3'-phosphate
  modified_base 5: mod_base = OTHER; note = 2'-O-methyladenosine-3'-phosphate
  modified_base 6: mod_base = OTHER; note = 2'-O-methyladenosine-3'-phosphate
  modified_base 7: mod_base = OTHER; note = 2'-fluorouridine-3'-phosphate
  modified_base 8: mod_base = OTHER; note = 2'-O-methylguanosine-3'-phosphate
  modified_base 9: mod_base = OTHER; note = 2'-fluoroadenosine-3'-phosphate
  modified_base 10: mod_base = OTHER; note = 2'-fluoroguanosine-3'-phosphate
  modified_base 11: mod_base = OTHER; note = 2'-fluoroguanosine-3'-phosphate
  modified_base 12: mod_base = OTHER; note = 2'-O-methylcytidine-3'-phosphate
  modified_base 13: mod_base = OTHER; note = 2'-O-methyluridine-3'-phosphate
  modified_base 14: mod_base = OTHER; note = 2'-O-methylcytidine-3'-phosphate
  modified_base 15: mod_base = OTHER; note = 2'-O-methylguanosine-3'-phosphate
  modified_base 16: mod_base = OTHER; note = 2'-O-methylcytidine-3'-phosphate
  modified_base 17: mod_base = OTHER; note = 2'-O-methyladenosine-3'-phosphate
  modified_base 18: mod_base = OTHER; note = 2'-O-methyladenosine-3'-phosphate
  modified_base 19: mod_base = OTHER; note = 2'-O-methyluridine-3'-phosphorothioate
  modified_base 20: mod_base = OTHER; note = 2'-O-methyladenosine-3'-phosphorothioate
  modified_base 21: mod_base = OTHER; note = 2'-O-methyladenosine-3'-phosphate
gctaaatgaggctcgcaataa

SEQ ID NO: 4830 - RNA, 21 nt, synthetic construct
  source 1..21: mol_type = other RNA
  modified_base 1: mod_base = OTHER; note = 2'-O-methylcytidine-3'-phosphorothioate
  modified_base 2: mod_base = OTHER; note = 2'-O-methyladenosine-3'-phosphorothioate
  modified_base 3: mod_base = OTHER; note = 2'-O-methylguanosine-3'-phosphate
  modified_base 4: mod_base = OTHER; note = 2'-O-methylcytidine-3'-phosphate
  modified_base 5: mod_base = OTHER; note = 2'-O-methyluridine-3'-phosphate
  modified_base 6: mod_base = OTHER; note = 2'-O-methyluridine-3'-phosphate
  modified_base 7: mod_base = OTHER; note = 2'-fluorocytidine-3'-phosphate
  modified_base 8: mod_base = OTHER; note = 2'-O-methylguanosine-3'-phosphate
  modified_base 9: mod_base = OTHER; note = 2'-fluorouridine-3'-phosphate
  modified_base 10: mod_base = OTHER; note = 2'-fluorocytidine-3'-phosphate
  modified_base 11: mod_base = OTHER; note = 2'-fluorouridine-3'-phosphate
  modified_base 12: mod_base = OTHER; note = 2'-O-methylguanosine-3'-phosphate
  modified_base 13: mod_base = OTHER; note = 2'-O-methylguanosine-3'-phosphate
  modified_base 14: mod_base = OTHER; note = 2'-O-methyluridine-3'-phosphate
  modified_base 15: mod_base = OTHER; note = 2'-O-methylguanosine-3'-phosphate
  modified_base 16: mod_base = OTHER; note = 2'-O-methylguanosine-3'-phosphate
  modified_base 17: mod_base = OTHER; note = 2'-O-methylguanosine-3'-phosphate
  modified_base 18: mod_base = OTHER; note = 2'-O-methyluridine-3'-phosphate
  modified_base 19: mod_base = OTHER; note = 2'-O-methylcytidine-3'-phosphorothioate
  modified_base 20: mod_base = OTHER; note = 2'-O-methyluridine-3'-phosphorothioate
  modified_base 21: mod_base = OTHER; note = 2'-O-methyladenosine-3'-phosphate
cagcttcgtctggtgggtcta

SEQ ID NO: 4831 - RNA, 21 nt, synthetic construct
  source 1..21: mol_type = other RNA
  modified_base 1: mod_base = OTHER; note = 2'-O-methyladenosine-3'-phosphorothioate
  modified_base 2: mod_base = OTHER; note = 2'-O-methyluridine-3'-phosphorothioate
  modified_base 3: mod_base = OTHER; note = 2'-O-methyladenosine-3'-phosphate
  modified_base 4: mod_base = OTHER; note = 2'-O-methyluridine-3'-phosphate
  modified_base 5: mod_base = OTHER; note = 2'-O-methylguanosine-3'-phosphate
  modified_base 6: mod_base = OTHER; note = 2'-O-methylguanosine-3'-phosphate
  modified_base 7: mod_base = OTHER; note = 2'-fluorouridine-3'-phosphate
  modified_base 8: mod_base = OTHER; note = 2'-O-methyladenosine-3'-phosphate
  modified_base 9: mod_base = OTHER; note = 2'-fluorouridine-3'-phosphate
  modified_base 10: mod_base = OTHER; note = 2'-fluorouridine-3'-phosphate
  modified_base 11: mod_base = OTHER; note = 2'-fluoroguanosine-3'-phosphate
  modified_base 12: mod_base = OTHER; note = 2'-O-methylguanosine-3'-phosphate
  modified_base 13: mod_base = OTHER; note = 2'-O-methylcytidine-3'-phosphate
  modified_base 14: mod_base = OTHER; note = 2'-O-methyladenosine-3'-phosphate
  modified_base 15: mod_base = OTHER; note = 2'-O-methyluridine-3'-phosphate
  modified_base 16: mod_base = OTHER; note = 2'-O-methylguanosine-3'-phosphate
  modified_base 17: mod_base = OTHER; note = 2'-O-methylcytidine-3'-phosphate
  modified_base 18: mod_base = OTHER; note = 2'-O-methyladenosine-3'-phosphate
  modified_base 19: mod_base = OTHER; note = 2'-O-methylguanosine-3'-phosphorothioate
  modified_base 20: mod_base = OTHER; note = 2'-O-methyluridine-3'-phosphorothioate
  modified_base 21: mod_base = OTHER; note = 2'-O-methyladenosine-3'-phosphate
atatggtattggcatgcagta

SEQ ID NO: 4832 - RNA, 21 nt, synthetic construct
  source 1..21: mol_type = other RNA
  modified_base 1: mod_base = OTHER; note = 2'-O-methyladenosine-3'-phosphorothioate
  modified_base 2: mod_base = OTHER; note = 2'-O-methyladenosine-3'-phosphorothioate
  modified_base 3: mod_base = OTHER; note = 2'-O-methyladenosine-3'-phosphate
  modified_base 4: mod_base = OTHER; note = 2'-O-methylcytidine-3'-phosphate
  modified_base 5: mod_base = OTHER; note = 2'-O-methyluridine-3'-phosphate
  modified_base 6: mod_base = OTHER; note = 2'-O-methylguanosine-3'-phosphate
  modified_base 7: mod_base = OTHER; note = 2'-fluorocytidine-3'-phosphate
  modified_base 8: mod_base = OTHER; note = 2'-O-methyladenosine-3'-phosphate
  modified_base 9: mod_base = OTHER; note = 2'-fluoroguanosine-3'-phosphate
  modified_base 10: mod_base = OTHER; note = 2'-fluoroguanosine-3'-phosphate
  modified_base 11: mod_base = OTHER; note = 2'-fluorouridine-3'-phosphate
  modified_base 12: mod_base = OTHER; note = 2'-O-methylguanosine-3'-phosphate
  modified_base 13: mod_base = OTHER; note = 2'-O-methylguanosine-3'-phosphate
  modified_base 14: mod_base = OTHER; note = 2'-O-methyladenosine-3'-phosphate
  modified_base 15: mod_base = OTHER; note = 2'-O-methylguanosine-3'-phosphate
  modified_base 16: mod_base = OTHER; note = 2'-O-methyladenosine-3'-phosphate
  modified_base 17: mod_base = OTHER; note = 2'-O-methyladenosine-3'-phosphate
  modified_base 18: mod_base = OTHER; note = 2'-O-methyluridine-3'-phosphate
  modified_base 19: mod_base = OTHER; note = 2'-O-methyluridine-3'-phosphorothioate
  modified_base 20: mod_base = OTHER; note = 2'-O-methylcytidine-3'-phosphorothioate
  modified_base 21: mod_base = OTHER; note = 2'-O-methyladenosine-3'-phosphate
aaactgcaggtggagaattca

SEQ ID NO: 4833 - RNA, 21 nt, synthetic construct
  source 1..21: mol_type = other RNA
  modified_base 1: mod_base = OTHER; note = 2'-O-methyluridine-3'-phosphorothioate
  modified_base 2: mod_base = OTHER; note = 2'-O-methyladenosine-3'-phosphorothioate
  modified_base 3: mod_base = OTHER; note = 2'-O-methyluridine-3'-phosphate
  modified_base 4: mod_base = OTHER; note = 2'-O-methylguanosine-3'-phosphate
  modified_base 5: mod_base = OTHER; note = 2'-O-methylguanosine-3'-phosphate
  modified_base 6: mod_base = OTHER; note = 2'-O-methylcytidine-3'-phosphate
  modified_base 7: mod_base = OTHER; note = 2'-fluorouridine-3'-phosphate
  modified_base 8: mod_base = OTHER; note = 2'-O-methylguanosine-3'-phosphate
  modified_base 9: mod_base = OTHER; note = 2'-fluorocytidine-3'-phosphate
  modified_base 10: mod_base = OTHER; note = 2'-fluorocytidine-3'-phosphate
  modified_base 11: mod_base = OTHER; note = 2'-fluorouridine-3'-phosphate
  modified_base 12: mod_base = OTHER; note = 2'-O-methylguanosine-3'-phosphate
  modified_base 13: mod_base = OTHER; note = 2'-O-methyluridine-3'-phosphate
  modified_base 14: mod_base = OTHER; note = 2'-O-methylcytidine-3'-phosphate
  modified_base 15: mod_base = OTHER; note = 2'-O-methyluridine-3'-phosphate
  modified_base 16: mod_base = OTHER; note = 2'-O-methyluridine-3'-phosphate
  modified_base 17: mod_base = OTHER; note = 2'-O-methylcytidine-3'-phosphate
  modified_base 18: mod_base = OTHER; note = 2'-O-methyladenosine-3'-phosphate
  modified_base 19: mod_base = OTHER; note = 2'-O-methyladenosine-3'-phosphorothioate
  modified_base 20: mod_base = OTHER; note = 2'-O-methyladenosine-3'-phosphorothioate
  modified_base 21: mod_base = OTHER; note = 2'-O-methyladenosine-3'-phosphate
tatggctgcctgtcttcaaaa

SEQ ID NO: 4834 - RNA, 21 nt, synthetic construct
  source 1..21: mol_type = other RNA
  modified_base 1: mod_base = OTHER; note = 2'-O-methylcytidine-3'-phosphorothioate
  modified_base 2: mod_base = OTHER; note = 2'-O-methyluridine-3'-phosphorothioate
  modified_base 3: mod_base = OTHER; note = 2'-O-methylguanosine-3'-phosphate
  modified_base 4: mod_base = OTHER; note = 2'-O-methyluridine-3'-phosphate
  modified_base 5: mod_base = OTHER; note = 2'-O-methyluridine-3'-phosphate
  modified_base 6: mod_base = OTHER; note = 2'-O-methylcytidine-3'-phosphate
  modified_base 7: mod_base = OTHER; note = 2'-fluorouridine-3'-phosphate
  modified_base 8: mod_base = OTHER; note = 2'-O-methylguanosine-3'-phosphate
  modified_base 9: mod_base = OTHER; note = 2'-fluoroadenosine-3'-phosphate
  modified_base 10: mod_base = OTHER; note = 2'-fluoroadenosine-3'-phosphate
  modified_base 11: mod_base = OTHER; note = 2'-fluoroadenosine-3'-phosphate
  modified_base 12: mod_base = OTHER; note = 2'-O-methyluridine-3'-phosphate
  modified_base 13: mod_base = OTHER; note = 2'-O-methyladenosine-3'-phosphate
  modified_base 14: mod_base = OTHER; note = 2'-O-methylguanosine-3'-phosphate
  modified_base 15: mod_base = OTHER; note = 2'-O-methyladenosine-3'-phosphate
  modified_base 16: mod_base = OTHER; note = 2'-O-methylguanosine-3'-phosphate
  modified_base 17: mod_base = OTHER; note = 2'-O-methylguanosine-3'-phosphate
  modified_base 18: mod_base = OTHER; note = 2'-O-methyladenosine-3'-phosphate
  modified_base 19: mod_base = OTHER; note = 2'-O-methylcytidine-3'-phosphorothioate
  modified_base 20: mod_base = OTHER; note = 2'-O-methylcytidine-3'-phosphorothioate
  modified_base 21: mod_base = OTHER; note = 2'-O-methyladenosine-3'-phosphate
ctgttctgaaatagaggacca

SEQ ID NO: 4835 - RNA, 21 nt, synthetic construct
  source 1..21: mol_type = other RNA
  modified_base 1: mod_base = OTHER; note = 2'-O-methyluridine-3'-phosphorothioate
  modified_base 2: mod_base = OTHER; note = 2'-O-methylcytidine-3'-phosphorothioate
  modified_base 3: mod_base = OTHER; note = 2'-O-methyluridine-3'-phosphate
  modified_base 4: mod_base = OTHER; note = 2'-O-methyladenosine-3'-phosphate
  modified_base 5: mod_base = OTHER; note = 2'-O-methyluridine-3'-phosphate
  modified_base 6: mod_base = OTHER; note = 2'-O-methyluridine-3'-phosphate
  modified_base 7: mod_base = OTHER; note = 2'-fluorouridine-3'-phosphate
  modified_base 8: mod_base = OTHER; note = 2'-O-methyluridine-3'-phosphate
  modified_base 9: mod_base = OTHER; note = 2'-fluorouridine-3'-phosphate
  modified_base 10: mod_base = OTHER; note = 2'-fluoroadenosine-3'-phosphate
  modified_base 11: mod_base = OTHER; note = 2'-fluoroadenosine-3'-phosphate
  modified_base 12: mod_base = OTHER; note = 2'-O-methyladenosine-3'-phosphate
  modified_base 13: mod_base = OTHER; note = 2'-O-methylguanosine-3'-phosphate
  modified_base 14: mod_base = OTHER; note = 2'-O-methylcytidine-3'-phosphate
  modified_base 15: mod_base = OTHER; note = 2'-O-methylcytidine-3'-phosphate
  modified_base 16: mod_base = OTHER; note = 2'-O-methylguanosine-3'-phosphate
  modified_base 17: mod_base = OTHER; note = 2'-O-methylcytidine-3'-phosphate
  modified_base 18: mod_base = OTHER; note = 2'-O-methyluridine-3'-phosphate
  modified_base 19: mod_base = OTHER; note = 2'-O-methylguanosine-3'-phosphorothioate
  modified_base 20: mod_base = OTHER; note = 2'-O-methylguanosine-3'-phosphorothioate
  modified_base 21: mod_base = OTHER; note = 2'-O-methyladenosine-3'-phosphate
tctatttttaaagccgctgga

SEQ ID NO: 4836 - RNA, 21 nt, synthetic construct
  source 1..21: mol_type = other RNA
  modified_base 1: mod_base = OTHER; note = 2'-O-methylguanosine-3'-phosphorothioate
  modified_base 2: mod_base = OTHER; note = 2'-O-methylcytidine-3'-phosphorothioate
  modified_base 3: mod_base = OTHER; note = 2'-O-methyluridine-3'-phosphate
  modified_base 4: mod_base = OTHER; note = 2'-O-methylguanosine-3'-phosphate
  modified_base 5: mod_base = OTHER; note = 2'-O-methyladenosine-3'-phosphate
  modified_base 6: mod_base = OTHER; note = 2'-O-methylguanosine-3'-phosphate
  modified_base 7: mod_base = OTHER; note = 2'-fluoroguanosine-3'-phosphate
  modified_base 8: mod_base = OTHER; note = 2'-O-methyladenosine-3'-phosphate
  modified_base 9: mod_base = OTHER; note = 2'-fluoroguanosine-3'-phosphate
  modified_base 10: mod_base = OTHER; note = 2'-fluoroadenosine-3'-phosphate
  modified_base 11: mod_base = OTHER; note = 2'-fluoroadenosine-3'-phosphate
  modified_base 12: mod_base = OTHER; note = 2'-O-methylguanosine-3'-phosphate
  modified_base 13: mod_base = OTHER; note = 2'-O-methylcytidine-3'-phosphate
  modified_base 14: mod_base = OTHER; note = 2'-O-methyluridine-3'-phosphate
  modified_base 15: mod_base = OTHER; note = 2'-O-methylcytidine-3'-phosphate
  modified_base 16: mod_base = OTHER; note = 2'-O-methyladenosine-3'-phosphate
  modified_base 17: mod_base = OTHER; note = 2'-O-methylguanosine-3'-phosphate
  modified_base 18: mod_base = OTHER; note = 2'-O-methylguanosine-3'-phosphate
  modified_base 19: mod_base = OTHER; note = 2'-O-methyladenosine-3'-phosphorothioate
  modified_base 20: mod_base = OTHER; note = 2'-O-methyladenosine-3'-phosphorothioate
  modified_base 21: mod_base = OTHER; note = 2'-O-methyladenosine-3'-phosphate
gctgaggagaagctcaggaaa

SEQ ID NO: 4837 - RNA, 21 nt, synthetic construct
  source 1..21: mol_type = other RNA
  modified_base 1: mod_base = OTHER; note = 2'-O-methylcytidine-3'-phosphorothioate
  modified_base 2: mod_base = OTHER; note = 2'-O-methyladenosine-3'-phosphorothioate
  modified_base 3: mod_base = OTHER; note = 2'-O-methyladenosine-3'-phosphate
  modified_base 4: mod_base = OTHER; note = 2'-O-methylguanosine-3'-phosphate
  modified_base 5: mod_base = OTHER; note = 2'-O-methylcytidine-3'-phosphate
  modified_base 6: mod_base = OTHER; note = 2'-O-methylcytidine-3'-phosphate
  modified_base 7: mod_base = OTHER; note = 2'-fluorouridine-3'-phosphate
  modified_base 8: mod_base = OTHER; note = 2'-O-methyluridine-3'-phosphate
  modified_base 9: mod_base = OTHER; note = 2'-fluorocytidine-3'-phosphate
  modified_base 10: mod_base = OTHER; note = 2'-fluorocytidine-3'-phosphate
  modified_base 11: mod_base = OTHER; note = 2'-fluoroadenosine-3'-phosphate
  modified_base 12: mod_base = OTHER; note = 2'-O-methylcytidine-3'-phosphate
  modified_base 13: mod_base = OTHER; note = 2'-O-methylcytidine-3'-phosphate
  modified_base 14: mod_base = OTHER; note = 2'-O-methyladenosine-3'-phosphate
  modified_base 15: mod_base = OTHER; note = 2'-O-methylcytidine-3'-phosphate
  modified_base 16: mod_base = OTHER; note = 2'-O-methyladenosine-3'-phosphate
  modified_base 17: mod_base = OTHER; note = 2'-O-methyladenosine-3'-phosphate
  modified_base 18: mod_base = OTHER; note = 2'-O-methylguanosine-3'-phosphate
  modified_base 19: mod_base = OTHER; note = 2'-O-methyluridine-3'-phosphorothioate
  modified_base 20: mod_base = OTHER; note = 2'-O-methylcytidine-3'-phosphorothioate
  modified_base 21: mod_base = OTHER; note = 2'-O-methyladenosine-3'-phosphate
caagccttccaccacaagtca

SEQ ID NO: 4838 - RNA, 21 nt, synthetic construct
  source 1..21: mol_type = other RNA
  modified_base 1: mod_base = OTHER; note = 2'-O-methyluridine-3'-phosphorothioate
  modified_base 2: mod_base = OTHER; note = 2'-O-methyluridine-3'-phosphorothioate
  modified_base 3: mod_base = OTHER; note = 2'-O-methylcytidine-3'-phosphate
  modified_base 4: mod_base = OTHER; note = 2'-O-methyladenosine-3'-phosphate
  modified_base 5: mod_base = OTHER; note = 2'-O-methylguanosine-3'-phosphate
  modified_base 6: mod_base = OTHER; note = 2'-O-methyluridine-3'-phosphate
  modified_base 7: mod_base = OTHER; note = 2'-fluorouridine-3'-phosphate
  modified_base 8: mod_base = OTHER; note = 2'-O-methyladenosine-3'-phosphate
  modified_base 9: mod_base = OTHER; note = 2'-fluorocytidine-3'-phosphate
  modified_base 10: mod_base = OTHER; note = 2'-fluorocytidine-3'-phosphate
  modified_base 11: mod_base = OTHER; note = 2'-fluoroadenosine-3'-phosphate
  modified_base 12: mod_base = OTHER; note = 2'-O-methyladenosine-3'-phosphate
  modified_base 13: mod_base = OTHER; note = 2'-O-methyladenosine-3'-phosphate
  modified_base 14: mod_base = OTHER; note = 2'-O-methylguanosine-3'-phosphate
  modified_base 15: mod_base = OTHER; note = 2'-O-methyluridine-3'-phosphate
  modified_base 16: mod_base = OTHER; note = 2'-O-methylguanosine-3'-phosphate
  modified_base 17: mod_base = OTHER; note = 2'-O-methylguanosine-3'-phosphate
  modified_base 18: mod_base = OTHER; note = 2'-O-methylcytidine-3'-phosphate
  modified_base 19: mod_base = OTHER; note = 2'-O-methylcytidine-3'-phosphorothioate
  modified_base 20: mod_base = OTHER; note = 2'-O-methyladenosine-3'-phosphorothioate
  modified_base 21: mod_base = OTHER; note = 2'-O-methyladenosine-3'-phosphate
ttcagttaccaaagtggccaa

SEQ ID NO: 4839 - RNA, 21 nt, synthetic construct
  source 1..21: mol_type = other RNA
  modified_base 1: mod_base = OTHER; note = 2'-O-methylcytidine-3'-phosphorothioate
  modified_base 2: mod_base = OTHER; note = 2'-O-methyladenosine-3'-phosphorothioate
  modified_base 3: mod_base = OTHER; note = 2'-O-methylcytidine-3'-phosphate
  modified_base 4: mod_base = OTHER; note = 2'-O-methylcytidine-3'-phosphate
  modified_base 5: mod_base = OTHER; note = 2'-O-methyluridine-3'-phosphate
  modified_base 6: mod_base = OTHER; note = 2'-O-methylguanosine-3'-phosphate
  modified_base 7: mod_base = OTHER; note = 2'-fluorocytidine-3'-phosphate
  modified_base 8: mod_base = OTHER; note = 2'-O-methyluridine-3'-phosphate
  modified_base 9: mod_base = OTHER; note = 2'-fluorouridine-3'-phosphate
  modified_base 10: mod_base = OTHER; note = 2'-fluorocytidine-3'-phosphate
  modified_base 11: mod_base = OTHER; note = 2'-fluorocytidine-3'-phosphate
  modified_base 12: mod_base = OTHER; note = 2'-O-methyluridine-3'-phosphate
  modified_base 13: mod_base = OTHER; note = 2'-O-methylcytidine-3'-phosphate
  modified_base 14: mod_base = OTHER; note = 2'-O-methyladenosine-3'-phosphate
  modified_base 15: mod_base = OTHER; note = 2'-O-methylcytidine-3'-phosphate
  modified_base 16: mod_base = OTHER; note = 2'-O-methylcytidine-3'-phosphate
  modified_base 17: mod_base = OTHER; note = 2'-O-methylcytidine-3'-phosphate
  modified_base 18: mod_base = OTHER; note = 2'-O-methylguanosine-3'-phosphate
  modified_base 19: mod_base = OTHER; note = 2'-O-methylguanosine-3'-phosphorothioate
  modified_base 20: mod_base = OTHER; note = 2'-O-methyladenosine-3'-phosphorothioate
  modified_base 21: mod_base = OTHER; note = 2'-O-methyladenosine-3'-phosphate
cacctgcttcctcacccggaa

SEQ ID NO: 4840 - RNA, 21 nt, synthetic construct
  source 1..21: mol_type = other RNA
  modified_base 1: mod_base = OTHER; note = 2'-O-methyluridine-3'-phosphorothioate
  modified_base 2: mod_base = OTHER; note = 2'-O-methyluridine-3'-phosphorothioate
  modified_base 3: mod_base = OTHER; note = 2'-O-methyluridine-3'-phosphate
  modified_base 4: mod_base = OTHER; note = 2'-O-methyluridine-3'-phosphate
  modified_base 5: mod_base = OTHER; note = 2'-O-methyladenosine-3'-phosphate
  modified_base 6: mod_base = OTHER; note = 2'-O-methyluridine-3'-phosphate
  modified_base 7: mod_base = OTHER; note = 2'-fluorocytidine-3'-phosphate
  modified_base 8: mod_base = OTHER; note = 2'-O-methyladenosine-3'-phosphate
  modified_base 9: mod_base = OTHER; note = 2'-fluorocytidine-3'-phosphate
  modified_base 10: mod_base = OTHER; note = 2'-fluorocytidine-3'-phosphate
  modified_base 11: mod_base = OTHER; note = 2'-fluorocytidine-3'-phosphate
  modified_base 12: mod_base = OTHER; note = 2'-O-methyladenosine-3'-phosphate
  modified_base 13: mod_base = OTHER; note = 2'-O-methylcytidine-3'-phosphate
  modified_base 14: mod_base = OTHER; note = 2'-O-methyladenosine-3'-phosphate
  modified_base 15: mod_base = OTHER; note = 2'-O-methyluridine-3'-phosphate
  modified_base 16: mod_base = OTHER; note = 2'-O-methyladenosine-3'-phosphate
  modified_base 17: mod_base = OTHER; note = 2'-O-methylguanosine-3'-phosphate
  modified_base 18: mod_base = OTHER; note = 2'-O-methyluridine-3'-phosphate
  modified_base 19: mod_base = OTHER; note = 2'-O-methylguanosine-3'-phosphorothioate
  modified_base 20: mod_base = OTHER; note = 2'-O-methylguanosine-3'-phosphorothioate
  modified_base 21: mod_base = OTHER; note = 2'-O-methyladenosine-3'-phosphate
ttttatcacccacatagtgga

SEQ ID NO: 4841 - RNA, 21 nt, synthetic construct
  source 1..21: mol_type = other RNA
  modified_base 1: mod_base = OTHER; note = 2'-O-methyladenosine-3'-phosphorothioate
  modified_base 2: mod_base = OTHER; note = 2'-O-methylguanosine-3'-phosphorothioate
  modified_base 3: mod_base = OTHER; note = 2'-O-methylguanosine-3'-phosphate
  modified_base 4: mod_base = OTHER; note = 2'-O-methyladenosine-3'-phosphate
  modified_base 5: mod_base = OTHER; note = 2'-O-methylguanosine-3'-phosphate
  modified_base 6: mod_base = OTHER; note = 2'-O-methyladenosine-3'-phosphate
  modified_base 7: mod_base = OTHER; note = 2'-fluorocytidine-3'-phosphate
  modified_base 8: mod_base = OTHER; note = 2'-O-methylcytidine-3'-phosphate
  modified_base 9: mod_base = OTHER; note = 2'-fluoroguanosine-3'-phosphate
  modified_base 10: mod_base = OTHER; note = 2'-fluorouridine-3'-phosphate
  modified_base 11: mod_base = OTHER; note = 2'-fluorocytidine-3'-phosphate
  modified_base 12: mod_base = OTHER; note = 2'-O-methylguanosine-3'-phosphate
  modified_base 13: mod_base = OTHER; note = 2'-O-methyluridine-3'-phosphate
  modified_base 14: mod_base = OTHER; note = 2'-O-methyluridine-3'-phosphate
  modified_base 15: mod_base = OTHER; note = 2'-O-methylguanosine-3'-phosphate
  modified_base 16: mod_base = OTHER; note = 2'-O-methylcytidine-3'-phosphate
  modified_base 17: mod_base = OTHER; note = 2'-O-methylcytidine-3'-phosphate
  modified_base 18: mod_base = OTHER; note = 2'-O-methyluridine-3'-phosphate
  modified_base 19: mod_base = OTHER; note = 2'-O-methyluridine-3'-phosphorothioate
  modified_base 20: mod_base = OTHER; note = 2'-O-methylguanosine-3'-phosphorothioate
  modified_base 21: mod_base = OTHER; note = 2'-O-methyladenosine-3'-phosphate
aggagaccgtcgttgccttga

SEQ ID NO: 4842 - RNA, 21 nt, synthetic construct
  source 1..21: mol_type = other RNA
  modified_base 1: mod_base = OTHER; note = 2'-O-methyladenosine-3'-phosphorothioate
  modified_base 2: mod_base = OTHER; note = 2'-O-methyluridine-3'-phosphorothioate
  modified_base 3: mod_base = OTHER; note = 2'-O-methylguanosine-3'-phosphate
  modified_base 4: mod_base = OTHER; note = 2'-O-methylguanosine-3'-phosphate
  modified_base 5: mod_base = OTHER; note = 2'-O-methylcytidine-3'-phosphate
  modified_base 6: mod_base = OTHER; note = 2'-O-methylcytidine-3'-phosphate
  modified_base 7: mod_base = OTHER; note = 2'-fluorocytidine-3'-phosphate
  modified_base 8: mod_base = OTHER; note = 2'-O-methyladenosine-3'-phosphate
  modified_base 9: mod_base = OTHER; note = 2'-fluoroguanosine-3'-phosphate
  modified_base 10: mod_base = OTHER; note = 2'-fluorocytidine-3'-phosphate
  modified_base 11: mod_base = OTHER; note = 2'-fluoroadenosine-3'-phosphate
  modified_base 12: mod_base = OTHER; note = 2'-O-methyladenosine-3'-phosphate
  modified_base 13: mod_base = OTHER; note = 2'-O-methyladenosine-3'-phosphate
  modified_base 14: mod_base = OTHER; note = 2'-O-methyladenosine-3'-phosphate
  modified_base 15: mod_base = OTHER; note = 2'-O-methylguanosine-3'-phosphate
  modified_base 16: mod_base = OTHER; note = 2'-O-methyluridine-3'-phosphate
  modified_base 17: mod_base = OTHER; note = 2'-O-methyluridine-3'-phosphate
  modified_base 18: mod_base = OTHER; note = 2'-O-methylcytidine-3'-phosphate
  modified_base 19: mod_base = OTHER; note = 2'-O-methylguanosine-3'-phosphorothioate
  modified_base 20: mod_base = OTHER; note = 2'-O-methyladenosine-3'-phosphorothioate
  modified_base 21: mod_base = OTHER; note = 2'-O-methyladenosine-3'-phosphate
atggcccagcaaaagttcgaa

SEQ ID NO: 4843 - RNA, 21 nt, synthetic construct
  source 1..21: mol_type = other RNA
  modified_base 1: mod_base = OTHER; note = 2'-O-methyladenosine-3'-phosphorothioate
  modified_base 2: mod_base = OTHER; note = 2'-O-methylguanosine-3'-phosphorothioate
  modified_base 3: mod_base = OTHER; note = 2'-O-methyladenosine-3'-phosphate
  modified_base 4: mod_base = OTHER; note = 2'-O-methylcytidine-3'-phosphate
  modified_base 5: mod_base = OTHER; note = 2'-O-methylguanosine-3'-phosphate
  modified_base 6: mod_base = OTHER; note = 2'-O-methylcytidine-3'-phosphate
  modified_base 7: mod_base = OTHER; note = 2'-fluorocytidine-3'-phosphate
  modified_base 8: mod_base = OTHER; note = 2'-O-methyladenosine-3'-phosphate
  modified_base 9: mod_base = OTHER; note = 2'-fluoroadenosine-3'-phosphate
  modified_base 10: mod_base = OTHER; note = 2'-fluoroadenosine-3'-phosphate
  modified_base 11: mod_base = OTHER; note = 2'-fluoroguanosine-3'-phosphate
  modified_base 12: mod_base = OTHER; note = 2'-O-methylcytidine-3'-phosphate
  modified_base 13: mod_base = OTHER; note = 2'-O-methylcytidine-3'-phosphate
  modified_base 14: mod_base = OTHER; note = 2'-O-methyladenosine-3'-phosphate
  modified_base 15: mod_base = OTHER; note = 2'-O-methyluridine-3'-phosphate
  modified_base 16: mod_base = OTHER; note = 2'-O-methylguanosine-3'-phosphate
  modified_base 17: mod_base = OTHER; note = 2'-O-methylcytidine-3'-phosphate
  modified_base 18: mod_base = OTHER; note = 2'-O-methylguanosine-3'-phosphate
  modified_base 19: mod_base = OTHER; note = 2'-O-methylguanosine-3'-phosphorothioate
  modified_base 20: mod_base = OTHER; note = 2'-O-methyluridine-3'-phosphorothioate
  modified_base 21: mod_base = OTHER; note = 2'-O-methyladenosine-3'-phosphate
agacgccaaagccatgcggta

SEQ ID NO: 4844 - RNA, 21 nt, synthetic construct
  source 1..21: mol_type = other RNA
  modified_base 1: mod_base = OTHER; note = 2'-O-methylcytidine-3'-phosphorothioate
  modified_base 2: mod_base = OTHER; note = 2'-O-methyladenosine-3'-phosphorothioate
  modified_base 3: mod_base = OTHER; note = 2'-O-methylguanosine-3'-phosphate
  modified_base 4: mod_base = OTHER; note = 2'-O-methylcytidine-3'-phosphate
  modified_base 5: mod_base = OTHER; note = 2'-O-methyluridine-3'-phosphate
  modified_base 6: mod_base = OTHER; note = 2'-O-methyladenosine-3'-phosphate
  modified_base 7: mod_base = OTHER; note = 2'-fluoroadenosine-3'-phosphate
  modified_base 8: mod_base = OTHER; note = 2'-O-methyluridine-3'-phosphate
  modified_base 9: mod_base = OTHER; note = 2'-fluoroguanosine-3'-phosphate
  modified_base 10: mod_base = OTHER; note = 2'-fluorocytidine-3'-phosphate
  modified_base 11: mod_base = OTHER; note = 2'-fluoroadenosine-3'-phosphate
  modified_base 12: mod_base = OTHER; note = 2'-O-methylcytidine-3'-phosphate
  modified_base 13: mod_base = OTHER; note = 2'-O-methylcytidine-3'-phosphate
  modified_base 14: mod_base = OTHER; note = 2'-O-methyladenosine-3'-phosphate
  modified_base 15: mod_base = OTHER; note = 2'-O-methylcytidine-3'-phosphate
  modified_base 16: mod_base = OTHER; note = 2'-O-methylcytidine-3'-phosphate
  modified_base 17: mod_base = OTHER; note = 2'-O-methyluridine-3'-phosphate
  modified_base 18: mod_base = OTHER; note = 2'-O-methylcytidine-3'-phosphate
  modified_base 19: mod_base = OTHER; note = 2'-O-methyladenosine-3'-phosphorothioate
  modified_base 20: mod_base = OTHER; note = 2'-O-methylcytidine-3'-phosphorothioate
  modified_base 21: mod_base = OTHER; note = 2'-O-methyladenosine-3'-phosphate
cagctaatgcaccacctcaca

SEQ ID NO: 4845 - RNA, 21 nt, synthetic construct
  source 1..21: mol_type = other RNA
  modified_base 1: mod_base = OTHER; note = 2'-O-methylguanosine-3'-phosphorothioate
  modified_base 2: mod_base = OTHER; note = 2'-O-methylguanosine-3'-phosphorothioate
  modified_base 3: mod_base = OTHER; note = 2'-O-methyladenosine-3'-phosphate
  modified_base 4: mod_base = OTHER; note = 2'-O-methyladenosine-3'-phosphate
  modified_base 5: mod_base = OTHER; note = 2'-O-methyladenosine-3'-phosphate
  modified_base 6: mod_base = OTHER; note = 2'-O-methyladenosine-3'-phosphate
  modified_base 7: mod_base = OTHER; note = 2'-fluoroguanosine-3'-phosphate
  modified_base 8: mod_base = OTHER; note = 2'-O-methylcytidine-3'-phosphate
  modified_base 9: mod_base = OTHER; note = 2'-fluoroadenosine-3'-phosphate
  modified_base 10: mod_base = OTHER; note = 2'-fluoroguanosine-3'-phosphate
  modified_base 11: mod_base = OTHER; note = 2'-fluoroadenosine-3'-phosphate
  modified_base 12: mod_base = OTHER; note = 2'-O-methylcytidine-3'-phosphate
  modified_base 13: mod_base = OTHER; note = 2'-O-methylguanosine-3'-phosphate
  modified_base 14: mod_base = OTHER; note = 2'-O-methylguanosine-3'-phosphate
  modified_base 15: mod_base = OTHER; note = 2'-O-methylcytidine-3'-phosphate
  modified_base 16: mod_base = OTHER; note = 2'-O-methylguanosine-3'-phosphate
  modified_base 17: mod_base = OTHER; note = 2'-O-methyladenosine-3'-phosphate
  modified_base 18: mod_base = OTHER; note = 2'-O-methyladenosine-3'-phosphate
  modified_base 19: mod_base = OTHER; note = 2'-O-methyluridine-3'-phosphorothioate
  modified_base 20: mod_base = OTHER; note = 2'-O-methyladenosine-3'-phosphorothioate
  modified_base 21: mod_base = OTHER; note = 2'-O-methyladenosine-3'-phosphate
ggaaaagcagacggcgaataa

SEQ ID NO: 4846 - RNA, 21 nt, synthetic construct
  source 1..21: mol_type = other RNA
  modified_base 1: mod_base = OTHER; note = 2'-O-methylguanosine-3'-phosphorothioate
  modified_base 2: mod_base = OTHER; note = 2'-O-methylcytidine-3'-phosphorothioate
  modified_base 3: mod_base = OTHER; note = 2'-O-methyluridine-3'-phosphate
  modified_base 4: mod_base = OTHER; note = 2'-O-methyluridine-3'-phosphate
  modified_base 5: mod_base = OTHER; note = 2'-O-methyluridine-3'-phosphate
  modified_base 6: mod_base = OTHER; note = 2'-O-methylguanosine-3'-phosphate
  modified_base 7: mod_base = OTHER; note = 2'-fluorocytidine-3'-phosphate
  modified_base 8: mod_base = OTHER; note = 2'-O-methyluridine-3'-phosphate
  modified_base 9: mod_base = OTHER; note = 2'-fluoroguanosine-3'-phosphate
  modified_base 10: mod_base = OTHER; note = 2'-fluoroguanosine-3'-phosphate
  modified_base 11: mod_base = OTHER; note = 2'-fluoroguanosine-3'-phosphate
  modified_base 12: mod_base = OTHER; note = 2'-O-methyluridine-3'-phosphate
  modified_base 13: mod_base = OTHER; note = 2'-O-methyladenosine-3'-phosphate
  modified_base 14: mod_base = OTHER; note = 2'-O-methylguanosine-3'-phosphate
  modified_base 15: mod_base = OTHER; note = 2'-O-methyluridine-3'-phosphate
  modified_base 16: mod_base = OTHER; note = 2'-O-methylguanosine-3'-phosphate
  modified_base 17: mod_base = OTHER; note = 2'-O-methyladenosine-3'-phosphate
  modified_base 18: mod_base = OTHER; note = 2'-O-methylguanosine-3'-phosphate
  modified_base 19: mod_base = OTHER; note = 2'-O-methylcytidine-3'-phosphorothioate
  modified_base 20: mod_base = OTHER; note = 2'-O-methyluridine-3'-phosphorothioate
  modified_base 21: mod_base = OTHER; note = 2'-O-methyladenosine-3'-phosphate
gctttgctgggtagtgagcta

SEQ ID NO: 4847 - RNA, 21 nt, synthetic construct
  source 1..21: mol_type = other RNA
  modified_base 1: mod_base = OTHER; note = 2'-O-methyladenosine-3'-phosphorothioate
  modified_base 2: mod_base = OTHER; note = 2'-O-methyladenosine-3'-phosphorothioate
  modified_base 3: mod_base = OTHER; note = 2'-O-methyladenosine-3'-phosphate
  modified_base 4: mod_base = OTHER; note = 2'-O-methyluridine-3'-phosphate
  modified_base 5: mod_base = OTHER; note = 2'-O-methylguanosine-3'-phosphate
  modified_base 6: mod_base = OTHER; note = 2'-O-methyladenosine-3'-phosphate
  modified_base 7: mod_base = OTHER; note = 2'-fluoroadenosine-3'-phosphate
  modified_base 8: mod_base = OTHER; note = 2'-O-methyladenosine-3'-phosphate
  modified_base 9: mod_base = OTHER; note = 2'-fluorocytidine-3'-phosphate
  modified_base 10: mod_base = OTHER; note = 2'-fluoroadenosine-3'-phosphate
  modified_base 11: mod_base = OTHER; note = 2'-fluoroguanosine-3'-phosphate
  modified_base 12: mod_base = OTHER; note = 2'-O-methyladenosine-3'-phosphate
  modified_base 13: mod_base = OTHER; note = 2'-O-methyluridine-3'-phosphate
  modified_base 14: mod_base = OTHER; note = 2'-O-methyluridine-3'-phosphate
  modified_base 15: mod_base = OTHER; note = 2'-O-methylcytidine-3'-phosphate
  modified_base 16: mod_base = OTHER; note = 2'-O-methyluridine-3'-phosphate
  modified_base 17: mod_base = OTHER; note = 2'-O-methylguanosine-3'-phosphate
  modified_base 18: mod_base = OTHER; note = 2'-O-methyladenosine-3'-phosphate
  modified_base 19: mod_base = OTHER; note = 2'-O-methyluridine-3'-phosphorothioate
  modified_base 20: mod_base = OTHER; note = 2'-O-methylguanosine-3'-phosphorothioate
  modified_base 21: mod_base = OTHER; note = 2'-O-methyladenosine-3'-phosphate
aaatgaaacagattctgatga

SEQ ID NO: 4848 - RNA, 23 nt, synthetic construct
  source 1..23: mol_type = other RNA
  modified_base 1: mod_base = OTHER; note = Vinyl-phosphonate 2'-O-methyluridine-3'-phosphorothioate
  modified_base 2: mod_base = OTHER; note = 2'-fluorocytidine-3'-phosphorothioate
  modified_base 3: mod_base = OTHER; note = 2'-O-methyladenosine-3'-phosphate
  modified_base 4: mod_base = OTHER; note = 2'-O-methyluridine-3'-phosphate
  modified_base 5: mod_base = OTHER; note = 2'-O-methylcytidine-3'-phosphate
  modified_base 6: mod_base = OTHER; note = 2'-fluoroadenosine-3'-phosphate
  modified_base 7: mod_base = OTHER; note = 2'-O-methylguanosine-3'-phosphate
  modified_base 8: mod_base = OTHER; note = 2'-fluoroadenosine-3'-phosphate
  modified_base 9: mod_base = OTHER; note = 2'-fluoroadenosine-3'-phosphate
  modified_base 10: mod_base = OTHER; note = 2'-O-methyluridine-3'-phosphate
  modified_base 11: mod_base = OTHER; note = 2'-O-methylcytidine-3'-phosphate
  modified_base 12: mod_base = OTHER; note = 2'-O-methyluridine-3'-phosphate
  modified_base 13: mod_base = OTHER; note = 2'-O-methylguanosine-3'-phosphate
  modified_base 14: mod_base = OTHER; note = 2'-fluorouridine-3'-phosphate
  modified_base 15: mod_base = OTHER; note = 2'-O-methyluridine-3'-phosphate
  modified_base 16: mod_base = OTHER; note = 2'-fluorouridine-3'-phosphate
  modified_base 17: mod_base = OTHER; note = 2'-O-methylcytidine-3'-phosphate
  modified_base 18: mod_base = OTHER; note = 2'-O-methyladenosine-3'-phosphate
  modified_base 19: mod_base = OTHER; note = 2'-O-methyluridine-3'-phosphate
  modified_base 20: mod_base = OTHER; note = 2'-O-methyluridine-3'-phosphate
  modified_base 21: mod_base = OTHER; note = 2'-O-methyluridine-3'-phosphorothioate
  modified_base 22: mod_base = OTHER; note = 2'-O-methylcytidine-3'-phosphorothioate
  modified_base 23: mod_base = OTHER; note = 2'-O-methylcytidine-3'-phosphate
tcatcagaatctgtttcatttcc

SEQ ID NO: 4849 - RNA, 23 nt, synthetic construct
  source 1..23: mol_type = other RNA
ggaaatgaaacagattctgatgg

SEQ ID NO: 4850 - RNA, 21 nt, synthetic construct
  source 1..21: mol_type = other RNA
tcttccagggcctctggcagt

SEQ ID NO: 4851 - RNA, 21 nt, synthetic construct
  source 1..21: mol_type = other RNA
caggacagagttgagaccact

SEQ ID NO: 4852 - RNA, 21 nt, synthetic construct
  source 1..21: mol_type = other RNA
cacagctgttgagaccctgat

SEQ ID NO: 4853 - RNA, 21 nt, synthetic construct
  source 1..21: mol_type = other RNA
gagtctgtattgctcaagaat

SEQ ID NO: 4854 - RNA, 21 nt, synthetic construct
  source 1..21: mol_type = other RNA
tgacctcctcattgcttctgt

SEQ ID NO: 4855 - RNA, 21 nt, synthetic construct
  source 1..21: mol_type = other RNA
tggcctttctcctcctggctt

SEQ ID NO: 4856 - RNA, 21 nt, synthetic construct
  source 1..21: mol_type = other RNA
ctccaaccacagtggccactt

SEQ ID NO: 4857 - RNA, 21 nt, synthetic construct
  source 1..21: mol_type = other RNA
gcggtcagtgtccagcatgtt

SEQ ID NO: 4858 - RNA, 21 nt, synthetic construct
  source 1..21: mol_type = other RNA
accttggaactggagagccat

SEQ ID NO: 4859 - RNA, 21 nt, synthetic construct
  source 1..21: mol_type = other RNA
gagctgcttcttgatctggct

SEQ ID NO: 4860 - RNA, 21 nt, synthetic construct
  source 1..21: mol_type = other RNA
agaagcatcttggacaagctt

SEQ ID NO: 4861 - RNA, 21 nt, synthetic construct
  source 1..21: mol_type = other RNA
ccaacactgaaccgccctgtt

SEQ ID NO: 4862 - RNA, 21 nt, synthetic construct
  source 1..21: mol_type = other RNA
cagagctgctttgaggactgt

SEQ ID NO: 4863 - RNA, 21 nt, synthetic construct
  source 1..21: mol_type = other RNA
actgcactgcagcacctccat

SEQ ID NO: 4864 - RNA, 21 nt, synthetic construct
  source 1..21: mol_type = other RNA
gcacttctagaggacaacagt

SEQ ID NO: 4865 - RNA, 21 nt, synthetic construct
  source 1..21: mol_type = other RNA
gaacaggaatgtgaaatcatt

SEQ ID NO: 4866 - RNA, 21 nt, synthetic construct
  source 1..21: mol_type = other RNA
catcagctttgctgagacagt

SEQ ID NO: 4867 - RNA, 21 nt, synthetic construct
  source 1..21: mol_type = other RNA
aggcctctccaccatcaacct

SEQ ID NO: 4868 - RNA, 21 nt, synthetic construct
  source 1..21: mol_type = other RNA
aaccagactcgtcttgatttt

SEQ ID NO: 4869 - RNA, 21 nt, synthetic construct
  source 1..21: mol_type = other RNA
attttcacttctcctctgatt

SEQ ID NO: 4870 - RNA, 21 nt, synthetic construct
  source 1..21: mol_type = other RNA
tgatagaactgctggtgacat

SEQ ID NO: 4871 - RNA, 21 nt, synthetic construct
  source 1..21: mol_type = other RNA
agtctcatgttctttgtgcat

SEQ ID NO: 4872 - RNA, 21 nt, synthetic construct
  source 1..21: mol_type = other RNA
tgcagctcccttccaatacct

SEQ ID NO: 4873 - RNA, 21 nt, synthetic construct
  source 1..21: mol_type = other RNA
taccacttggaccttgaaagt

SEQ ID NO: 4874 - RNA, 21 nt, synthetic construct
  source 1..21: mol_type = other RNA
aaagtgagagtccttgtgctt

SEQ ID NO: 4875 - RNA, 21 nt, synthetic construct
  source 1..21: mol_type = other RNA
ccacataataccaacctcact

SEQ ID NO: 4876 - RNA, 21 nt, synthetic construct
  source 1..21: mol_type = other RNA
ttggctactcagtacctgctt

SEQ ID NO: 4877 - RNA, 21 nt, synthetic construct
  source 1..21: mol_type = other RNA
tgctggaggtggatgccagtt

SEQ ID NO: 4878 - RNA, 21 nt, synthetic construct
  source 1..21: mol_type = other RNA
cagtggctggcatcaactcct

SEQ ID NO: 4879 - RNA, 21 nt, synthetic construct
  source 1..21: mol_type = other RNA
cctgaagctcaagctgcctgt

SEQ ID NO: 4880 - RNA, 21 nt, synthetic construct
  source 1..21: mol_type = other RNA
gagctggtacttgaaggccat

SEQ ID NO: 4881 - RNA, 21 nt, synthetic construct
  source 1..21: mol_type = other RNA
gcccagagctcagtcatcctt

SEQ ID NO: 4882 - RNA, 21 nt, synthetic construct
  source 1..21: mol_type = other RNA
tgcccataggccttttgtggt

SEQ ID NO: 4883 - RNA, 21 nt, synthetic construct
  source 1..21: mol_type = other RNA
tggcagcccgggtgagagttt

SEQ ID NO: 4884 - RNA, 21 nt, synthetic construct
  source 1..21: mol_type = other RNA
gcaaacaccagattcaccgat

SEQ ID NO: 4885 - RNA, 21 nt, synthetic construct
  source 1..21: mol_type = other RNA
acgaggcatcgactgccaagt

SEQ ID NO: 4886 - RNA, 21 nt, synthetic construct
  source 1..21: mol_type = other RNA
aaggagggtccaggatgtgct

SEQ ID NO: 4887 - RNA, 21 nt, synthetic construct
  source 1..21: mol_type = other RNA
gtgctgtcgacaagagttttt

SEQ ID NO: 4888 - RNA, 21 nt, synthetic construct
  source 1..21: mol_type = other RNA
ttttttgtggacttccgtgat

SEQ ID NO: 4889 - RNA, 21 nt, synthetic construct
  source 1..21: mol_type = other RNA
gcacgactggatcatccagct

SEQ ID NO: 4890 - RNA, 21 nt, synthetic construct
  source 1..21: mol_type = other RNA
cgccatgaacttctgcatagt

SEQ ID NO: 4891 - RNA, 21 nt, synthetic construct
  source 1..21: mol_type = other RNA
tgcccactacacatagcaggt

SEQ ID NO: 4892 - RNA, 21 nt, synthetic construct
  source 1..21: mol_type = other RNA
ggcatgcctggtattgctgct

SEQ ID NO: 4893 - RNA, 21 nt, synthetic construct
  source 1..21: mol_type = other RNA
ctgcctcctttcacactgcat

SEQ ID NO: 4894 - RNA, 21 nt, synthetic construct
  source 1..21: mol_type = other RNA
gcagtgctcaatcttctcaat

SEQ ID NO: 4895 - RNA, 21 nt, synthetic construct
  source 1..21: mol_type = other RNA
aaggccaacacagctgcaggt

SEQ ID NO: 4896 - RNA, 21 nt, synthetic construct
  source 1..21: mol_type = other RNA
gctcatgctgtgtacccacgt

SEQ ID NO: 4897 - RNA, 21 nt, synthetic construct
  source 1..21: mol_type = other RNA
gtctctgctctattatgacat

SEQ ID NO: 4898 - RNA, 21 nt, synthetic construct
  source 1..21: mol_type = other RNA
gacagggacagcaacattgtt

SEQ ID NO: 4899 - RNA, 21 nt, synthetic construct
  source 1..21: mol_type = other RNA
tgtcaagactgacatacctgt

SEQ ID NO: 4900 - RNA, 21 nt, synthetic construct
  source 1..21: mol_type = other RNA
cctgacatggtagtagaggct

SEQ ID NO: 4901 - RNA, 21 nt, synthetic construct
  source 1..21: mol_type = other RNA
agttagtctatgtgtggtatt

SEQ ID NO: 4902 - RNA, 21 nt, synthetic construct
  source 1..21: mol_type = other RNA
ccaaggttgcatgggaaaact

SEQ ID NO: 4903 - RNA, 21 nt, synthetic construct
  source 1..21: mol_type = other RNA
acagaagtgcacttccttgat

SEQ ID NO: 4904 - RNA, 21 nt, synthetic construct
  source 1..21: mol_type = other RNA
agaggagggaatgacctcatt

SEQ ID NO: 4905 - RNA, 21 nt, synthetic construct
  source 1..21: mol_type = other RNA
tcattctctgtccagaatgtt

SEQ ID NO: 4906 - RNA, 21 nt, synthetic construct
  source 1..21: mol_type = other RNA
gtggactccctcttcctgagt

SEQ ID NO: 4907 - RNA, 21 nt, synthetic construct
  source 1..21: mol_type = other RNA
gagcatcttatggaaattact

SEQ ID NO: 4908 - RNA, 21 nt, synthetic construct
  source 1..21: mol_type = other RNA
cacctttgacttgaagaaact

SEQ ID NO: 4909 - RNA, 21 nt, synthetic construct
  source 1..21: mol_type = other RNA
cttcatctaaagcaagtcact

SEQ ID NO: 4910 - RNA, 21 nt, synthetic construct
  source 1..21: mol_type = other RNA
tcactgtgccatcttcctgat

SEQ ID NO: 4911 - RNA, 21 nt, synthetic construct
  source 1..21: mol_type = other RNA
gaccactaccctctttcctat

SEQ ID NO: 4912 - RNA, 21 nt, synthetic construct
  source 1..21: mol_type = other RNA
tccatcccgctagtccatcct

SEQ ID NO: 4913 - RNA, 21 nt, synthetic construct
  source 1..21: mol_type = other RNA
acccatctccaaccatgagct

SEQ ID NO: 4914 - RNA, 21 nt, synthetic construct
  source 1..21: mol_type = other RNA
gagcaatgccatctggttcct

SEQ ID NO: 4915 - RNA, 21 nt, synthetic construct
  source 1..21: mol_type = other RNA
tcccaggcaaagacacccttt

SEQ ID NO: 4916 - RNA, 21 nt, synthetic construct
  source 1..21: mol_type = other RNA
ccttagctcacctttaatagt

SEQ ID NO: 4917 - RNA, 21 nt, synthetic construct
  source 1..21: mol_type = other RNA
acccactatgccttcctgtct

SEQ ID NO: 4918 - RNA, 21 nt, synthetic construct
  source 1..21: mol_type = other RNA
gtcctttctactcaatggtct

SEQ ID NO: 4919 - RNA, 21 nt, synthetic construct
  source 1..21: mol_type = other RNA
tccaagatgagttgacacaat

SEQ ID NO: 4920 - RNA, 21 nt, synthetic construct
  source 1..21: mol_type = other RNA
caatttttgtggatctccagt

SEQ ID NO: 4921 - RNA, 21 nt, synthetic construct
  source 1..21: mol_type = other RNA
tctttggattcaccaaagttt

SEQ ID NO: 4922 - RNA, 21 nt, synthetic construct
  source 1..21: mol_type = other RNA
tgcccaaaatagaggcttact

SEQ ID NO: 4923 - RNA, 21 nt, synthetic construct
  source 1..21: mol_type = other RNA
ctgtccttcttagttgtccat

SEQ ID NO: 4924 - RNA, 21 nt, synthetic construct
  source 1..21: mol_type = other RNA
gaactactaaagctctctttt

SEQ ID NO: 4925 - RNA, 21 nt, synthetic construct
  source 1..21: mol_type = other RNA
ctttgcataccttcatccatt

SEQ ID NO: 4926 - RNA, 21 nt, synthetic construct
  source 1..21: mol_type = other RNA
ccattttttgtccttctctgt

SEQ ID NO: 4927 - RNA, 21 nt, synthetic construct
  source 1..21: mol_type = other RNA
gcctttctctatgcccttaat

SEQ ID NO: 4928 - RNA, 21 nt, synthetic construct
  source 1..21: mol_type = other RNA
ttaagggctgacttgcctgat

SEQ ID NO: 4929 - RNA, 21 nt, synthetic construct
  source 1..21: mol_type = other RNA
tgagctctatcacctgagctt

SEQ ID NO: 4930 - RNA, 21 nt, synthetic construct
  source 1..21: mol_type = other RNA
tctggcttcctgctgaggtct

SEQ ID NO: 4931 - RNA, 21 nt, synthetic construct
  source 1..21: mol_type = other RNA
tttcttatccctgttccctct

SEQ ID NO: 4932 - RNA, 21 nt, synthetic construct
  source 1..21: mol_type = other RNA
tctgtctaggtgtcatggttt

SEQ ID NO: 4933 - RNA, 21 nt, synthetic construct
  source 1..21: mol_type = other RNA
tctgtgtaactgtggctattt

SEQ ID NO: 4934 - RNA, 21 nt, synthetic construct
  source 1..21: mol_type = other RNA
tattctgtgtccctacactat

SEQ ID NO: 4935 - RNA, 21 nt, synthetic construct
  source 1..21: mol_type = other RNA
gcctacattctgatataactt

SEQ ID NO: 4936 - RNA, 21 nt, synthetic construct
  source 1..21: mol_type = other RNA
cctaaaggctttctatcttgt

SEQ ID NO: 4937 - RNA, 21 nt, synthetic construct
  source 1..21: mol_type = other RNA
ctcaacatctcatactggttt

SEQ ID NO: 4938 - RNA, 21 nt, synthetic construct
  source 1..21: mol_type = other RNA
ggttcccttaactctgcctat

SEQ ID NO: 4939 - RNA, 21 nt, synthetic construct
  source 1..21: mol_type = other RNA
cctatacctctgtaaataatt

SEQ ID NO: 4940 - RNA, 21 nt, synthetic construct
  source 1..21: mol_type = other RNA
taattccttcactaagttctt

SEQ ID NO: 4941 - RNA, 21 nt, synthetic construct
  source 1..21: mol_type = other RNA
aaagtcctctatctcctacat

SEQ ID NO: 4942 - RNA, 21 nt, synthetic construct
  source 1..21: mol_type = other RNA
tacaagggccctaactggcat

SEQ ID NO: 4943 - RNA, 21 nt, synthetic construct
  source 1..21: mol_type = other RNA
cagatgacacagagcctgcct

SEQ ID NO: 4944 - RNA, 21 nt, synthetic construct
  source 1..21: mol_type = other RNA
ctgcttatgctgtagtctgct

SEQ ID NO: 4945 - RNA, 21 nt, synthetic construct
  source 1..21: mol_type = other RNA
actctgctgtctcttcacatt

SEQ ID NO: 4946 - RNA, 21 nt, synthetic construct
  source 1..21: mol_type = other RNA
atggtctcctcagaactgaat

SEQ ID NO: 4947 - RNA, 21 nt, synthetic construct
  source 1..21: mol_type = other RNA
aactattgtatccatctcact

SEQ ID NO: 4948 - RNA, 21 nt, synthetic construct
  source 1..21: mol_type = other RNA
tcacactttatgcctcttctt

SEQ ID NO: 4949 - RNA, 21 nt, synthetic construct
  source 1..21: mol_type = other RNA
atccttccagaaccatctttt

SEQ ID NO: 4950 - RNA, 21 nt, synthetic construct
  source 1..21: mol_type = other RNA
tttgaggtctcatggctaatt

SEQ ID NO: 4951 - RNA, 21 nt, synthetic construct
  source 1..21: mol_type = other RNA
taggctttacctgttccctct

SEQ ID NO: 4952 - RNA, 21 nt, synthetic construct
  source 1..21: mol_type = other RNA
tctgtaatccctccaaaagat

SEQ ID NO: 4953 - RNA, 21 nt, synthetic construct
  source 1..21: mol_type = other RNA
atgagacagatctatgcttgt

SEQ ID NO: 4954 - RNA, 21 nt, synthetic construct
  source 1..21: mol_type = other RNA
ttggtcatccagtaaactgat

SEQ ID NO: 4955 - RNA, 21 nt, synthetic construct
  source 1..21: mol_type = other RNA
gtgggcacgcaagtgtgggat

SEQ ID NO: 4956 - RNA, 21 nt, synthetic construct
  source 1..21: mol_type = other RNA
aggcatgctcagagctggctt

SEQ ID NO: 4957 - RNA, 21 nt, synthetic construct
  source 1..21: mol_type = other RNA
tctgacttgccttcctttcat

SEQ ID NO: 4958 - RNA, 21 nt, synthetic construct
  source 1..21: mol_type = other RNA
tgctccacccaggagtcctgt

SEQ ID NO: 4959 - RNA, 21 nt, synthetic construct
  source 1..21: mol_type = other RNA
ctggaagctggaatgggcaat

SEQ ID NO: 4960 - RNA, 21 nt, synthetic construct
  source 1..21: mol_type = other RNA
gggctgctggagtgggacagt

SEQ ID NO: 4961 - RNA, 21 nt, synthetic construct
  source 1..21: mol_type = other RNA
cagggagaagaggaaggcctt

SEQ ID NO: 4962 - RNA, 21 nt, synthetic construct
  source 1..21: mol_type = other RNA
gcctggatgaggagagggtgt

SEQ ID NO: 4963 - RNA, 21 nt, synthetic construct
  source 1..21: mol_type = other RNA
gtggcatttgctctgagactt

SEQ ID NO: 4964 - RNA, 21 nt, synthetic construct
  source 1..21: mol_type = other RNA
tgggtcctttttagacctttt

SEQ ID NO: 4965 - RNA, 21 nt, synthetic construct
  source 1..21: mol_type = other RNA
ctccctttggctggacagtct

SEQ ID NO: 4966 - RNA, 21 nt, synthetic construct
  source 1..21: mol_type = other RNA
tgaaccatgaggtcgataatt

SEQ ID NO: 4967 - RNA, 21 nt, synthetic construct
  source 1..21: mol_type = other RNA
tgtctgcagcccaaggccgat

SEQ ID NO: 4968 - RNA, 21 nt, synthetic construct
  source 1..21: mol_type = other RNA
cgagtttgcgcaaaacccatt

SEQ ID NO: 4969 - RNA, 21 nt, synthetic construct
  source 1..21: mol_type = other RNA
ccatgtgttctttggtaaact

SEQ ID NO: 4970 - RNA, 21 nt, synthetic construct
  source 1..21: mol_type = other RNA
cgtgatgtctgtgtttgctct

SEQ ID NO: 4971 - RNA, 21 nt, synthetic construct
  source 1..21: mol_type = other RNA
ctcctatgagggtaagaggtt

SEQ ID NO: 4972 - RNA, 21 nt, synthetic construct
  source 1..21: mol_type = other RNA
ccctgaaataggaaccctagt

SEQ ID NO: 4973 - RNA, 21 nt, synthetic construct
  source 1..21: mol_type = other RNA
ctagaggagaaagtctgaaat

SEQ ID NO: 4974 - RNA, 21 nt, synthetic construct
  source 1..21: mol_type = other RNA
gactgtaaatctgagcttgat

SEQ ID NO: 4975 - RNA, 21 nt, synthetic construct
  source 1..21: mol_type = other RNA
gagcaacccatggaagttatt

SEQ ID NO: 4976 - RNA, 21 nt, synthetic construct
  source 1..21: mol_type = other RNA
ccacctttgacttgaggagat

SEQ ID NO: 4977 - RNA, 21 nt, synthetic construct
  source 1..21: mol_type = other RNA
ccttcatctaaggagaatctt

SEQ ID NO: 4978 - RNA, 21 nt, synthetic construct
  source 1..21: mol_type = other RNA
ggaggccttctggtgtctcct

SEQ ID NO: 4979 - RNA, 21 nt, synthetic construct
  source 1..21: mol_type = other RNA
tcccaattacagcttagtctt

SEQ ID NO: 4980 - RNA, 21 nt, synthetic construct
  source 1..21: mol_type = other RNA
gtctccagggctaggactggt

SEQ ID NO: 4981 - RNA, 21 nt, synthetic construct
  source 1..21: mol_type = other RNA
aagcaaagtgagtcattcact

SEQ ID NO: 4982 - RNA, 21 nt, synthetic construct
  source 1..21: mol_type = other RNA
gtggtgaacaatttattaatt

SEQ ID NO: 4983 - RNA, 21 nt, synthetic construct
  source 1..21: mol_type = other RNA
taggactttaatgcaatattt

SEQ ID NO: 4984 - RNA, 21 nt, synthetic construct
  source 1..21: mol_type = other RNA
gaacaaaatagcctacttttt

SEQ ID NO: 4985 - RNA, 23 nt, synthetic construct
  source 1..23: mol_type = other RNA
actgccagaggccctggaagaag

SEQ ID NO: 4986 - RNA, 23 nt, synthetic construct
  source 1..23: mol_type = other RNA
agtggtctcaactctgtcctggc

SEQ ID NO: 4987 - RNA, 23 nt, synthetic construct
  source 1..23: mol_type = other RNA
atcagggtctcaacagctgtggt

SEQ ID NO: 4988 - RNA, 23 nt, synthetic construct
  source 1..23: mol_type = other RNA
attcttgagcaatacagactcag

SEQ ID NO: 4989 - RNA, 23 nt, synthetic construct
  source 1..23: mol_type = other RNA
acagaagcaatgaggaggtcatt

SEQ ID NO: 4990 - RNA, 23 nt, synthetic construct
  source 1..23: mol_type = other RNA
aagccaggaggagaaaggccaga

SEQ ID NO: 4991 - RNA, 23 nt, synthetic construct
  source 1..23: mol_type = other RNA
aagtggccactgtggttggagcc

SEQ ID NO: 4992 - RNA, 23 nt, synthetic construct
  source 1..23: mol_type = other RNA
aacatgctggacactgaccgcca

SEQ ID NO: 4993 - RNA, 23 nt, synthetic construct
  source 1..23: mol_type = other RNA
atggctctccagttccaaggtgg

SEQ ID NO: 4994 - RNA, 23 nt, synthetic construct
  source 1..23: mol_type = other RNA
agccagatcaagaagcagctccc

SEQ ID NO: 4995 - RNA, 23 nt, synthetic construct
  source 1..23: mol_type = other RNA
aagcttgtccaagatgcttctct

SEQ ID NO: 4996 - RNA, 23 nt, synthetic construct
  source 1..23: mol_type = other RNA
aacagggcggttcagtgttgggc

SEQ ID NO: 4997 - RNA, 23 nt, synthetic construct
  source 1..23: mol_type = other RNA
acagtcctcaaagcagctctgga

SEQ ID NO: 4998 - RNA, 23 nt, synthetic construct
  source 1..23: mol_type = other RNA
atggaggtgctgcagtgcagtcc

SEQ ID NO: 4999 - RNA, 23 nt, synthetic construct
  source 1..23: mol_type = other RNA
actgttgtcctctagaagtgccc

SEQ ID NO: 5000 - RNA, 23 nt, synthetic construct
  source 1..23: mol_type = other RNA
aatgatttcacattcctgttccc

SEQ ID NO: 5001 - RNA, 23 nt, synthetic construct
  source 1..23: mol_type = other RNA
actgtctcagcaaagctgatgat

SEQ ID NO: 5002 - RNA, 23 nt, synthetic construct
  source 1..23: mol_type = other RNA
aggttgatggtggagaggcctgt

SEQ ID NO: 5003 - RNA, 23 nt, synthetic construct
  source 1..23: mol_type = other RNA
aaaatcaagacgagtctggttga

SEQ ID NO: 5004 - RNA, 23 nt, synthetic construct
  source 1..23: mol_type = other RNA
aatcagaggagaagtgaaaatca

SEQ ID NO: 5005 - RNA, 23 nt, synthetic construct
  source 1..23: mol_type = other RNA
atgtcaccagcagttctatcaga

SEQ ID NO: 5006 - RNA, 23 nt, synthetic construct
  source 1..23: mol_type = other RNA
atgcacaaagaacatgagactgg

SEQ ID NO: 5007 - RNA, 23 nt, synthetic construct
  source 1..23: mol_type = other RNA
aggtattggaagggagctgcaca

SEQ ID NO: 5008 - RNA, 23 nt, synthetic construct
  source 1..23: mol_type = other RNA
actttcaaggtccaagtggtatt

SEQ ID NO: 5009 - RNA, 23 nt, synthetic construct
  source 1..23: mol_type = other RNA
aagcacaaggactctcactttca

SEQ ID NO: 5010 - RNA, 23 nt, synthetic construct
  source 1..23: mol_type = other RNA
agtgaggttggtattatgtggac

SEQ ID NO: 5011 - RNA, 23 nt, synthetic construct
  source 1..23: mol_type = other RNA
aagcaggtactgagtagccaagg

SEQ ID NO: 5012 - RNA, 23 nt, synthetic construct
  source 1..23: mol_type = other RNA
aactggcatccacctccagcagg

SEQ ID NO: 5013 - RNA, 23 nt, synthetic construct
  source 1..23: mol_type = other RNA
aggagttgatgccagccactggc

SEQ ID NO: 5014 - RNA, 23 nt, synthetic construct
  source 1..23: mol_type = other RNA
acaggcagcttgagcttcaggcc

SEQ ID NO: 5015 - RNA, 23 nt, synthetic construct
  source 1..23: mol_type = other RNA
atggccttcaagtaccagctcca

SEQ ID NO: 5016 - RNA, 23 nt, synthetic construct
  source 1..23: mol_type = other RNA
aaggatgactgagctctgggcta

SEQ ID NO: 5017 - RNA, 23 nt, synthetic construct
  source 1..23: mol_type = other RNA
accacaaaaggcctatgggcagc

SEQ ID NO: 5018 - RNA, 23 nt, synthetic construct
  source 1..23: mol_type = other RNA
aaactctcacccgggctgccaca

SEQ ID NO: 5019 - RNA, 23 nt, synthetic construct
  source 1..23: mol_type = other RNA
atcggtgaatctggtgtttgccc

SEQ ID NO: 5020 - RNA, 23 nt, synthetic construct
  source 1..23: mol_type = other RNA
acttggcagtcgatgcctcgtcg

SEQ ID NO: 5021 - RNA, 23 nt, synthetic construct
  source 1..23: mol_type = other RNA
agcacatcctggaccctccttgg

SEQ ID NO: 5022 - RNA, 23 nt, synthetic construct
  source 1..23: mol_type = other RNA
aaaaactcttgtcgacagcacat

SEQ ID NO: 5023 - RNA, 23 nt, synthetic construct
  source 1..23: mol_type = other RNA
atcacggaagtccacaaaaaact

SEQ ID NO: 5024 - RNA, 23 nt, synthetic construct
  source 1..23: mol_type = other RNA
agctggatgatccagtcgtgcca

SEQ ID NO: 5025 - RNA, 23 nt, synthetic construct
  source 1..23: mol_type = other RNA
actatgcagaagttcatggcgta

SEQ ID NO: 5026 - RNA, 23 nt, synthetic construct
  source 1..23: mol_type = other RNA
acctgctatgtgtagtgggcact

SEQ ID NO: 5027 - RNA, 23 nt, synthetic construct
  source 1..23: mol_type = other RNA
agcagcaataccaggcatgcctg

SEQ ID NO: 5028 - RNA, 23 nt, synthetic construct
  source 1..23: mol_type = other RNA
atgcagtgtgaaaggaggcagca

SEQ ID NO: 5029 - RNA, 23 nt, synthetic construct
  source 1..23: mol_type = other RNA
attgagaagattgagcactgcag

SEQ ID NO: 5030 - RNA, 23 nt, synthetic construct
  source 1..23: mol_type = other RNA
acctgcagctgtgttggccttga

SEQ ID NO: 5031 - RNA, 23 nt, synthetic construct
  source 1..23: mol_type = other RNA
acgtgggtacacagcatgagccc

SEQ ID NO: 5032 - RNA, 23 nt, synthetic construct
  source 1..23: mol_type = other RNA
atgtcataatagagcagagacag

SEQ ID NO: 5033 - RNA, 23 nt, synthetic construct
  source 1..23: mol_type = other RNA
aacaatgttgctgtccctgtcat

SEQ ID NO: 5034 - RNA, 23 nt, synthetic construct
  source 1..23: mol_type = other RNA
acaggtatgtcagtcttgacaat

SEQ ID NO: 5035 - RNA, 23 nt, synthetic construct
  source 1..23: mol_type = other RNA
agcctctactaccatgtcaggta

SEQ ID NO: 5036 - RNA, 23 nt, synthetic construct
  source 1..23: mol_type = other RNA
aataccacacatagactaactgc

SEQ ID NO: 5037 - RNA, 23 nt, synthetic construct
  source 1..23: mol_type = other RNA
agttttcccatgcaaccttgggc

SEQ ID NO: 5038 - RNA, 23 nt, synthetic construct
  source 1..23: mol_type = other RNA
atcaaggaagtgcacttctgtag

SEQ ID NO: 5039 - RNA, 23 nt, synthetic construct
  source 1..23: mol_type = other RNA
aatgaggtcattccctcctctca

SEQ ID NO: 5040 - RNA, 23 nt, synthetic construct
  source 1..23: mol_type = other RNA
aacattctggacagagaatgagg

SEQ ID NO: 5041 - RNA, 23 nt, synthetic construct
  source 1..23: mol_type = other RNA
actcaggaagagggagtccacat

SEQ ID NO: 5042 - RNA, 23 nt, synthetic construct
  source 1..23: mol_type = other RNA
agtaatttccataagatgctcag

SEQ ID NO: 5043 - RNA, 23 nt, synthetic construct
  source 1..23: mol_type = other RNA
agtttcttcaagtcaaaggtggg

SEQ ID NO: 5044 - RNA, 23 nt, synthetic construct
  source 1..23: mol_type = other RNA
agtgacttgctttagatgaaggt

SEQ ID NO: 5045 - RNA, 23 nt, synthetic construct
  source 1..23: mol_type = other RNA
atcaggaagatggcacagtgact

SEQ ID NO: 5046 - RNA, 23 nt, synthetic construct
  source 1..23: mol_type = other RNA
ataggaaagagggtagtggtcag

SEQ ID NO: 5047 - RNA, 23 nt, synthetic construct
  source 1..23: mol_type = other RNA
aggatggactagcgggatggact

SEQ ID NO: 5048 - RNA, 23 nt, synthetic construct
  source 1..23: mol_type = other RNA
agctcatggttggagatgggtct

SEQ ID NO: 5049 - RNA, 23 nt, synthetic construct
  source 1..23: mol_type = other RNA
aggaaccagatggcattgctcat

SEQ ID NO: 5050 - RNA, 23 nt, synthetic construct
  source 1..23: mol_type = other RNA
aaagggtgtctttgcctgggaac

SEQ ID NO: 5051 - RNA, 23 nt, synthetic construct
  source 1..23: mol_type = other RNA
actattaaaggtgagctaagggt

SEQ ID NO: 5052 - RNA, 23 nt, synthetic construct
  source 1..23: mol_type = other RNA
agacaggaaggcatagtgggtta

SEQ ID NO: 5053 - RNA, 23 nt, synthetic construct
  source 1..23: mol_type = other RNA
agaccattgagtagaaaggacag

SEQ ID NO: 5054 - RNA, 23 nt, synthetic construct
  source 1..23: mol_type = other RNA
attgtgtcaactcatcttggagt

SEQ ID NO: 5055 - RNA, 23 nt, synthetic construct
  source 1..23: mol_type = other RNA
actggagatccacaaaaattggg

SEQ ID NO: 5056 - RNA, 23 nt, synthetic construct
  source 1..23: mol_type = other RNA
aaactttggtgaatccaaagaag

SEQ ID NO: 5057 - RNA, 23 nt, synthetic construct
  source 1..23: mol_type = other RNA
agtaagcctctattttgggcagc

SEQ ID NO: 5058 - RNA, 23 nt, synthetic construct
  source 1..23: mol_type = other RNA
atggacaactaagaaggacaggg

SEQ ID NO: 5059 - RNA, 23 nt, synthetic construct
  source 1..23: mol_type = other RNA
aaaagagagctttagtagttcac

SEQ ID NO: 5060 - RNA, 23 nt, synthetic construct
  source 1..23: mol_type = other RNA
aatggatgaaggtatgcaaagag

SEQ ID NO: 5061 - RNA, 23 nt, synthetic construct
  source 1..23: mol_type = other RNA
acagagaaggacaaaaaatggat

SEQ ID NO: 5062 - RNA, 23 nt, synthetic construct
  source 1..23: mol_type = other RNA
attaagggcatagagaaaggcag

SEQ ID NO: 5063 - RNA, 23 nt, synthetic construct
  source 1..23: mol_type = other RNA
atcaggcaagtcagcccttaagg

SEQ ID NO: 5064 - RNA, 23 nt, synthetic construct
  source 1..23: mol_type = other RNA
aagctcaggtgatagagctcagg

SEQ ID NO: 5065 - RNA, 23 nt, synthetic construct
  source 1..23: mol_type = other RNA
agacctcagcaggaagccagagg

SEQ ID NO: 5066 - RNA, 23 nt, synthetic construct
  source 1..23: mol_type = other RNA
agagggaacagggataagaaatg

SEQ ID NO: 5067 - RNA, 23 nt, synthetic construct
  source 1..23: mol_type = other RNA
aaaccatgacacctagacagaga

SEQ ID NO: 5068 - RNA, 23 nt, synthetic construct
  source 1..23: mol_type = other RNA
aaatagccacagttacacagaac

SEQ ID NO: 5069 - RNA, 23 nt, synthetic construct
  source 1..23: mol_type = other RNA
atagtgtagggacacagaatagc

SEQ ID NO: 5070 - RNA, 23 nt, synthetic construct
  source 1..23: mol_type = other RNA
aagttatatcagaatgtaggcag

SEQ ID NO: 5071 - RNA, 23 nt, synthetic construct
  source 1..23: mol_type = other RNA
acaagatagaaagcctttaggac

SEQ ID NO: 5072 - RNA, 23 nt, synthetic construct
  source 1..23: mol_type = other RNA
aaaccagtatgagatgttgaggc

SEQ ID NO: 5073 - RNA, 23 nt, synthetic construct
  source 1..23: mol_type = other RNA
ataggcagagttaagggaaccag

SEQ ID NO: 5074 - RNA, 23 nt, synthetic construct
  source 1..23: mol_type = other RNA
aattatttacagaggtataggca

SEQ ID NO: 5075 - RNA, 23 nt, synthetic construct
  source 1..23: mol_type = other RNA
aagaacttagtgaaggaattatt

SEQ ID NO: 5076 - RNA, 23 nt, synthetic construct
  source 1..23: mol_type = other RNA
atgtaggagatagaggacttttc

SEQ ID NO: 5077 - RNA, 23 nt, synthetic construct
  source 1..23: mol_type = other RNA
atgccagttagggcccttgtagg

SEQ ID NO: 5078 - RNA, 23 nt, synthetic construct
  source 1..23: mol_type = other RNA
aggcaggctctgtgtcatctggg

SEQ ID NO: 5079 - RNA, 23 nt, synthetic construct
  source 1..23: mol_type = other RNA
agcagactacagcataagcaggc

SEQ ID NO: 5080 - RNA, 23 nt, synthetic construct
  source 1..23: mol_type = other RNA
aatgtgaagagacagcagagtag

SEQ ID NO: 5081 - RNA, 23 nt, synthetic construct
  source 1..23: mol_type = other RNA
attcagttctgaggagaccatgt

SEQ ID NO: 5082 - RNA, 23 nt, synthetic construct
  source 1..23: mol_type = other RNA
agtgagatggatacaatagttca

SEQ ID NO: 5083 - RNA, 23 nt, synthetic construct
  source 1..23: mol_type = other RNA
aagaagaggcataaagtgtgaga

SEQ ID NO: 5084 - RNA, 23 nt, synthetic construct
  source 1..23: mol_type = other RNA
aaaagatggttctggaaggatgg

SEQ ID NO: 5085 - RNA, 23 nt, synthetic construct
  source 1..23: mol_type = other RNA
aattagccatgagacctcaaaga

SEQ ID NO: 5086 - RNA, 23 nt, synthetic construct
  source 1..23: mol_type = other RNA
agagggaacaggtaaagcctagg

SEQ ID NO: 5087 - RNA, 23 nt, synthetic construct
  source 1..23: mol_type = other RNA
atcttttggagggattacagagg

SEQ ID NO: 5088 - RNA, 23 nt, synthetic construct
  source 1..23: mol_type = other RNA
acaagcatagatctgtctcatct

SEQ ID NO: 5089 - RNA, 23 nt, synthetic construct
  source 1..23: mol_type = other RNA
atcagtttactggatgaccaagc

SEQ ID NO: 5090 - RNA, 23 nt, synthetic construct
  source 1..23: mol_type = other RNA
atcccacacttgcgtgcccacag

SEQ ID NO: 5091 - RNA, 23 nt, synthetic construct
  source 1..23: mol_type = other RNA
aagccagctctgagcatgcctct

SEQ ID NO: 5092 - RNA, 23 nt, synthetic construct
  source 1..23: mol_type = other RNA
atgaaaggaaggcaagtcagagg

SEQ ID NO: 5093 - RNA, 23 nt, synthetic construct
  source 1..23: mol_type = other RNA
acaggactcctgggtggagcact

SEQ ID NO: 5094 - RNA, 23 nt, synthetic construct
  source 1..23: mol_type = other RNA
attgcccattccagcttccaggc

SEQ ID NO: 5095 - RNA, 23 nt, synthetic construct
  source 1..23: mol_type = other RNA
actgtcccactccagcagccctt

SEQ ID NO: 5096 - RNA, 23 nt, synthetic construct
  source 1..23: mol_type = other RNA
aaggccttcctcttctccctgtc

SEQ ID NO: 5097 - RNA, 23 nt, synthetic construct
  source 1..23: mol_type = other RNA
acaccctctcctcatccaggcct

SEQ ID NO: 5098 - RNA, 23 nt, synthetic construct
  source 1..23: mol_type = other RNA
aagtctcagagcaaatgccaccc

SEQ ID NO: 5099 - RNA, 23 nt, synthetic construct
  source 1..23: mol_type = other RNA
aaaaggtctaaaaaggacccagt

SEQ ID NO: 5100 - RNA, 23 nt, synthetic construct
  source 1..23: mol_type = other RNA
agactgtccagccaaagggagga

SEQ ID NO: 5101 - RNA, 23 nt, synthetic construct
  source 1..23: mol_type = other RNA
aattatcgacctcatggttcagg

SEQ ID NO: 5102 - RNA, 23 nt, synthetic construct
  source 1..23: mol_type = other RNA
atcggccttgggctgcagacatt

SEQ ID NO: 5103 - RNA, 23 nt, synthetic construct
  source 1..23: mol_type = other RNA
aatgggttttgcgcaaactcggc

SEQ ID NO: 5104 - RNA, 23 nt, synthetic construct
  source 1..23: mol_type = other RNA
agtttaccaaagaacacatgggt

SEQ ID NO: 5105 - RNA, 23 nt, synthetic construct
  source 1..23: mol_type = other RNA
agagcaaacacagacatcacgtt

SEQ ID NO: 5106 - RNA, 23 nt, synthetic construct
  source 1..23: mol_type = other RNA
aacctcttaccctcataggaggg

SEQ ID NO: 5107 - RNA, 23 nt, synthetic construct
  source 1..23: mol_type = other RNA
actagggttcctatttcagggac

SEQ ID NO: 5108 - RNA, 23 nt, synthetic construct
  source 1..23: mol_type = other RNA
atttcagactttctcctctaggg

SEQ ID NO: 5109 - RNA, 23 nt, synthetic construct
  source 1..23: mol_type = other RNA
atcaagctcagatttacagtccc

SEQ ID NO: 5110 - RNA, 23 nt, synthetic construct
  source 1..23: mol_type = other RNA
aataacttccatgggttgctcag

SEQ ID NO: 5111 - RNA, 23 nt, synthetic construct
  source 1..23: mol_type = other RNA
atctcctcaagtcaaaggtggga

SEQ ID NO: 5112 - RNA, 23 nt, synthetic construct
  source 1..23: mol_type = other RNA
aagattctccttagatgaaggtc

SEQ ID NO: 5113 - RNA, 23 nt, synthetic construct
  source 1..23: mol_type = other RNA
aggagacaccagaaggcctcctt

SEQ ID NO: 5114 - RNA, 23 nt, synthetic construct
  source 1..23: mol_type = other RNA
aagactaagctgtaattgggaag

SEQ ID NO: 5115 - RNA, 23 nt, synthetic construct
  source 1..23: mol_type = other RNA
accagtcctagccctggagacta

SEQ ID NO: 5116 - RNA, 23 nt, synthetic construct
  source 1..23: mol_type = other RNA
agtgaatgactcactttgcttta

SEQ ID NO: 5117 - RNA, 23 nt, synthetic construct
  source 1..23: mol_type = other RNA
aattaataaattgttcaccaccc

SEQ ID NO: 5118 - RNA, 23 nt, synthetic construct
  source 1..23: mol_type = other RNA
aaatattgcattaaagtcctatc

SEQ ID NO: 5119 - RNA, 23 nt, synthetic construct
  source 1..23: mol_type = other RNA
aaaaagtaggctattttgttcat

SEQ ID NO: 5120 - RNA, 21 nt, synthetic construct
  source 1..21: mol_type = other RNA
  modified_base 1: mod_base = OTHER; note = 2'-O-methyluridine-3'-phosphorothioate
  modified_base 2: mod_base = OTHER; note = 2'-O-methylcytidine-3'-phosphorothioate
  modified_base 3: mod_base = OTHER; note = 2'-O-methyluridine-3'-phosphate
  modified_base 4: mod_base = OTHER; note = 2'-O-methyluridine-3'-phosphate
  modified_base 5: mod_base = OTHER; note = 2'-O-methylcytidine-3'-phosphate
  modified_base 6: mod_base = OTHER; note = 2'-O-methylcytidine-3'-phosphate
  modified_base 7: mod_base = OTHER; note = 2'-fluoroadenosine-3'-phosphate
  modified_base 8: mod_base = OTHER; note = 2'-O-methylguanosine-3'-phosphate
  modified_base 9: mod_base = OTHER; note = 2'-fluoroguanosine-3'-phosphate
  modified_base 10: mod_base = OTHER; note = 2'-fluoroguanosine-3'-phosphate
  modified_base 11: mod_base = OTHER; note = 2'-fluorocytidine-3'-phosphate
  modified_base 12: mod_base = OTHER; note = 2'-O-methylcytidine-3'-phosphate
  modified_base 13: mod_base = OTHER; note = 2'-O-methyluridine-3'-phosphate
  modified_base 14: mod_base = OTHER; note = 2'-O-methylcytidine-3'-phosphate
  modified_base 15: mod_base = OTHER; note = 2'-O-methyluridine-3'-phosphate
  modified_base 16: mod_base = OTHER; note = 2'-O-methylguanosine-3'-phosphate
  modified_base 17: mod_base = OTHER; note = 2'-O-methylguanosine-3'-phosphate
  modified_base 18: mod_base = OTHER; note = 2'-O-methylcytidine-3'-phosphate
  modified_base 19: mod_base = OTHER; note = 2'-O-methyladenosine-3'-phosphate
  modified_base 20: mod_base = OTHER; note = 2'-O-methylguanosine-3'-phosphate
  modified_base 21: mod_base = OTHER; note = 2'-O-methyluridine-3'-phosphate N-[tris(GalNAc-alkyl)-amidodecanoyl)]-4-hydroxyprolinol (Hyp-(GalNAc-alkyl)3)
tcttccagggcctctggcagt

SEQ ID NO: 5121 - RNA, 21 nt, synthetic construct
  source 1..21: mol_type = other RNA
  modified_base 1: mod_base = OTHER; note = 2'-O-methylcytidine-3'-phosphorothioate
  modified_base 2: mod_base = OTHER; note = 2'-O-methyladenosine-3'-phosphorothioate
  modified_base 3: mod_base = OTHER; note = 2'-O-methylguanosine-3'-phosphate
  modified_base 4: mod_base = OTHER; note = 2'-O-methylguanosine-3'-phosphate
  modified_base 5: mod_base = OTHER; note = 2'-O-methyladenosine-3'-phosphate
  modified_base 6: mod_base = OTHER; note = 2'-O-methylcytidine-3'-phosphate
  modified_base 7: mod_base = OTHER; note = 2'-fluoroadenosine-3'-phosphate
  modified_base 8: mod_base = OTHER; note = 2'-O-methylguanosine-3'-phosphate
  modified_base 9: mod_base = OTHER; note = 2'-fluoroadenosine-3'-phosphate
  modified_base 10: mod_base = OTHER; note = 2'-fluoroguanosine-3'-phosphate
  modified_base 11: mod_base = OTHER; note = 2'-fluorouridine-3'-phosphate
  modified_base 12: mod_base = OTHER; note = 2'-O-methyluridine-3'-phosphate
  modified_base 13: mod_base = OTHER; note = 2'-O-methylguanosine-3'-phosphate
  modified_base 14: mod_base = OTHER; note = 2'-O-methyladenosine-3'-phosphate
  modified_base 15: mod_base = OTHER; note = 2'-O-methylguanosine-3'-phosphate
  modified_base 16: mod_base = OTHER; note = 2'-O-methyladenosine-3'-phosphate
  modified_base 17: mod_base = OTHER; note = 2'-O-methylcytidine-3'-phosphate
  modified_base 18: mod_base = OTHER; note = 2'-O-methylcytidine-3'-phosphate
  modified_base 19: mod_base = OTHER; note = 2'-O-methyladenosine-3'-phosphate
  modified_base 20: mod_base = OTHER; note = 2'-O-methylcytidine-3'-phosphate
  modified_base 21: mod_base = OTHER; note = 2'-O-methyluridine-3'-phosphate N-[tris(GalNAc-alkyl)-amidodecanoyl)]-4-hydroxyprolinol (Hyp-(GalNAc-alkyl)3)
caggacagagttgagaccact

SEQ ID NO: 5122 - RNA, 21 nt, synthetic construct
  source 1..21: mol_type = other RNA
  modified_base 1: mod_base = OTHER; note = 2'-O-methylcytidine-3'-phosphorothioate
  modified_base 2: mod_base = OTHER; note = 2'-O-methyladenosine-3'-phosphorothioate
  modified_base 3: mod_base = OTHER; note = 2'-O-methylcytidine-3'-phosphate
  modified_base 4: mod_base = OTHER; note = 2'-O-methyladenosine-3'-phosphate
  modified_base 5: mod_base = OTHER; note = 2'-O-methylguanosine-3'-phosphate
  modified_base 6: mod_base = OTHER; note = 2'-O-methylcytidine-3'-phosphate
  modified_base 7: mod_base = OTHER; note = 2'-fluorouridine-3'-phosphate
  modified_base 8: mod_base = OTHER; note = 2'-O-methylguanosine-3'-phosphate
  modified_base 9: mod_base = OTHER; note = 2'-fluorouridine-3'-phosphate
  modified_base 10: mod_base = OTHER; note = 2'-fluorouridine-3'-phosphate
  modified_base 11: mod_base = OTHER; note = 2'-fluoroguanosine-3'-phosphate
  modified_base 12: mod_base = OTHER; note = 2'-O-methyladenosine-3'-phosphate
  modified_base 13: mod_base = OTHER; note = 2'-O-methylguanosine-3'-phosphate
  modified_base 14: mod_base = OTHER; note = 2'-O-methyladenosine-3'-phosphate
  modified_base 15: mod_base = OTHER; note = 2'-O-methylcytidine-3'-phosphate
  modified_base 16: mod_base = OTHER; note = 2'-O-methylcytidine-3'-phosphate
  modified_base 17: mod_base = OTHER; note = 2'-O-methylcytidine-3'-phosphate
  modified_base 18: mod_base = OTHER; note = 2'-O-methyluridine-3'-phosphate
  modified_base 19: mod_base = OTHER; note = 2'-O-methylguanosine-3'-phosphate
  modified_base 20: mod_base = OTHER; note = 2'-O-methyladenosine-3'-phosphate
  modified_base 21: mod_base = OTHER; note = 2'-O-methyluridine-3'-phosphate N-[tris(GalNAc-alkyl)-amidodecanoyl)]-4-hydroxyprolinol (Hyp-(GalNAc-alkyl)3)
cacagctgttgagaccctgat

SEQ ID NO: 5123 - RNA, 21 nt, synthetic construct
  source 1..21: mol_type = other RNA
  modified_base 1: mod_base = OTHER; note = 2'-O-methylguanosine-3'-phosphorothioate
  modified_base 2: mod_base = OTHER; note = 2'-O-methyladenosine-3'-phosphorothioate
  modified_base 3: mod_base = OTHER; note = 2'-O-methylguanosine-3'-phosphate
  modified_base 4: mod_base = OTHER; note = 2'-O-methyluridine-3'-phosphate
  modified_base 5: mod_base = OTHER; note = 2'-O-methylcytidine-3'-phosphate
  modified_base 6: mod_base = OTHER; note = 2'-O-methyluridine-3'-phosphate
  modified_base 7: mod_base = OTHER; note = 2'-fluoroguanosine-3'-phosphate
  modified_base 8: mod_base = OTHER; note = 2'-O-methyluridine-3'-phosphate
  modified_base 9: mod_base = OTHER; note = 2'-fluoroadenosine-3'-phosphate
  modified_base 10: mod_base = OTHER; note = 2'-fluorouridine-3'-phosphate
  modified_base 11: mod_base = OTHER; note = 2'-fluorouridine-3'-phosphate
  modified_base 12: mod_base = OTHER; note = 2'-O-methylguanosine-3'-phosphate
  modified_base 13: mod_base = OTHER; note = 2'-O-methylcytidine-3'-phosphate
  modified_base 14: mod_base = OTHER; note = 2'-O-methyluridine-3'-phosphate
  modified_base 15: mod_base = OTHER; note = 2'-O-methylcytidine-3'-phosphate
  modified_base 16: mod_base = OTHER; note = 2'-O-methyladenosine-3'-phosphate
  modified_base 17: mod_base = OTHER; note = 2'-O-methyladenosine-3'-phosphate
  modified_base 18: mod_base = OTHER; note = 2'-O-methylguanosine-3'-phosphate
  modified_base 19: mod_base = OTHER; note = 2'-O-methyladenosine-3'-phosphate
  modified_base 20: mod_base = OTHER; note = 2'-O-methyladenosine-3'-phosphate
  modified_base 21: mod_base = OTHER; note = 2'-O-methyluridine-3'-phosphate N-[tris(GalNAc-alkyl)-amidodecanoyl)]-4-hydroxyprolinol (Hyp-(GalNAc-alkyl)3)
gagtctgtattgctcaagaat

SEQ ID NO: 5124 - RNA, 21 nt, synthetic construct
  source 1..21: mol_type = other RNA
  modified_base 1: mod_base = OTHER; note = 2'-O-methyluridine-3'-phosphorothioate
  modified_base 2: mod_base = OTHER; note = 2'-O-methylguanosine-3'-phosphorothioate
  modified_base 3: mod_base = OTHER; note = 2'-O-methyladenosine-3'-phosphate
  modified_base 4: mod_base = OTHER; note = 2'-O-methylcytidine-3'-phosphate
  modified_base 5: mod_base = OTHER; note = 2'-O-methylcytidine-3'-phosphate
  modified_base 6: mod_base = OTHER; note = 2'-O-methyluridine-3'-phosphate
  modified_base 7: mod_base = OTHER; note = 2'-fluorocytidine-3'-phosphate
  modified_base 8: mod_base = OTHER; note = 2'-O-methylcytidine-3'-phosphate
  modified_base 9: mod_base = OTHER; note = 2'-fluorouridine-3'-phosphate
  modified_base 10: mod_base = OTHER; note = 2'-fluorocytidine-3'-phosphate
  modified_base 11: mod_base = OTHER; note = 2'-fluoroadenosine-3'-phosphate
  modified_base 12: mod_base = OTHER; note = 2'-O-methyluridine-3'-phosphate
  modified_base 13: mod_base = OTHER; note = 2'-O-methyluridine-3'-phosphate
  modified_base 14: mod_base = OTHER; note = 2'-O-methylguanosine-3'-phosphate
  modified_base 15: mod_base = OTHER; note = 2'-O-methylcytidine-3'-phosphate
  modified_base 16: mod_base = OTHER; note = 2'-O-methyluridine-3'-phosphate
  modified_base 17: mod_base = OTHER; note = 2'-O-methyluridine-3'-phosphate
  modified_base 18: mod_base = OTHER; note = 2'-O-methylcytidine-3'-phosphate
  modified_base 19: mod_base = OTHER; note = 2'-O-methyluridine-3'-phosphate
  modified_base 20: mod_base = OTHER; note = 2'-O-methylguanosine-3'-phosphate
  modified_base 21: mod_base = OTHER; note = 2'-O-methyluridine-3'-phosphate N-[tris(GalNAc-alkyl)-amidodecanoyl)]-4-hydroxyprolinol (Hyp-(GalNAc-alkyl)3)
tgacctcctcattgcttctgt

SEQ ID NO: 5125 - RNA, 21 nt, synthetic construct
  source 1..21: mol_type = other RNA
  modified_base 1: mod_base = OTHER; note = 2'-O-methyluridine-3'-phosphorothioate
  modified_base 2: mod_base = OTHER; note = 2'-O-methylguanosine-3'-phosphorothioate
  modified_base 3: mod_base = OTHER; note = 2'-O-methylguanosine-3'-phosphate
  modified_base 4: mod_base = OTHER; note = 2'-O-methylcytidine-3'-phosphate
  modified_base 5: mod_base = OTHER; note = 2'-O-methylcytidine-3'-phosphate
  modified_base 6: mod_base = OTHER; note = 2'-O-methyluridine-3'-phosphate
  modified_base 7: mod_base = OTHER; note = 2'-fluorouridine-3'-phosphate
  modified_base 8: mod_base = OTHER; note = 2'-O-methyluridine-3'-phosphate
  modified_base 9: mod_base = OTHER; note = 2'-fluorocytidine-3'-phosphate
  modified_base 10: mod_base = OTHER; note = 2'-fluorouridine-3'-phosphate
  modified_base 11: mod_base = OTHER; note = 2'-fluorocytidine-3'-phosphate
  modified_base 12: mod_base = OTHER; note = 2'-O-methylcytidine-3'-phosphate
  modified_base 13: mod_base = OTHER; note = 2'-O-methyluridine-3'-phosphate
  modified_base 14: mod_base = OTHER; note = 2'-O-methylcytidine-3'-phosphate
  modified_base 15: mod_base = OTHER; note = 2'-O-methylcytidine-3'-phosphate
  modified_base 16: mod_base = OTHER; note = 2'-O-methyluridine-3'-phosphate
  modified_base 17: mod_base = OTHER; note = 2'-O-methylguanosine-3'-phosphate
  modified_base 18: mod_base = OTHER; note = 2'-O-methylguanosine-3'-phosphate
  modified_base 19: mod_base = OTHER; note = 2'-O-methylcytidine-3'-phosphate
  modified_base 20: mod_base = OTHER; note = 2'-O-methyluridine-3'-phosphate
  modified_base 21: mod_base = OTHER; note = 2'-O-methyluridine-3'-phosphate N-[tris(GalNAc-alkyl)-amidodecanoyl)]-4-hydroxyprolinol (Hyp-(GalNAc-alkyl)3)
tggcctttctcctcctggctt

SEQ ID NO: 5126 - RNA, 21 nt, synthetic construct
  source 1..21: mol_type = other RNA
  modified_base 1: mod_base = OTHER; note = 2'-O-methylcytidine-3'-phosphorothioate
  modified_base 2: mod_base = OTHER; note = 2'-O-methyluridine-3'-phosphorothioate
  modified_base 3: mod_base = OTHER; note = 2'-O-methylcytidine-3'-phosphate
  modified_base 4: mod_base = OTHER; note = 2'-O-methylcytidine-3'-phosphate
  modified_base 5: mod_base = OTHER; note = 2'-O-methyladenosine-3'-phosphate
  modified_base 6: mod_base = OTHER; note = 2'-O-methyladenosine-3'-phosphate
  modified_base 7: mod_base = OTHER; note = 2'-fluorocytidine-3'-phosphate
  modified_base 8: mod_base = OTHER; note = 2'-O-methylcytidine-3'-phosphate
  modified_base 9: mod_base = OTHER; note = 2'-fluoroadenosine-3'-phosphate
  modified_base 10: mod_base = OTHER; note = 2'-fluorocytidine-3'-phosphate
  modified_base 11: mod_base = OTHER; note = 2'-fluoroadenosine-3'-phosphate
  modified_base 12: mod_base = OTHER; note = 2'-O-methylguanosine-3'-phosphate
  modified_base 13: mod_base = OTHER; note = 2'-O-methyluridine-3'-phosphate
  modified_base 14: mod_base = OTHER; note = 2'-O-methylguanosine-3'-phosphate
  modified_base 15: mod_base = OTHER; note = 2'-O-methylguanosine-3'-phosphate
  modified_base 16: mod_base = OTHER; note = 2'-O-methylcytidine-3'-phosphate
  modified_base 17: mod_base = OTHER; note = 2'-O-methylcytidine-3'-phosphate
  modified_base 18: mod_base = OTHER; note = 2'-O-methyladenosine-3'-phosphate
  modified_base 19: mod_base = OTHER; note = 2'-O-methylcytidine-3'-phosphate
  modified_base 20: mod_base = OTHER; note = 2'-O-methyluridine-3'-phosphate
  modified_base 21: mod_base = OTHER; note = 2'-O-methyluridine-3'-phosphate N-[tris(GalNAc-alkyl)-amidodecanoyl)]-4-hydroxyprolinol (Hyp-(GalNAc-alkyl)3)
ctccaaccacagtggccactt

SEQ ID NO: 5127 - RNA, 21 nt, synthetic construct
  source 1..21: mol_type = other RNA
  modified_base 1: mod_base = OTHER; note = 2'-O-methylguanosine-3'-phosphorothioate
  modified_base 2: mod_base = OTHER; note = 2'-O-methylcytidine-3'-phosphorothioate
  modified_base 3: mod_base = OTHER; note = 2'-O-methylguanosine-3'-phosphate
  modified_base 4: mod_base = OTHER; note = 2'-O-methylguanosine-3'-phosphate
  modified_base 5: mod_base = OTHER; note = 2'-O-methyluridine-3'-phosphate
  modified_base 6: mod_base = OTHER; note = 2'-O-methylcytidine-3'-phosphate
  modified_base 7: mod_base = OTHER; note = 2'-fluoroadenosine-3'-phosphate
  modified_base 8: mod_base = OTHER; note = 2'-O-methylguanosine-3'-phosphate
  modified_base 9: mod_base = OTHER; note = 2'-fluorouridine-3'-phosphate
  modified_base 10: mod_base = OTHER; note = 2'-fluoroguanosine-3'-phosphate
  modified_base 11: mod_base = OTHER; note = 2'-fluorouridine-3'-phosphate
  modified_base 12: mod_base = OTHER; note = 2'-O-methylcytidine-3'-phosphate
  modified_base 13: mod_base = OTHER; note = 2'-O-methylcytidine-3'-phosphate
  modified_base 14: mod_base = OTHER; note = 2'-O-methyladenosine-3'-phosphate
  modified_base 15: mod_base = OTHER; note = 2'-O-methylguanosine-3'-phosphate
  modified_base 16: mod_base = OTHER; note = 2'-O-methylcytidine-3'-phosphate
  modified_base 17: mod_base = OTHER; note = 2'-O-methyladenosine-3'-phosphate
  modified_base 18: mod_base = OTHER; note = 2'-O-methyluridine-3'-phosphate
  modified_base 19: mod_base = OTHER; note = 2'-O-methylguanosine-3'-phosphate
  modified_base 20: mod_base = OTHER; note = 2'-O-methyluridine-3'-phosphate
  modified_base 21: mod_base = OTHER; note = 2'-O-methyluridine-3'-phosphate N-[tris(GalNAc-alkyl)-amidodecanoyl)]-4-hydroxyprolinol (Hyp-(GalNAc-alkyl)3)
gcggtcagtgtccagcatgtt

SEQ ID NO: 5128 - RNA, 21 nt, synthetic construct
  source 1..21: mol_type = other RNA
  modified_base 1: mod_base = OTHER; note = 2'-O-methyladenosine-3'-phosphorothioate
  modified_base 2: mod_base = OTHER; note = 2'-O-methylcytidine-3'-phosphorothioate
  modified_base 3: mod_base = OTHER; note = 2'-O-methylcytidine-3'-phosphate
  modified_base 4: mod_base = OTHER; note = 2'-O-methyluridine-3'-phosphate
  modified_base 5: mod_base = OTHER; note = 2'-O-methyluridine-3'-phosphate
  modified_base 6: mod_base = OTHER; note = 2'-O-methylguanosine-3'-phosphate
  modified_base 7: mod_base = OTHER; note = 2'-fluoroguanosine-3'-phosphate
  modified_base 8: mod_base = OTHER; note = 2'-O-methyladenosine-3'-phosphate
  modified_base 9: mod_base = OTHER; note = 2'-fluoroadenosine-3'-phosphate
  modified_base 10: mod_base = OTHER; note = 2'-fluorocytidine-3'-phosphate
  modified_base 11: mod_base = OTHER; note = 2'-fluorouridine-3'-phosphate
  modified_base 12: mod_base = OTHER; note = 2'-O-methylguanosine-3'-phosphate
  modified_base 13: mod_base = OTHER; note = 2'-O-methylguanosine-3'-phosphate
  modified_base 14: mod_base = OTHER; note = 2'-O-methyladenosine-3'-phosphate
  modified_base 15: mod_base = OTHER; note = 2'-O-methylguanosine-3'-phosphate
  modified_base 16: mod_base = OTHER; note = 2'-O-methyladenosine-3'-phosphate
  modified_base 17: mod_base = OTHER; note = 2'-O-methylguanosine-3'-phosphate
  modified_base 18: mod_base = OTHER; note = 2'-O-methylcytidine-3'-phosphate
  modified_base 19: mod_base = OTHER; note = 2'-O-methylcytidine-3'-phosphate
  modified_base 20: mod_base = OTHER; note = 2'-O-methyladenosine-3'-phosphate
  modified_base 21: mod_base = OTHER; note = 2'-O-methyluridine-3'-phosphate N-[tris(GalNAc-alkyl)-amidodecanoyl)]-4-hydroxyprolinol (Hyp-(GalNAc-alkyl)3)
accttggaactggagagccat

SEQ ID NO: 5129 - RNA, 21 nt, synthetic construct
  source 1..21: mol_type = other RNA
  modified_base 1: mod_base = OTHER; note = 2'-O-methylguanosine-3'-phosphorothioate
  modified_base 2: mod_base = OTHER; note = 2'-O-methyladenosine-3'-phosphorothioate
  modified_base 3: mod_base = OTHER; note = 2'-O-methylguanosine-3'-phosphate
  modified_base 4: mod_base = OTHER; note = 2'-O-methylcytidine-3'-phosphate
  modified_base 5: mod_base = OTHER; note = 2'-O-methyluridine-3'-phosphate
  modified_base 6: mod_base = OTHER; note = 2'-O-methylguanosine-3'-phosphate
  modified_base 7: mod_base = OTHER; note = 2'-fluorocytidine-3'-phosphate
  modified_base 8: mod_base = OTHER; note = 2'-O-methyluridine-3'-phosphate
  modified_base 9: mod_base = OTHER; note = 2'-fluorouridine-3'-phosphate
  modified_base 10: mod_base = OTHER; note = 2'-fluorocytidine-3'-phosphate
  modified_base 11: mod_base = OTHER; note = 2'-fluorouridine-3'-phosphate
  modified_base 12: mod_base = OTHER; note = 2'-O-methyluridine-3'-phosphate
  modified_base 13: mod_base = OTHER; note = 2'-O-methylguanosine-3'-phosphate
  modified_base 14: mod_base = OTHER; note = 2'-O-methyladenosine-3'-phosphate
  modified_base 15: mod_base = OTHER; note = 2'-O-methyluridine-3'-phosphate
  modified_base 16: mod_base = OTHER; note = 2'-O-methylcytidine-3'-phosphate
  modified_base 17: mod_base = OTHER; note = 2'-O-methyluridine-3'-phosphate
  modified_base 18: mod_base = OTHER; note = 2'-O-methylguanosine-3'-phosphate
  modified_base 19: mod_base = OTHER; note = 2'-O-methylguanosine-3'-phosphate
  modified_base 20: mod_base = OTHER; note = 2'-O-methylcytidine-3'-phosphate
  modified_base 21: mod_base = OTHER; note = 2'-O-methyluridine-3'-phosphate N-[tris(GalNAc-alkyl)-amidodecanoyl)]-4-hydroxyprolinol (Hyp-(GalNAc-alkyl)3)
gagctgcttcttgatctggct

SEQ ID NO: 5130 - RNA, 21 nt, synthetic construct
  source 1..21: mol_type = other RNA
  modified_base 1: mod_base = OTHER; note = 2'-O-methyladenosine-3'-phosphorothioate
  modified_base 2: mod_base = OTHER; note = 2'-O-methylguanosine-3'-phosphorothioate
  modified_base 3: mod_base = OTHER; note = 2'-O-methyladenosine-3'-phosphate
  modified_base 4: mod_base = OTHER; note = 2'-O-methyladenosine-3'-phosphate
  modified_base 5: mod_base = OTHER; note = 2'-O-methylguanosine-3'-phosphate
  modified_base 6: mod_base = OTHER; note = 2'-O-methylcytidine-3'-phosphate
  modified_base 7: mod_base = OTHER; note = 2'-fluoroadenosine-3'-phosphate
  modified_base 8: mod_base = OTHER; note = 2'-O-methyluridine-3'-phosphate
  modified_base 9: mod_base = OTHER; note = 2'-fluorocytidine-3'-phosphate
  modified_base 10: mod_base = OTHER; note = 2'-fluorouridine-3'-phosphate
  modified_base 11: mod_base = OTHER; note = 2'-fluorouridine-3'-phosphate
  modified_base 12: mod_base = OTHER; note = 2'-O-methylguanosine-3'-phosphate
  modified_base 13: mod_base = OTHER; note = 2'-O-methylguanosine-3'-phosphate
  modified_base 14: mod_base = OTHER; note = 2'-O-methyladenosine-3'-phosphate
  modified_base 15: mod_base = OTHER; note = 2'-O-methylcytidine-3'-phosphate
  modified_base 16: mod_base = OTHER; note = 2'-O-methyladenosine-3'-phosphate
  modified_base 17: mod_base = OTHER; note = 2'-O-methyladenosine-3'-phosphate
  modified_base 18: mod_base = OTHER; note = 2'-O-methylguanosine-3'-phosphate
  modified_base 19: mod_base = OTHER; note = 2'-O-methylcytidine-3'-phosphate
  modified_base 20: mod_base = OTHER; note = 2'-O-methyluridine-3'-phosphate
  modified_base 21: mod_base = OTHER; note = 2'-O-methyluridine-3'-phosphate N-[tris(GalNAc-alkyl)-amidodecanoyl)]-4-hydroxyprolinol (Hyp-(GalNAc-alkyl)3)
agaagcatcttggacaagctt

SEQ ID NO: 5131 - RNA, 21 nt, synthetic construct
  source 1..21: mol_type = other RNA
  modified_base 1: mod_base = OTHER; note = 2'-O-methylcytidine-3'-phosphorothioate
  modified_base 2: mod_base = OTHER; note = 2'-O-methylcytidine-3'-phosphorothioate
  modified_base 3: mod_base = OTHER; note = 2'-O-methyladenosine-3'-phosphate
  modified_base 4: mod_base = OTHER; note = 2'-O-methyladenosine-3'-phosphate
  modified_base 5: mod_base = OTHER; note = 2'-O-methylcytidine-3'-phosphate
  modified_base 6: mod_base = OTHER; note = 2'-O-methyladenosine-3'-phosphate
  modified_base 7: mod_base = OTHER; note = 2'-fluorocytidine-3'-phosphate
  modified_base 8: mod_base = OTHER; note = 2'-O-methyluridine-3'-phosphate
  modified_base 9: mod_base = OTHER; note = 2'-fluoroguanosine-3'-phosphate
  modified_base 10: mod_base = OTHER; note = 2'-fluoroadenosine-3'-phosphate
  modified_base 11: mod_base = OTHER; note = 2'-fluoroadenosine-3'-phosphate
  modified_base 12: mod_base = OTHER; note = 2'-O-methylcytidine-3'-phosphate
  modified_base 13: mod_base = OTHER; note = 2'-O-methylcytidine-3'-phosphate
  modified_base 14: mod_base = OTHER; note = 2'-O-methylguanosine-3'-phosphate
  modified_base 15: mod_base = OTHER; note = 2'-O-methylcytidine-3'-phosphate
  modified_base 16: mod_base = OTHER; note = 2'-O-methylcytidine-3'-phosphate
  modified_base 17: mod_base = OTHER; note = 2'-O-methylcytidine-3'-phosphate
  modified_base 18: mod_base = OTHER; note = 2'-O-methyluridine-3'-phosphate
  modified_base 19: mod_base = OTHER; note = 2'-O-methylguanosine-3'-phosphate
  modified_base 20: mod_base = OTHER; note = 2'-O-methyluridine-3'-phosphate
  modified_base 21: mod_base = OTHER; note = 2'-O-methyluridine-3'-phosphate N-[tris(GalNAc-alkyl)-amidodecanoyl)]-4-hydroxyprolinol (Hyp-(GalNAc-alkyl)3)
ccaacactgaaccgccctgtt

SEQ ID NO: 5132 - RNA, 21 nt, synthetic construct
  source 1..21: mol_type = other RNA
  modified_base 1: mod_base = OTHER; note = 2'-O-methylcytidine-3'-phosphorothioate
  modified_base 2: mod_base = OTHER; note = 2'-O-methyladenosine-3'-phosphorothioate
  modified_base 3: mod_base = OTHER; note = 2'-O-methylguanosine-3'-phosphate
  modified_base 4: mod_base = OTHER; note = 2'-O-methyladenosine-3'-phosphate
  modified_base 5: mod_base = OTHER; note = 2'-O-methylguanosine-3'-phosphate
  modified_base 6: mod_base = OTHER; note = 2'-O-methylcytidine-3'-phosphate
  modified_base 7: mod_base = OTHER; note = 2'-fluorouridine-3'-phosphate
  modified_base 8: mod_base = OTHER; note = 2'-O-methylguanosine-3'-phosphate
  modified_base 9: mod_base = OTHER; note = 2'-fluorocytidine-3'-phosphate
  modified_base 10: mod_base = OTHER; note = 2'-fluorouridine-3'-phosphate
  modified_base 11: mod_base = OTHER; note = 2'-fluorouridine-3'-phosphate
  modified_base 12: mod_base = OTHER; note = 2'-O-methyluridine-3'-phosphate
  modified_base 13: mod_base = OTHER; note = 2'-O-methylguanosine-3'-phosphate
  modified_base 14: mod_base = OTHER; note = 2'-O-methyladenosine-3'-phosphate
  modified_base 15: mod_base = OTHER; note = 2'-O-methylguanosine-3'-phosphate
  modified_base 16: mod_base = OTHER; note = 2'-O-methylguanosine-3'-phosphate
  modified_base 17: mod_base = OTHER; note = 2'-O-methyladenosine-3'-phosphate
  modified_base 18: mod_base = OTHER; note = 2'-O-methylcytidine-3'-phosphate
  modified_base 19: mod_base = OTHER; note = 2'-O-methyluridine-3'-phosphate
  modified_base 20: mod_base = OTHER; note = 2'-O-methylguanosine-3'-phosphate
  modified_base 21: mod_base = OTHER; note = 2'-O-methyluridine-3'-phosphate N-[tris(GalNAc-alkyl)-amidodecanoyl)]-4-hydroxyprolinol (Hyp-(GalNAc-alkyl)3)
cagagctgctttgaggactgt

SEQ ID NO: 5133 - RNA, 21 nt, synthetic construct
  source 1..21: mol_type = other RNA
  modified_base 1: mod_base = OTHER; note = 2'-O-methyladenosine-3'-phosphorothioate
  modified_base 2: mod_base = OTHER; note = 2'-O-methylcytidine-3'-phosphorothioate
  modified_base 3: mod_base = OTHER; note = 2'-O-methyluridine-3'-phosphate
  modified_base 4: mod_base = OTHER; note = 2'-O-methylguanosine-3'-phosphate
  modified_base 5: mod_base = OTHER; note = 2'-O-methylcytidine-3'-phosphate
  modified_base 6: mod_base = OTHER; note = 2'-O-methyladenosine-3'-phosphate
  modified_base 7: mod_base = OTHER; note = 2'-fluorocytidine-3'-phosphate
  modified_base 8: mod_base = OTHER; note = 2'-O-methyluridine-3'-phosphate
  modified_base 9: mod_base = OTHER; note = 2'-fluoroguanosine-3'-phosphate
  modified_base 10: mod_base = OTHER; note = 2'-fluorocytidine-3'-phosphate
  modified_base 11: mod_base = OTHER; note = 2'-fluoroadenosine-3'-phosphate
  modified_base 12: mod_base = OTHER; note = 2'-O-methylguanosine-3'-phosphate
  modified_base 13: mod_base = OTHER; note = 2'-O-methylcytidine-3'-phosphate
  modified_base 14: mod_base = OTHER; note = 2'-O-methyladenosine-3'-phosphate
  modified_base 15: mod_base = OTHER; note = 2'-O-methylcytidine-3'-phosphate
  modified_base 16: mod_base = OTHER; note = 2'-O-methylcytidine-3'-phosphate
  modified_base 17: mod_base = OTHER; note = 2'-O-methyluridine-3'-phosphate
  modified_base 18: mod_base = OTHER; note = 2'-O-methylcytidine-3'-phosphate
  modified_base 19: mod_base = OTHER; note = 2'-O-methylcytidine-3'-phosphate
  modified_base 20: mod_base = OTHER; note = 2'-O-methyladenosine-3'-phosphate
  modified_base 21: mod_base = OTHER; note = 2'-O-methyluridine-3'-phosphate N-[tris(GalNAc-alkyl)-amidodecanoyl)]-4-hydroxyprolinol (Hyp-(GalNAc-alkyl)3)
actgcactgcagcacctccat

SEQ ID NO: 5134 - RNA, 21 nt, synthetic construct
  source 1..21: mol_type = other RNA
  modified_base 1: mod_base = OTHER; note = 2'-O-methylguanosine-3'-phosphorothioate
  modified_base 2: mod_base = OTHER; note = 2'-O-methylcytidine-3'-phosphorothioate
  modified_base 3: mod_base = OTHER; note = 2'-O-methyladenosine-3'-phosphate
  modified_base 4: mod_base = OTHER; note = 2'-O-methylcytidine-3'-phosphate
  modified_base 5: mod_base = OTHER; note = 2'-O-methyluridine-3'-phosphate
  modified_base 6: mod_base = OTHER; note = 2'-O-methyluridine-3'-phosphate
  modified_base 7: mod_base = OTHER; note = 2'-fluorocytidine-3'-phosphate
  modified_base 8: mod_base = OTHER; note = 2'-O-methyluridine-3'-phosphate
  modified_base 9: mod_base = OTHER; note = 2'-fluoroadenosine-3'-phosphate
  modified_base 10: mod_base = OTHER; note = 2'-fluoroguanosine-3'-phosphate
  modified_base 11: mod_base = OTHER; note = 2'-fluoroadenosine-3'-phosphate
  modified_base 12: mod_base = OTHER; note = 2'-O-methylguanosine-3'-phosphate
  modified_base 13: mod_base = OTHER; note = 2'-O-methylguanosine-3'-phosphate
  modified_base 14: mod_base = OTHER; note = 2'-O-methyladenosine-3'-phosphate
  modified_base 15: mod_base = OTHER; note = 2'-O-methylcytidine-3'-phosphate
  modified_base 16: mod_base = OTHER; note = 2'-O-methyladenosine-3'-phosphate
  modified_base 17: mod_base = OTHER; note = 2'-O-methyladenosine-3'-phosphate
  modified_base 18: mod_base = OTHER; note = 2'-O-methylcytidine-3'-phosphate
  modified_base 19: mod_base = OTHER; note = 2'-O-methyladenosine-3'-phosphate
  modified_base 20: mod_base = OTHER; note = 2'-O-methylguanosine-3'-phosphate
  modified_base 21: mod_base = OTHER; note = 2'-O-methyluridine-3'-phosphate N-[tris(GalNAc-alkyl)-amidodecanoyl)]-4-hydroxyprolinol (Hyp-(GalNAc-alkyl)3)
gcacttctagaggacaacagt

SEQ ID NO: 5135 - RNA, 21 nt, synthetic construct
  source 1..21: mol_type = other RNA
  modified_base 1: mod_base = OTHER; note = 2'-O-methylguanosine-3'-phosphorothioate
  modified_base 2: mod_base = OTHER; note = 2'-O-methyladenosine-3'-phosphorothioate
  modified_base 3: mod_base = OTHER; note = 2'-O-methyladenosine-3'-phosphate
  modified_base 4: mod_base = OTHER; note = 2'-O-methylcytidine-3'-phosphate
  modified_base 5: mod_base = OTHER; note = 2'-O-methyladenosine-3'-phosphate
  modified_base 6: mod_base = OTHER; note = 2'-O-methylguanosine-3'-phosphate
  modified_base 7: mod_base = OTHER; note = 2'-fluoroguanosine-3'-phosphate
  modified_base 8: mod_base = OTHER; note = 2'-O-methyladenosine-3'-phosphate
  modified_base 9: mod_base = OTHER; note = 2'-fluoroadenosine-3'-phosphate
  modified_base 10: mod_base = OTHER; note = 2'-fluorouridine-3'-phosphate
  modified_base 11: mod_base = OTHER; note = 2'-fluoroguanosine-3'-phosphate
  modified_base 12: mod_base = OTHER; note = 2'-O-methyluridine-3'-phosphate
  modified_base 13: mod_base = OTHER; note = 2'-O-methylguanosine-3'-phosphate
  modified_base 14: mod_base = OTHER; note = 2'-O-methyladenosine-3'-phosphate
  modified_base 15: mod_base = OTHER; note = 2'-O-methyladenosine-3'-phosphate
  modified_base 16: mod_base = OTHER; note = 2'-O-methyladenosine-3'-phosphate
  modified_base 17: mod_base = OTHER; note = 2'-O-methyluridine-3'-phosphate
  modified_base 18: mod_base = OTHER; note = 2'-O-methylcytidine-3'-phosphate
  modified_base 19: mod_base = OTHER; note = 2'-O-methyladenosine-3'-phosphate
  modified_base 20: mod_base = OTHER; note = 2'-O-methyluridine-3'-phosphate
  modified_base 21: mod_base = OTHER; note = 2'-O-methyluridine-3'-phosphate N-[tris(GalNAc-alkyl)-amidodecanoyl)]-4-hydroxyprolinol (Hyp-(GalNAc-alkyl)3)
gaacaggaatgtgaaatcatt

SEQ ID NO: 5136 - RNA, 21 nt, synthetic construct
  source 1..21: mol_type = other RNA
  modified_base 1: mod_base = OTHER; note = 2'-O-methylcytidine-3'-phosphorothioate
  modified_base 2: mod_base = OTHER; note = 2'-O-methyladenosine-3'-phosphorothioate
  modified_base 3: mod_base = OTHER; note = 2'-O-methyluridine-3'-phosphate
  modified_base 4: mod_base = OTHER; note = 2'-O-methylcytidine-3'-phosphate
  modified_base 5: mod_base = OTHER; note = 2'-O-methyladenosine-3'-phosphate
  modified_base 6: mod_base = OTHER; note = 2'-O-methylguanosine-3'-phosphate
  modified_base 7: mod_base = OTHER; note = 2'-fluorocytidine-3'-phosphate
  modified_base 8: mod_base = OTHER; note = 2'-O-methyluridine-3'-phosphate
  modified_base 9: mod_base = OTHER; note = 2'-fluorouridine-3'-phosphate
  modified_base 10: mod_base = OTHER; note = 2'-fluorouridine-3'-phosphate
  modified_base 11: mod_base = OTHER; note = 2'-fluoroguanosine-3'-phosphate
  modified_base 12: mod_base = OTHER; note = 2'-O-methylcytidine-3'-phosphate
  modified_base 13: mod_base = OTHER; note = 2'-O-methyluridine-3'-phosphate
  modified_base 14: mod_base = OTHER; note = 2'-O-methylguanosine-3'-phosphate
  modified_base 15: mod_base = OTHER; note = 2'-O-methyladenosine-3'-phosphate
  modified_base 16: mod_base = OTHER; note = 2'-O-methylguanosine-3'-phosphate
  modified_base 17: mod_base = OTHER; note = 2'-O-methyladenosine-3'-phosphate
  modified_base 18: mod_base = OTHER; note = 2'-O-methylcytidine-3'-phosphate
  modified_base 19: mod_base = OTHER; note = 2'-O-methyladenosine-3'-phosphate
  modified_base 20: mod_base = OTHER; note = 2'-O-methylguanosine-3'-phosphate
  modified_base 21: mod_base = OTHER; note = 2'-O-methyluridine-3'-phosphate N-[tris(GalNAc-alkyl)-amidodecanoyl)]-4-hydroxyprolinol (Hyp-(GalNAc-alkyl)3)
catcagctttgctgagacagt

SEQ ID NO: 5137 - RNA, 21 nt, synthetic construct
  source 1..21: mol_type = other RNA
  modified_base 1: mod_base = OTHER; note = 2'-O-methyladenosine-3'-phosphorothioate
  modified_base 2: mod_base = OTHER; note = 2'-O-methylguanosine-3'-phosphorothioate
  modified_base 3: mod_base = OTHER; note = 2'-O-methylguanosine-3'-phosphate
  modified_base 4: mod_base = OTHER; note = 2'-O-methylcytidine-3'-phosphate
  modified_base 5: mod_base = OTHER; note = 2'-O-methylcytidine-3'-phosphate
  modified_base 6: mod_base = OTHER; note = 2'-O-methyluridine-3'-phosphate
  modified_base 7: mod_base = OTHER; note = 2'-fluorocytidine-3'-phosphate
  modified_base 8: mod_base = OTHER; note = 2'-O-methyluridine-3'-phosphate
  modified_base 9: mod_base = OTHER; note = 2'-fluorocytidine-3'-phosphate
  modified_base 10: mod_base = OTHER; note = 2'-fluorocytidine-3'-phosphate
  modified_base 11: mod_base = OTHER; note = 2'-fluoroadenosine-3'-phosphate
  modified_base 12: mod_base = OTHER; note = 2'-O-methylcytidine-3'-phosphate
  modified_base 13: mod_base = OTHER; note = 2'-O-methylcytidine-3'-phosphate
  modified_base 14: mod_base = OTHER; note = 2'-O-methyladenosine-3'-phosphate
  modified_base 15: mod_base = OTHER; note = 2'-O-methyluridine-3'-phosphate
  modified_base 16: mod_base = OTHER; note = 2'-O-methylcytidine-3'-phosphate
  modified_base 17: mod_base = OTHER; note = 2'-O-methyladenosine-3'-phosphate
  modified_base 18: mod_base = OTHER; note = 2'-O-methyladenosine-3'-phosphate
  modified_base 19: mod_base = OTHER; note = 2'-O-methylcytidine-3'-phosphate
  modified_base 20: mod_base = OTHER; note = 2'-O-methylcytidine-3'-phosphate
  modified_base 21: mod_base = OTHER; note = 2'-O-methyluridine-3'-phosphate N-[tris(GalNAc-alkyl)-amidodecanoyl)]-4-hydroxyprolinol (Hyp-(GalNAc-alkyl)3)
aggcctctccaccatcaacct

SEQ ID NO: 5138 - RNA, 21 nt, synthetic construct
  source 1..21: mol_type = other RNA
  modified_base 1: mod_base = OTHER; note = 2'-O-methyladenosine-3'-phosphorothioate
  modified_base 2: mod_base = OTHER; note = 2'-O-methyladenosine-3'-phosphorothioate
  modified_base 3: mod_base = OTHER; note = 2'-O-methylcytidine-3'-phosphate
  modified_base 4: mod_base = OTHER; note = 2'-O-methylcytidine-3'-phosphate
  modified_base 5: mod_base = OTHER; note = 2'-O-methyladenosine-3'-phosphate
  modified_base 6: mod_base = OTHER; note = 2'-O-methylguanosine-3'-phosphate
  modified_base 7: mod_base = OTHER; note = 2'-fluoroadenosine-3'-phosphate
  modified_base 8: mod_base = OTHER; note = 2'-O-methylcytidine-3'-phosphate
  modified_base 9: mod_base = OTHER; note = 2'-fluorouridine-3'-phosphate
  modified_base 10: mod_base = OTHER; note = 2'-fluorocytidine-3'-phosphate
  modified_base 11: mod_base = OTHER; note = 2'-fluoroguanosine-3'-phosphate
  modified_base 12: mod_base = OTHER; note = 2'-O-methyluridine-3'-phosphate
  modified_base 13: mod_base = OTHER; note = 2'-O-methylcytidine-3'-phosphate
  modified_base 14: mod_base = OTHER; note = 2'-O-methyluridine-3'-phosphate
  modified_base 15: mod_base = OTHER; note = 2'-O-methyluridine-3'-phosphate
  modified_base 16: mod_base = OTHER; note = 2'-O-methylguanosine-3'-phosphate
  modified_base 17: mod_base = OTHER; note = 2'-O-methyladenosine-3'-phosphate
  modified_base 18: mod_base = OTHER; note = 2'-O-methyluridine-3'-phosphate
  modified_base 19: mod_base = OTHER; note = 2'-O-methyluridine-3'-phosphate
  modified_base 20: mod_base = OTHER; note = 2'-O-methyluridine-3'-phosphate
  modified_base 21: mod_base = OTHER; note = 2'-O-methyluridine-3'-phosphate N-[tris(GalNAc-alkyl)-amidodecanoyl)]-4-hydroxyprolinol (Hyp-(GalNAc-alkyl)3)
aaccagactcgtcttgatttt

SEQ ID NO: 5139 - RNA, 21 nt, synthetic construct
  source 1..21: mol_type = other RNA
  modified_base 1: mod_base = OTHER; note = 2'-O-methyladenosine-3'-phosphorothioate
  modified_base 2: mod_base = OTHER; note = 2'-O-methyluridine-3'-phosphorothioate
  modified_base 3: mod_base = OTHER; note = 2'-O-methyluridine-3'-phosphate
  modified_base 4: mod_base = OTHER; note = 2'-O-methyluridine-3'-phosphate
  modified_base 5: mod_base = OTHER; note = 2'-O-methyluridine-3'-phosphate
  modified_base 6: mod_base = OTHER; note = 2'-O-methylcytidine-3'-phosphate
  modified_base 7: mod_base = OTHER; note = 2'-fluoroadenosine-3'-phosphate
  modified_base 8: mod_base = OTHER; note = 2'-O-methylcytidine-3'-phosphate
  modified_base 9: mod_base = OTHER; note = 2'-fluorouridine-3'-phosphate
  modified_base 10: mod_base = OTHER; note = 2'-fluorouridine-3'-phosphate
  modified_base 11: mod_base = OTHER; note = 2'-fluorocytidine-3'-phosphate
  modified_base 12: mod_base = OTHER; note = 2'-O-methyluridine-3'-phosphate
  modified_base 13: mod_base = OTHER; note = 2'-O-methylcytidine-3'-phosphate
  modified_base 14: mod_base = OTHER; note = 2'-O-methylcytidine-3'-phosphate
  modified_base 15: mod_base = OTHER; note = 2'-O-methyluridine-3'-phosphate
  modified_base 16: mod_base = OTHER; note = 2'-O-methylcytidine-3'-phosphate
  modified_base 17: mod_base = OTHER; note = 2'-O-methyluridine-3'-phosphate
  modified_base 18: mod_base = OTHER; note = 2'-O-methylguanosine-3'-phosphate
  modified_base 19: mod_base = OTHER; note = 2'-O-methyladenosine-3'-phosphate
  modified_base 20: mod_base = OTHER; note = 2'-O-methyluridine-3'-phosphate
  modified_base 21: mod_base = OTHER; note = 2'-O-methyluridine-3'-phosphate N-[tris(GalNAc-alkyl)-amidodecanoyl)]-4-hydroxyprolinol (Hyp-(GalNAc-alkyl)3)
attttcacttctcctctgatt

SEQ ID NO: 5140 - RNA, 21 nt, synthetic construct
  source 1..21: mol_type = other RNA
  modified_base 1: mod_base = OTHER; note = 2'-O-methyluridine-3'-phosphorothioate
  modified_base 2: mod_base = OTHER; note = 2'-O-methylguanosine-3'-phosphorothioate
  modified_base 3: mod_base = OTHER; note = 2'-O-methyladenosine-3'-phosphate
  modified_base 4: mod_base = OTHER; note = 2'-O-methyluridine-3'-phosphate
  modified_base 5: mod_base = OTHER; note = 2'-O-methyladenosine-3'-phosphate
  modified_base 6: mod_base = OTHER; note = 2'-O-methylguanosine-3'-phosphate
  modified_base 7: mod_base = OTHER; note = 2'-fluoroadenosine-3'-phosphate
  modified_base 8: mod_base = OTHER; note = 2'-O-methyladenosine-3'-phosphate
  modified_base 9: mod_base = OTHER; note = 2'-fluorocytidine-3'-phosphate
  modified_base 10: mod_base = OTHER; note = 2'-fluorouridine-3'-phosphate
  modified_base 11: mod_base = OTHER; note = 2'-fluoroguanosine-3'-phosphate
  modified_base 12: mod_base = OTHER; note = 2'-O-methylcytidine-3'-phosphate
  modified_base 13: mod_base = OTHER; note = 2'-O-methyluridine-3'-phosphate
  modified_base 14: mod_base = OTHER; note = 2'-O-methylguanosine-3'-phosphate
  modified_base 15: mod_base = OTHER; note = 2'-O-methylguanosine-3'-phosphate
  modified_base 16: mod_base = OTHER; note = 2'-O-methyluridine-3'-phosphate
  modified_base 17: mod_base = OTHER; note = 2'-O-methylguanosine-3'-phosphate
  modified_base 18: mod_base = OTHER; note = 2'-O-methyladenosine-3'-phosphate
  modified_base 19: mod_base = OTHER; note = 2'-O-methylcytidine-3'-phosphate
  modified_base 20: mod_base = OTHER; note = 2'-O-methyladenosine-3'-phosphate
  modified_base 21: mod_base = OTHER; note = 2'-O-methyluridine-3'-phosphate N-[tris(GalNAc-alkyl)-amidodecanoyl)]-4-hydroxyprolinol (Hyp-(GalNAc-alkyl)3)
tgatagaactgctggtgacat

SEQ ID NO: 5141 - RNA, 21 nt, synthetic construct
  source 1..21: mol_type = other RNA
  modified_base 1: mod_base = OTHER; note = 2'-O-methyladenosine-3'-phosphorothioate
  modified_base 2: mod_base = OTHER; note = 2'-O-methylguanosine-3'-phosphorothioate
  modified_base 3: mod_base = OTHER; note = 2'-O-methyluridine-3'-phosphate
  modified_base 4: mod_base = OTHER; note = 2'-O-methylcytidine-3'-phosphate
  modified_base 5: mod_base = OTHER; note = 2'-O-methyluridine-3'-phosphate
  modified_base 6: mod_base = OTHER; note = 2'-O-methylcytidine-3'-phosphate
  modified_base 7: mod_base = OTHER; note = 2'-fluoroadenosine-3'-phosphate
  modified_base 8: mod_base = OTHER; note = 2'-O-methyluridine-3'-phosphate
  modified_base 9: mod_base = OTHER; note = 2'-fluoroguanosine-3'-phosphate
  modified_base 10: mod_base = OTHER; note = 2'-fluorouridine-3'-phosphate
  modified_base 11: mod_base = OTHER; note = 2'-fluorouridine-3'-phosphate
  modified_base 12: mod_base = OTHER; note = 2'-O-methylcytidine-3'-phosphate
  modified_base 13: mod_base = OTHER; note = 2'-O-methyluridine-3'-phosphate
  modified_base 14: mod_base = OTHER; note = 2'-O-methyluridine-3'-phosphate
  modified_base 15: mod_base = OTHER; note = 2'-O-methyluridine-3'-phosphate
  modified_base 16: mod_base = OTHER; note = 2'-O-methylguanosine-3'-phosphate
  modified_base 17: mod_base = OTHER; note = 2'-O-methyluridine-3'-phosphate
  modified_base 18: mod_base = OTHER; note = 2'-O-methylguanosine-3'-phosphate
  modified_base 19: mod_base = OTHER; note = 2'-O-methylcytidine-3'-phosphate
  modified_base 20: mod_base = OTHER; note = 2'-O-methyladenosine-3'-phosphate
  modified_base 21: mod_base = OTHER; note = 2'-O-methyluridine-3'-phosphate N-[tris(GalNAc-alkyl)-amidodecanoyl)]-4-hydroxyprolinol (Hyp-(GalNAc-alkyl)3)
agtctcatgttctttgtgcat

SEQ ID NO: 5142 - RNA, 21 nt, synthetic construct
  source 1..21: mol_type = other RNA
  modified_base 1: mod_base = OTHER; note = 2'-O-methyluridine-3'-phosphorothioate
  modified_base 2: mod_base = OTHER; note = 2'-O-methylguanosine-3'-phosphorothioate
  modified_base 3: mod_base = OTHER; note = 2'-O-methylcytidine-3'-phosphate
  modified_base 4: mod_base = OTHER; note = 2'-O-methyladenosine-3'-phosphate
  modified_base 5: mod_base = OTHER; note = 2'-O-methylguanosine-3'-phosphate
  modified_base 6: mod_base = OTHER; note = 2'-O-methylcytidine-3'-phosphate
  modified_base 7: mod_base = OTHER; note = 2'-fluorouridine-3'-phosphate
  modified_base 8: mod_base = OTHER; note = 2'-O-methylcytidine-3'-phosphate
  modified_base 9: mod_base = OTHER; note = 2'-fluorocytidine-3'-phosphate
  modified_base 10: mod_base = OTHER; note = 2'-fluorocytidine-3'-phosphate
  modified_base 11: mod_base = OTHER; note = 2'-fluorouridine-3'-phosphate
  modified_base 12: mod_base = OTHER; note = 2'-O-methyluridine-3'-phosphate
  modified_base 13: mod_base = OTHER; note = 2'-O-methylcytidine-3'-phosphate
  modified_base 14: mod_base = OTHER; note = 2'-O-methylcytidine-3'-phosphate
  modified_base 15: mod_base = OTHER; note = 2'-O-methyladenosine-3'-phosphate
  modified_base 16: mod_base = OTHER; note = 2'-O-methyladenosine-3'-phosphate
  modified_base 17: mod_base = OTHER; note = 2'-O-methyluridine-3'-phosphate
  modified_base 18: mod_base = OTHER; note = 2'-O-methyladenosine-3'-phosphate
  modified_base 19: mod_base = OTHER; note = 2'-O-methylcytidine-3'-phosphate
  modified_base 20: mod_base = OTHER; note = 2'-O-methylcytidine-3'-phosphate
  modified_base 21: mod_base = OTHER; note = 2'-O-methyluridine-3'-phosphate N-[tris(GalNAc-alkyl)-amidodecanoyl)]-4-hydroxyprolinol (Hyp-(GalNAc-alkyl)3)
tgcagctcccttccaatacct

SEQ ID NO: 5143 - RNA, 21 nt, synthetic construct
  source 1..21: mol_type = other RNA
  modified_base 1: mod_base = OTHER; note = 2'-O-methyluridine-3'-phosphorothioate
  modified_base 2: mod_base = OTHER; note = 2'-O-methyladenosine-3'-phosphorothioate
  modified_base 3: mod_base = OTHER; note = 2'-O-methylcytidine-3'-phosphate
  modified_base 4: mod_base = OTHER; note = 2'-O-methylcytidine-3'-phosphate
  modified_base 5: mod_base = OTHER; note = 2'-O-methyladenosine-3'-phosphate
  modified_base 6: mod_base = OTHER; note = 2'-O-methylcytidine-3'-phosphate
  modified_base 7: mod_base = OTHER; note = 2'-fluorouridine-3'-phosphate
  modified_base 8: mod_base = OTHER; note = 2'-O-methyluridine-3'-phosphate
  modified_base 9: mod_base = OTHER; note = 2'-fluoroguanosine-3'-phosphate
  modified_base 10: mod_base = OTHER; note = 2'-fluoroguanosine-3'-phosphate
  modified_base 11: mod_base = OTHER; note = 2'-fluoroadenosine-3'-phosphate
  modified_base 12: mod_base = OTHER; note = 2'-O-methylcytidine-3'-phosphate
  modified_base 13: mod_base = OTHER; note = 2'-O-methylcytidine-3'-phosphate
  modified_base 14: mod_base = OTHER; note = 2'-O-methyluridine-3'-phosphate
  modified_base 15: mod_base = OTHER; note = 2'-O-methyluridine-3'-phosphate
  modified_base 16: mod_base = OTHER; note = 2'-O-methylguanosine-3'-phosphate
  modified_base 17: mod_base = OTHER; note = 2'-O-methyladenosine-3'-phosphate
  modified_base 18: mod_base = OTHER; note = 2'-O-methyladenosine-3'-phosphate
  modified_base 19: mod_base = OTHER; note = 2'-O-methyladenosine-3'-phosphate
  modified_base 20: mod_base = OTHER; note = 2'-O-methylguanosine-3'-phosphate
  modified_base 21: mod_base = OTHER; note = 2'-O-methyluridine-3'-phosphate N-[tris(GalNAc-alkyl)-amidodecanoyl)]-4-hydroxyprolinol (Hyp-(GalNAc-alkyl)3)
taccacttggaccttgaaagt

SEQ ID NO: 5144 - RNA, 21 nt, synthetic construct
  source 1..21: mol_type = other RNA
  modified_base 1: mod_base = OTHER; note = 2'-O-methyladenosine-3'-phosphorothioate
  modified_base 2: mod_base = OTHER; note = 2'-O-methyladenosine-3'-phosphorothioate
  modified_base 3: mod_base = OTHER; note = 2'-O-methyladenosine-3'-phosphate
  modified_base 4: mod_base = OTHER; note = 2'-O-methylguanosine-3'-phosphate
  modified_base 5: mod_base = OTHER; note = 2'-O-methyluridine-3'-phosphate
  modified_base 6: mod_base = OTHER; note = 2'-O-methylguanosine-3'-phosphate
  modified_base 7: mod_base = OTHER; note = 2'-fluoroadenosine-3'-phosphate
  modified_base 8: mod_base = OTHER; note = 2'-O-methylguanosine-3'-phosphate
  modified_base 9: mod_base = OTHER; note = 2'-fluoroadenosine-3'-phosphate
  modified_base 10: mod_base = OTHER; note = 2'-fluoroguanosine-3'-phosphate
  modified_base 11: mod_base = OTHER; note = 2'-fluorouridine-3'-phosphate
  modified_base 12: mod_base = OTHER; note = 2'-O-methylcytidine-3'-phosphate
  modified_base 13: mod_base = OTHER; note = 2'-O-methylcytidine-3'-phosphate
  modified_base 14: mod_base = OTHER; note = 2'-O-methyluridine-3'-phosphate
  modified_base 15: mod_base = OTHER; note = 2'-O-methyluridine-3'-phosphate
  modified_base 16: mod_base = OTHER; note = 2'-O-methylguanosine-3'-phosphate
  modified_base 17: mod_base = OTHER; note = 2'-O-methyluridine-3'-phosphate
  modified_base 18: mod_base = OTHER; note = 2'-O-methylguanosine-3'-phosphate
  modified_base 19: mod_base = OTHER; note = 2'-O-methylcytidine-3'-phosphate
  modified_base 20: mod_base = OTHER; note = 2'-O-methyluridine-3'-phosphate
  modified_base 21: mod_base = OTHER; note = 2'-O-methyluridine-3'-phosphate N-[tris(GalNAc-alkyl)-amidodecanoyl)]-4-hydroxyprolinol (Hyp-(GalNAc-alkyl)3)
aaagtgagagtccttgtgctt

SEQ ID NO: 5145 - RNA, 21 nt, synthetic construct
  source 1..21: mol_type = other RNA
  modified_base 1: mod_base = OTHER; note = 2'-O-methylcytidine-3'-phosphorothioate
  modified_base 2: mod_base = OTHER; note = 2'-O-methylcytidine-3'-phosphorothioate
  modified_base 3: mod_base = OTHER; note = 2'-O-methyladenosine-3'-phosphate
  modified_base 4: mod_base = OTHER; note = 2'-O-methylcytidine-3'-phosphate
  modified_base 5: mod_base = OTHER; note = 2'-O-methyladenosine-3'-phosphate
  modified_base 6: mod_base = OTHER; note = 2'-O-methyluridine-3'-phosphate
  modified_base 7: mod_base = OTHER; note = 2'-fluoroadenosine-3'-phosphate
  modified_base 8: mod_base = OTHER; note = 2'-O-methyladenosine-3'-phosphate
  modified_base 9: mod_base = OTHER; note = 2'-fluorouridine-3'-phosphate
  modified_base 10: mod_base = OTHER; note = 2'-fluoroadenosine-3'-phosphate
  modified_base 11: mod_base = OTHER; note = 2'-fluorocytidine-3'-phosphate
  modified_base 12: mod_base = OTHER; note = 2'-O-methylcytidine-3'-phosphate
  modified_base 13: mod_base = OTHER; note = 2'-O-methyladenosine-3'-phosphate
  modified_base 14: mod_base = OTHER; note = 2'-O-methyladenosine-3'-phosphate
  modified_base 15: mod_base = OTHER; note = 2'-O-methylcytidine-3'-phosphate
  modified_base 16: mod_base = OTHER; note = 2'-O-methylcytidine-3'-phosphate
  modified_base 17: mod_base = OTHER; note = 2'-O-methyluridine-3'-phosphate
  modified_base 18: mod_base = OTHER; note = 2'-O-methylcytidine-3'-phosphate
  modified_base 19: mod_base = OTHER; note = 2'-O-methyladenosine-3'-phosphate
  modified_base 20: mod_base = OTHER; note = 2'-O-methylcytidine-3'-phosphate
  modified_base 21: mod_base = OTHER; note = 2'-O-methyluridine-3'-phosphate N-[tris(GalNAc-alkyl)-amidodecanoyl)]-4-hydroxyprolinol (Hyp-(GalNAc-alkyl)3)
ccacataataccaacctcact

SEQ ID NO: 5146 - RNA, 21 nt, synthetic construct
  source 1..21: mol_type = other RNA
  modified_base 1: mod_base = OTHER; note = 2'-O-methyluridine-3'-phosphorothioate
  modified_base 2: mod_base = OTHER; note = 2'-O-methyluridine-3'-phosphorothioate
  modified_base 3: mod_base = OTHER; note = 2'-O-methylguanosine-3'-phosphate
  modified_base 4: mod_base = OTHER; note = 2'-O-methylguanosine-3'-phosphate
  modified_base 5: mod_base = OTHER; note = 2'-O-methylcytidine-3'-phosphate
  modified_base 6: mod_base = OTHER; note = 2'-O-methyluridine-3'-phosphate
  modified_base 7: mod_base = OTHER; note = 2'-fluoroadenosine-3'-phosphate
  modified_base 8: mod_base = OTHER; note = 2'-O-methylcytidine-3'-phosphate
  modified_base 9: mod_base = OTHER; note = 2'-fluorouridine-3'-phosphate
  modified_base 10: mod_base = OTHER; note = 2'-fluorocytidine-3'-phosphate
  modified_base 11: mod_base = OTHER; note = 2'-fluoroadenosine-3'-phosphate
  modified_base 12: mod_base = OTHER; note = 2'-O-methylguanosine-3'-phosphate
  modified_base 13: mod_base = OTHER; note = 2'-O-methyluridine-3'-phosphate
  modified_base 14: mod_base = OTHER; note = 2'-O-methyladenosine-3'-phosphate
  modified_base 15: mod_base = OTHER; note = 2'-O-methylcytidine-3'-phosphate
  modified_base 16: mod_base = OTHER; note = 2'-O-methylcytidine-3'-phosphate
  modified_base 17: mod_base = OTHER; note = 2'-O-methyluridine-3'-phosphate
  modified_base 18: mod_base = OTHER; note = 2'-O-methylguanosine-3'-phosphate
  modified_base 19: mod_base = OTHER; note = 2'-O-methylcytidine-3'-phosphate
  modified_base 20: mod_base = OTHER; note = 2'-O-methyluridine-3'-phosphate
  modified_base 21: mod_base = OTHER; note = 2'-O-methyluridine-3'-phosphate N-[tris(GalNAc-alkyl)-amidodecanoyl)]-4-hydroxyprolinol (Hyp-(GalNAc-alkyl)3)
ttggctactcagtacctgctt

SEQ ID NO: 5147 - RNA, 21 nt, synthetic construct
  source 1..21: mol_type = other RNA
  modified_base 1: mod_base = OTHER; note = 2'-O-methyluridine-3'-phosphorothioate
  modified_base 2: mod_base = OTHER; note = 2'-O-methylguanosine-3'-phosphorothioate
  modified_base 3: mod_base = OTHER; note = 2'-O-methylcytidine-3'-phosphate
  modified_base 4: mod_base = OTHER; note = 2'-O-methyluridine-3'-phosphate
  modified_base 5: mod_base = OTHER; note = 2'-O-methylguanosine-3'-phosphate
  modified_base 6: mod_base = OTHER; note = 2'-O-methylguanosine-3'-phosphate
  modified_base 7: mod_base = OTHER; note = 2'-fluoroadenosine-3'-phosphate
  modified_base 8: mod_base = OTHER; note = 2'-O-methylguanosine-3'-phosphate
  modified_base 9: mod_base = OTHER; note = 2'-fluoroguanosine-3'-phosphate
  modified_base 10: mod_base = OTHER; note = 2'-fluorouridine-3'-phosphate
  modified_base 11: mod_base = OTHER; note = 2'-fluoroguanosine-3'-phosphate
  modified_base 12: mod_base = OTHER; note = 2'-O-methylguanosine-3'-phosphate
  modified_base 13: mod_base = OTHER; note = 2'-O-methyladenosine-3'-phosphate
  modified_base 14: mod_base = OTHER; note = 2'-O-methyluridine-3'-phosphate
  modified_base 15: mod_base = OTHER; note = 2'-O-methylguanosine-3'-phosphate
  modified_base 16: mod_base = OTHER; note = 2'-O-methylcytidine-3'-phosphate
  modified_base 17: mod_base = OTHER; note = 2'-O-methylcytidine-3'-phosphate
  modified_base 18: mod_base = OTHER; note = 2'-O-methyladenosine-3'-phosphate
  modified_base 19: mod_base = OTHER; note = 2'-O-methylguanosine-3'-phosphate
  modified_base 20: mod_base = OTHER; note = 2'-O-methyluridine-3'-phosphate
  modified_base 21: mod_base = OTHER; note = 2'-O-methyluridine-3'-phosphate N-[tris(GalNAc-alkyl)-amidodecanoyl)]-4-hydroxyprolinol (Hyp-(GalNAc-alkyl)3)
tgctggaggtggatgccagtt

SEQ ID NO: 5148 - RNA, 21 nt, synthetic construct
  source 1..21: mol_type = other RNA
  modified_base 1: mod_base = OTHER; note = 2'-O-methylcytidine-3'-phosphorothioate
  modified_base 2: mod_base = OTHER; note = 2'-O-methyladenosine-3'-phosphorothioate
  modified_base 3: mod_base = OTHER; note = 2'-O-methylguanosine-3'-phosphate
  modified_base 4: mod_base = OTHER; note = 2'-O-methyluridine-3'-phosphate
  modified_base 5: mod_base = OTHER; note = 2'-O-methylguanosine-3'-phosphate
  modified_base 6: mod_base = OTHER; note = 2'-O-methylguanosine-3'-phosphate
  modified_base 7: mod_base = OTHER; note = 2'-fluorocytidine-3'-phosphate
  modified_base 8: mod_base = OTHER; note = 2'-O-methyluridine-3'-phosphate
  modified_base 9: mod_base = OTHER; note = 2'-fluoroguanosine-3'-phosphate
  modified_base 10: mod_base = OTHER; note = 2'-fluoroguanosine-3'-phosphate
  modified_base 11: mod_base = OTHER; note = 2'-fluorocytidine-3'-phosphate
  modified_base 12: mod_base = OTHER; note = 2'-O-methyladenosine-3'-phosphate
  modified_base 13: mod_base = OTHER; note = 2'-O-methyluridine-3'-phosphate
  modified_base 14: mod_base = OTHER; note = 2'-O-methylcytidine-3'-phosphate
  modified_base 15: mod_base = OTHER; note = 2'-O-methyladenosine-3'-phosphate
  modified_base 16: mod_base = OTHER; note = 2'-O-methyladenosine-3'-phosphate
  modified_base 17: mod_base = OTHER; note = 2'-O-methylcytidine-3'-phosphate
  modified_base 18: mod_base = OTHER; note = 2'-O-methyluridine-3'-phosphate
  modified_base 19: mod_base = OTHER; note = 2'-O-methylcytidine-3'-phosphate
  modified_base 20: mod_base = OTHER; note = 2'-O-methylcytidine-3'-phosphate
  modified_base 21: mod_base = OTHER; note = 2'-O-methyluridine-3'-phosphate N-[tris(GalNAc-alkyl)-amidodecanoyl)]-4-hydroxyprolinol (Hyp-(GalNAc-alkyl)3)
cagtggctggcatcaactcct

SEQ ID NO: 5149 - RNA, 21 nt, synthetic construct
  source 1..21: mol_type = other RNA
  modified_base 1: mod_base = OTHER; note = 2'-O-methylcytidine-3'-phosphorothioate
  modified_base 2: mod_base = OTHER; note = 2'-O-methylcytidine-3'-phosphorothioate
  modified_base 3: mod_base = OTHER; note = 2'-O-methyluridine-3'-phosphate
  modified_base 4: mod_base = OTHER; note = 2'-O-methylguanosine-3'-phosphate
  modified_base 5: mod_base = OTHER; note = 2'-O-methyladenosine-3'-phosphate
  modified_base 6: mod_base = OTHER; note = 2'-O-methyladenosine-3'-phosphate
  modified_base 7: mod_base = OTHER; note = 2'-fluoroguanosine-3'-phosphate
  modified_base 8: mod_base = OTHER; note = 2'-O-methylcytidine-3'-phosphate
  modified_base 9: mod_base = OTHER; note = 2'-fluorouridine-3'-phosphate
  modified_base 10: mod_base = OTHER; note = 2'-fluorocytidine-3'-phosphate
  modified_base 11: mod_base = OTHER; note = 2'-fluoroadenosine-3'-phosphate
  modified_base 12: mod_base = OTHER; note = 2'-O-methyladenosine-3'-phosphate
  modified_base 13: mod_base = OTHER; note = 2'-O-methylguanosine-3'-phosphate
  modified_base 14: mod_base = OTHER; note = 2'-O-methylcytidine-3'-phosphate
  modified_base 15: mod_base = OTHER; note = 2'-O-methyluridine-3'-phosphate
  modified_base 16: mod_base = OTHER; note = 2'-O-methylguanosine-3'-phosphate
  modified_base 17: mod_base = OTHER; note = 2'-O-methylcytidine-3'-phosphate
  modified_base 18: mod_base = OTHER; note = 2'-O-methylcytidine-3'-phosphate
  modified_base 19: mod_base = OTHER; note = 2'-O-methyluridine-3'-phosphate
  modified_base 20: mod_base = OTHER; note = 2'-O-methylguanosine-3'-phosphate
  modified_base 21: mod_base = OTHER; note = 2'-O-methyluridine-3'-phosphate N-[tris(GalNAc-alkyl)-amidodecanoyl)]-4-hydroxyprolinol (Hyp-(GalNAc-alkyl)3)
cctgaagctcaagctgcctgt

SEQ ID NO: 5150 - RNA, 21 nt, synthetic construct
  source 1..21: mol_type = other RNA
  modified_base 1: mod_base = OTHER; note = 2'-O-methylguanosine-3'-phosphorothioate
  modified_base 2: mod_base = OTHER; note = 2'-O-methyladenosine-3'-phosphorothioate
  modified_base 3: mod_base = OTHER; note = 2'-O-methylguanosine-3'-phosphate
  modified_base 4: mod_base = OTHER; note = 2'-O-methylcytidine-3'-phosphate
  modified_base 5: mod_base = OTHER; note = 2'-O-methyluridine-3'-phosphate
  modified_base 6: mod_base = OTHER; note = 2'-O-methylguanosine-3'-phosphate
  modified_base 7: mod_base = OTHER; note = 2'-fluoroguanosine-3'-phosphate
  modified_base 8: mod_base = OTHER; note = 2'-O-methyluridine-3'-phosphate
  modified_base 9: mod_base = OTHER; note = 2'-fluoroadenosine-3'-phosphate
  modified_base 10: mod_base = OTHER; note = 2'-fluorocytidine-3'-phosphate
  modified_base 11: mod_base = OTHER; note = 2'-fluorouridine-3'-phosphate
  modified_base 12: mod_base = OTHER; note = 2'-O-methyluridine-3'-phosphate
  modified_base 13: mod_base = OTHER; note = 2'-O-methylguanosine-3'-phosphate
  modified_base 14: mod_base = OTHER; note = 2'-O-methyladenosine-3'-phosphate
  modified_base 15: mod_base = OTHER; note = 2'-O-methyladenosine-3'-phosphate
  modified_base 16: mod_base = OTHER; note = 2'-O-methylguanosine-3'-phosphate
  modified_base 17: mod_base = OTHER; note = 2'-O-methylguanosine-3'-phosphate
  modified_base 18: mod_base = OTHER; note = 2'-O-methylcytidine-3'-phosphate
  modified_base 19: mod_base = OTHER; note = 2'-O-methylcytidine-3'-phosphate
  modified_base 20: mod_base = OTHER; note = 2'-O-methyladenosine-3'-phosphate
  modified_base 21: mod_base = OTHER; note = 2'-O-methyluridine-3'-phosphate N-[tris(GalNAc-alkyl)-amidodecanoyl)]-4-hydroxyprolinol (Hyp-(GalNAc-alkyl)3)
gagctggtacttgaaggccat

SEQ ID NO: 5151 - RNA, 21 nt, synthetic construct
  source 1..21: mol_type = other RNA
  modified_base 1: mod_base = OTHER; note = 2'-O-methylguanosine-3'-phosphorothioate
  modified_base 2: mod_base = OTHER; note = 2'-O-methylcytidine-3'-phosphorothioate
  modified_base 3: mod_base = OTHER; note = 2'-O-methylcytidine-3'-phosphate
  modified_base 4: mod_base = OTHER; note = 2'-O-methylcytidine-3'-phosphate
  modified_base 5: mod_base = OTHER; note = 2'-O-methyladenosine-3'-phosphate
  modified_base 6: mod_base = OTHER; note = 2'-O-methylguanosine-3'-phosphate
  modified_base 7: mod_base = OTHER; note = 2'-fluoroadenosine-3'-phosphate
  modified_base 8: mod_base = OTHER; note = 2'-O-methylguanosine-3'-phosphate
  modified_base 9: mod_base = OTHER; note = 2'-fluorocytidine-3'-phosphate
  modified_base 10: mod_base = OTHER; note = 2'-fluorouridine-3'-phosphate
  modified_base 11: mod_base = OTHER; note = 2'-fluorocytidine-3'-phosphate
  modified_base 12: mod_base = OTHER; note = 2'-O-methyladenosine-3'-phosphate
  modified_base 13: mod_base = OTHER; note = 2'-O-methylguanosine-3'-phosphate
  modified_base 14: mod_base = OTHER; note = 2'-O-methyluridine-3'-phosphate
  modified_base 15: mod_base = OTHER; note = 2'-O-methylcytidine-3'-phosphate
  modified_base 16: mod_base = OTHER; note = 2'-O-methyladenosine-3'-phosphate
  modified_base 17: mod_base = OTHER; note = 2'-O-methyluridine-3'-phosphate
  modified_base 18: mod_base = OTHER; note = 2'-O-methylcytidine-3'-phosphate
  modified_base 19: mod_base = OTHER; note = 2'-O-methylcytidine-3'-phosphate
  modified_base 20: mod_base = OTHER; note = 2'-O-methyluridine-3'-phosphate
  modified_base 21: mod_base = OTHER; note = 2'-O-methyluridine-3'-phosphate N-[tris(GalNAc-alkyl)-amidodecanoyl)]-4-hydroxyprolinol (Hyp-(GalNAc-alkyl)3)
gcccagagctcagtcatcctt

SEQ ID NO: 5152 - RNA, 21 nt, synthetic construct
  source 1..21: mol_type = other RNA
  modified_base 1: mod_base = OTHER; note = 2'-O-methyluridine-3'-phosphorothioate
  modified_base 2: mod_base = OTHER; note = 2'-O-methylguanosine-3'-phosphorothioate
  modified_base 3: mod_base = OTHER; note = 2'-O-methylcytidine-3'-phosphate
  modified_base 4: mod_base = OTHER; note = 2'-O-methylcytidine-3'-phosphate
  modified_base 5: mod_base = OTHER; note = 2'-O-methylcytidine-3'-phosphate
  modified_base 6: mod_base = OTHER; note = 2'-O-methyladenosine-3'-phosphate
  modified_base 7: mod_base = OTHER; note = 2'-fluorouridine-3'-phosphate
  modified_base 8: mod_base = OTHER; note = 2'-O-methyladenosine-3'-phosphate
  modified_base 9: mod_base = OTHER; note = 2'-fluoroguanosine-3'-phosphate
  modified_base 10: mod_base = OTHER; note = 2'-fluoroguanosine-3'-phosphate
  modified_base 11: mod_base = OTHER; note = 2'-fluorocytidine-3'-phosphate
  modified_base 12: mod_base = OTHER; note = 2'-O-methylcytidine-3'-phosphate
  modified_base 13: mod_base = OTHER; note = 2'-O-methyluridine-3'-phosphate
  modified_base 14: mod_base = OTHER; note = 2'-O-methyluridine-3'-phosphate
  modified_base 15: mod_base = OTHER; note = 2'-O-methyluridine-3'-phosphate
  modified_base 16: mod_base = OTHER; note = 2'-O-methyluridine-3'-phosphate
  modified_base 17: mod_base = OTHER; note = 2'-O-methylguanosine-3'-phosphate
  modified_base 18: mod_base = OTHER; note = 2'-O-methyluridine-3'-phosphate
  modified_base 19: mod_base = OTHER; note = 2'-O-methylguanosine-3'-phosphate
  modified_base 20: mod_base = OTHER; note = 2'-O-methylguanosine-3'-phosphate
  modified_base 21: mod_base = OTHER; note = 2'-O-methyluridine-3'-phosphate N-[tris(GalNAc-alkyl)-amidodecanoyl)]-4-hydroxyprolinol (Hyp-(GalNAc-alkyl)3)
tgcccataggccttttgtggt

SEQ ID NO: 5153 - RNA, 21 nt, synthetic construct
  source 1..21: mol_type = other RNA
  modified_base 1: mod_base = OTHER; note = 2'-O-methyluridine-3'-phosphorothioate
  modified_base 2: mod_base = OTHER; note = 2'-O-methylguanosine-3'-phosphorothioate
  modified_base 3: mod_base = OTHER; note = 2'-O-methylguanosine-3'-phosphate
  modified_base 4: mod_base = OTHER; note = 2'-O-methylcytidine-3'-phosphate
  modified_base 5: mod_base = OTHER; note = 2'-O-methyladenosine-3'-phosphate
  modified_base 6: mod_base = OTHER; note = 2'-O-methylguanosine-3'-phosphate
  modified_base 7: mod_base = OTHER; note = 2'-fluorocytidine-3'-phosphate
  modified_base 8: mod_base = OTHER; note = 2'-O-methylcytidine-3'-phosphate
  modified_base 9: mod_base = OTHER; note = 2'-fluorocytidine-3'-phosphate
  modified_base 10: mod_base = OTHER; note = 2'-fluoroguanosine-3'-phosphate
  modified_base 11: mod_base = OTHER; note = 2'-fluoroguanosine-3'-phosphate
  modified_base 12: mod_base = OTHER; note = 2'-O-methylguanosine-3'-phosphate
  modified_base 13: mod_base = OTHER; note = 2'-O-methyluridine-3'-phosphate
  modified_base 14: mod_base = OTHER; note = 2'-O-methylguanosine-3'-phosphate
  modified_base 15: mod_base = OTHER; note = 2'-O-methyladenosine-3'-phosphate
  modified_base 16: mod_base = OTHER; note = 2'-O-methylguanosine-3'-phosphate
  modified_base 17: mod_base = OTHER; note = 2'-O-methyladenosine-3'-phosphate
  modified_base 18: mod_base = OTHER; note = 2'-O-methylguanosine-3'-phosphate
  modified_base 19: mod_base = OTHER; note = 2'-O-methyluridine-3'-phosphate
  modified_base 20: mod_base = OTHER; note = 2'-O-methyluridine-3'-phosphate
  modified_base 21: mod_base = OTHER; note = 2'-O-methyluridine-3'-phosphate N-[tris(GalNAc-alkyl)-amidodecanoyl)]-4-hydroxyprolinol (Hyp-(GalNAc-alkyl)3)
tggcagcccgggtgagagttt

SEQ ID NO: 5154 - RNA, 21 nt, synthetic construct
  source 1..21: mol_type = other RNA
  modified_base 1: mod_base = OTHER; note = 2'-O-methylguanosine-3'-phosphorothioate
  modified_base 2: mod_base = OTHER; note = 2'-O-methylcytidine-3'-phosphorothioate
  modified_base 3: mod_base = OTHER; note = 2'-O-methyladenosine-3'-phosphate
  modified_base 4: mod_base = OTHER; note = 2'-O-methyladenosine-3'-phosphate
  modified_base 5: mod_base = OTHER; note = 2'-O-methyladenosine-3'-phosphate
  modified_base 6: mod_base = OTHER; note = 2'-O-methylcytidine-3'-phosphate
  modified_base 7: mod_base = OTHER; note = 2'-fluoroadenosine-3'-phosphate
  modified_base 8: mod_base = OTHER; note = 2'-O-methylcytidine-3'-phosphate
  modified_base 9: mod_base = OTHER; note = 2'-fluorocytidine-3'-phosphate
  modified_base 10: mod_base = OTHER; note = 2'-fluoroadenosine-3'-phosphate
  modified_base 11: mod_base = OTHER; note = 2'-fluoroguanosine-3'-phosphate
  modified_base 12: mod_base = OTHER; note = 2'-O-methyladenosine-3'-phosphate
  modified_base 13: mod_base = OTHER; note = 2'-O-methyluridine-3'-phosphate
  modified_base 14: mod_base = OTHER; note = 2'-O-methyluridine-3'-phosphate
  modified_base 15: mod_base = OTHER; note = 2'-O-methylcytidine-3'-phosphate
  modified_base 16: mod_base = OTHER; note = 2'-O-methyladenosine-3'-phosphate
  modified_base 17: mod_base = OTHER; note = 2'-O-methylcytidine-3'-phosphate
  modified_base 18: mod_base = OTHER; note = 2'-O-methylcytidine-3'-phosphate
  modified_base 19: mod_base = OTHER; note = 2'-O-methylguanosine-3'-phosphate
  modified_base 20: mod_base = OTHER; note = 2'-O-methyladenosine-3'-phosphate
  modified_base 21: mod_base = OTHER; note = 2'-O-methyluridine-3'-phosphate N-[tris(GalNAc-alkyl)-amidodecanoyl)]-4-hydroxyprolinol (Hyp-(GalNAc-alkyl)3)
gcaaacaccagattcaccgat

SEQ ID NO: 5155 - RNA, 21 nt, synthetic construct
  source 1..21: mol_type = other RNA
  modified_base 1: mod_base = OTHER; note = 2'-O-methyladenosine-3'-phosphorothioate
  modified_base 2: mod_base = OTHER; note = 2'-O-methylcytidine-3'-phosphorothioate
  modified_base 3: mod_base = OTHER; note = 2'-O-methylguanosine-3'-phosphate
  modified_base 4: mod_base = OTHER; note = 2'-O-methyladenosine-3'-phosphate
  modified_base 5: mod_base = OTHER; note = 2'-O-methylguanosine-3'-phosphate
  modified_base 6: mod_base = OTHER; note = 2'-O-methylguanosine-3'-phosphate
  modified_base 7: mod_base = OTHER; note = 2'-fluorocytidine-3'-phosphate
  modified_base 8: mod_base = OTHER; note = 2'-O-methyladenosine-3'-phosphate
  modified_base 9: mod_base = OTHER; note = 2'-fluorouridine-3'-phosphate
  modified_base 10: mod_base = OTHER; note = 2'-fluorocytidine-3'-phosphate
  modified_base 11: mod_base = OTHER; note = 2'-fluoroguanosine-3'-phosphate
  modified_base 12: mod_base = OTHER; note = 2'-O-methyladenosine-3'-phosphate
  modified_base 13: mod_base = OTHER; note = 2'-O-methylcytidine-3'-phosphate
  modified_base 14: mod_base = OTHER; note = 2'-O-methyluridine-3'-phosphate
  modified_base 15: mod_base = OTHER; note = 2'-O-methylguanosine-3'-phosphate
  modified_base 16: mod_base = OTHER; note = 2'-O-methylcytidine-3'-phosphate
  modified_base 17: mod_base = OTHER; note = 2'-O-methylcytidine-3'-phosphate
  modified_base 18: mod_base = OTHER; note = 2'-O-methyladenosine-3'-phosphate
  modified_base 19: mod_base = OTHER; note = 2'-O-methyladenosine-3'-phosphate
  modified_base 20: mod_base = OTHER; note = 2'-O-methylguanosine-3'-phosphate
  modified_base 21: mod_base = OTHER; note = 2'-O-methyluridine-3'-phosphate N-[tris(GalNAc-alkyl)-amidodecanoyl)]-4-hydroxyprolinol (Hyp-(GalNAc-alkyl)3)
acgaggcatcgactgccaagt

SEQ ID NO: 5156 - RNA, 21 nt, synthetic construct
  source 1..21: mol_type = other RNA
  modified_base 1: mod_base = OTHER; note = 2'-O-methyladenosine-3'-phosphorothioate
  modified_base 2: mod_base = OTHER; note = 2'-O-methyladenosine-3'-phosphorothioate
  modified_base 3: mod_base = OTHER; note = 2'-O-methylguanosine-3'-phosphate
  modified_base 4: mod_base = OTHER; note = 2'-O-methylguanosine-3'-phosphate
  modified_base 5: mod_base = OTHER; note = 2'-O-methyladenosine-3'-phosphate
  modified_base 6: mod_base = OTHER; note = 2'-O-methylguanosine-3'-phosphate
  modified_base 7: mod_base = OTHER; note = 2'-fluoroguanosine-3'-phosphate
  modified_base 8: mod_base = OTHER; note = 2'-O-methylguanosine-3'-phosphate
  modified_base 9: mod_base = OTHER; note = 2'-fluorouridine-3'-phosphate
  modified_base 10: mod_base = OTHER; note = 2'-fluorocytidine-3'-phosphate
  modified_base 11: mod_base = OTHER; note = 2'-fluorocytidine-3'-phosphate
  modified_base 12: mod_base = OTHER; note = 2'-O-methyladenosine-3'-phosphate
  modified_base 13: mod_base = OTHER; note = 2'-O-methylguanosine-3'-phosphate
  modified_base 14: mod_base = OTHER; note = 2'-O-methylguanosine-3'-phosphate
  modified_base 15: mod_base = OTHER; note = 2'-O-methyladenosine-3'-phosphate
  modified_base 16: mod_base = OTHER; note = 2'-O-methyluridine-3'-phosphate
  modified_base 17: mod_base = OTHER; note = 2'-O-methylguanosine-3'-phosphate
  modified_base 18: mod_base = OTHER; note = 2'-O-methyluridine-3'-phosphate
  modified_base 19: mod_base = OTHER; note = 2'-O-methylguanosine-3'-phosphate
  modified_base 20: mod_base = OTHER; note = 2'-O-methylcytidine-3'-phosphate
  modified_base 21: mod_base = OTHER; note = 2'-O-methyluridine-3'-phosphate N-[tris(GalNAc-alkyl)-amidodecanoyl)]-4-hydroxyprolinol (Hyp-(GalNAc-alkyl)3)
aaggagggtccaggatgtgct

SEQ ID NO: 5157 - RNA, 21 nt, synthetic construct
  source 1..21: mol_type = other RNA
  modified_base 1: mod_base = OTHER; note = 2'-O-methylguanosine-3'-phosphorothioate
  modified_base 2: mod_base = OTHER; note = 2'-O-methyluridine-3'-phosphorothioate
  modified_base 3: mod_base = OTHER; note = 2'-O-methylguanosine-3'-phosphate
  modified_base 4: mod_base = OTHER; note = 2'-O-methylcytidine-3'-phosphate
  modified_base 5: mod_base = OTHER; note = 2'-O-methyluridine-3'-phosphate
  modified_base 6: mod_base = OTHER; note = 2'-O-methylguanosine-3'-phosphate
  modified_base 7: mod_base = OTHER; note = 2'-fluorouridine-3'-phosphate
  modified_base 8: mod_base = OTHER; note = 2'-O-methylcytidine-3'-phosphate
  modified_base 9: mod_base = OTHER; note = 2'-fluoroguanosine-3'-phosphate
  modified_base 10: mod_base = OTHER; note = 2'-fluoroadenosine-3'-phosphate
  modified_base 11: mod_base = OTHER; note = 2'-fluorocytidine-3'-phosphate
  modified_base 12: mod_base = OTHER; note = 2'-O-methyladenosine-3'-phosphate
  modified_base 13: mod_base = OTHER; note = 2'-O-methyladenosine-3'-phosphate
  modified_base 14: mod_base = OTHER; note = 2'-O-methylguanosine-3'-phosphate
  modified_base 15: mod_base = OTHER; note = 2'-O-methyladenosine-3'-phosphate
  modified_base 16: mod_base = OTHER; note = 2'-O-methylguanosine-3'-phosphate
  modified_base 17: mod_base = OTHER; note = 2'-O-methyluridine-3'-phosphate
  modified_base 18: mod_base = OTHER; note = 2'-O-methyluridine-3'-phosphate
  modified_base 19: mod_base = OTHER; note = 2'-O-methyluridine-3'-phosphate
  modified_base 20: mod_base = OTHER; note = 2'-O-methyluridine-3'-phosphate
  modified_base 21: mod_base = OTHER; note = 2'-O-methyluridine-3'-phosphate N-[tris(GalNAc-alkyl)-amidodecanoyl)]-4-hydroxyprolinol (Hyp-(GalNAc-alkyl)3)
gtgctgtcgacaagagttttt

SEQ ID NO: 5158 - RNA, 21 nt, synthetic construct
  source 1..21: mol_type = other RNA
  modified_base 1: mod_base = OTHER; note = 2'-O-methyluridine-3'-phosphorothioate
  modified_base 2: mod_base = OTHER; note = 2'-O-methyluridine-3'-phosphorothioate
  modified_base 3: mod_base = OTHER; note = 2'-O-methyluridine-3'-phosphate
  modified_base 4: mod_base = OTHER; note = 2'-O-methyluridine-3'-phosphate
  modified_base 5: mod_base = OTHER; note = 2'-O-methyluridine-3'-phosphate
  modified_base 6: mod_base = OTHER; note = 2'-O-methyluridine-3'-phosphate
  modified_base 7: mod_base = OTHER; note = 2'-fluoroguanosine-3'-phosphate
  modified_base 8: mod_base = OTHER; note = 2'-O-methyluridine-3'-phosphate
  modified_base 9: mod_base = OTHER; note = 2'-fluoroguanosine-3'-phosphate
  modified_base 10: mod_base = OTHER; note = 2'-fluoroguanosine-3'-phosphate
  modified_base 11: mod_base = OTHER; note = 2'-fluoroadenosine-3'-phosphate
  modified_base 12: mod_base = OTHER; note = 2'-O-methylcytidine-3'-phosphate
  modified_base 13: mod_base = OTHER; note = 2'-O-methyluridine-3'-phosphate
  modified_base 14: mod_base = OTHER; note = 2'-O-methyluridine-3'-phosphate
  modified_base 15: mod_base = OTHER; note = 2'-O-methylcytidine-3'-phosphate
  modified_base 16: mod_base = OTHER; note = 2'-O-methylcytidine-3'-phosphate
  modified_base 17: mod_base = OTHER; note = 2'-O-methylguanosine-3'-phosphate
  modified_base 18: mod_base = OTHER; note = 2'-O-methyluridine-3'-phosphate
  modified_base 19: mod_base = OTHER; note = 2'-O-methylguanosine-3'-phosphate
  modified_base 20: mod_base = OTHER; note = 2'-O-methyladenosine-3'-phosphate
  modified_base 21: mod_base = OTHER; note = 2'-O-methyluridine-3'-phosphate N-[tris(GalNAc-alkyl)-amidodecanoyl)]-4-hydroxyprolinol (Hyp-(GalNAc-alkyl)3)
ttttttgtggacttccgtgat

SEQ ID NO: 5159 - RNA, 21 nt, synthetic construct
  source 1..21: mol_type = other RNA
  modified_base 1: mod_base = OTHER; note = 2'-O-methylguanosine-3'-phosphorothioate
  modified_base 2: mod_base = OTHER; note = 2'-O-methylcytidine-3'-phosphorothioate
  modified_base 3: mod_base = OTHER; note = 2'-O-methyladenosine-3'-phosphate
  modified_base 4: mod_base = OTHER; note = 2'-O-methylcytidine-3'-phosphate
  modified_base 5: mod_base = OTHER; note = 2'-O-methylguanosine-3'-phosphate
  modified_base 6: mod_base = OTHER; note = 2'-O-methyladenosine-3'-phosphate
  modified_base 7: mod_base = OTHER; note = 2'-fluorocytidine-3'-phosphate
  modified_base 8: mod_base = OTHER; note = 2'-O-methyluridine-3'-phosphate
  modified_base 9: mod_base = OTHER; note = 2'-fluoroguanosine-3'-phosphate
  modified_base 10: mod_base = OTHER; note = 2'-fluoroguanosine-3'-phosphate
  modified_base 11: mod_base = OTHER; note = 2'-fluoroadenosine-3'-phosphate
  modified_base 12: mod_base = OTHER; note = 2'-O-methyluridine-3'-phosphate
  modified_base 13: mod_base = OTHER; note = 2'-O-methylcytidine-3'-phosphate
  modified_base 14: mod_base = OTHER; note = 2'-O-methyladenosine-3'-phosphate
  modified_base 15: mod_base = OTHER; note = 2'-O-methyluridine-3'-phosphate
  modified_base 16: mod_base = OTHER; note = 2'-O-methylcytidine-3'-phosphate
  modified_base 17: mod_base = OTHER; note = 2'-O-methylcytidine-3'-phosphate
  modified_base 18: mod_base = OTHER; note = 2'-O-methyladenosine-3'-phosphate
  modified_base 19: mod_base = OTHER; note = 2'-O-methylguanosine-3'-phosphate
  modified_base 20: mod_base = OTHER; note = 2'-O-methylcytidine-3'-phosphate
  modified_base 21: mod_base = OTHER; note = 2'-O-methyluridine-3'-phosphate N-[tris(GalNAc-alkyl)-amidodecanoyl)]-4-hydroxyprolinol (Hyp-(GalNAc-alkyl)3)
gcacgactggatcatccagct

SEQ ID NO: 5160 - RNA, 21 nt, synthetic construct
  source 1..21: mol_type = other RNA
  modified_base 1: mod_base = OTHER; note = 2'-O-methylcytidine-3'-phosphorothioate
  modified_base 2: mod_base = OTHER; note = 2'-O-methylguanosine-3'-phosphorothioate
  modified_base 3: mod_base = OTHER; note = 2'-O-methylcytidine-3'-phosphate
  modified_base 4: mod_base = OTHER; note = 2'-O-methylcytidine-3'-phosphate
  modified_base 5: mod_base = OTHER; note = 2'-O-methyladenosine-3'-phosphate
  modified_base 6: mod_base = OTHER; note = 2'-O-methyluridine-3'-phosphate
  modified_base 7: mod_base = OTHER; note = 2'-fluoroguanosine-3'-phosphate
  modified_base 8: mod_base = OTHER; note = 2'-O-methyladenosine-3'-phosphate
  modified_base 9: mod_base = OTHER; note = 2'-fluoroadenosine-3'-phosphate
  modified_base 10: mod_base = OTHER; note = 2'-fluorocytidine-3'-phosphate
  modified_base 11: mod_base = OTHER; note = 2'-fluorouridine-3'-phosphate
  modified_base 12: mod_base = OTHER; note = 2'-O-methyluridine-3'-phosphate
  modified_base 13: mod_base = OTHER; note = 2'-O-methylcytidine-3'-phosphate
  modified_base 14: mod_base = OTHER; note = 2'-O-methyluridine-3'-phosphate
  modified_base 15: mod_base = OTHER; note = 2'-O-methylguanosine-3'-phosphate
  modified_base 16: mod_base = OTHER; note = 2'-O-methylcytidine-3'-phosphate
  modified_base 17: mod_base = OTHER; note = 2'-O-methyladenosine-3'-phosphate
  modified_base 18: mod_base = OTHER; note = 2'-O-methyluridine-3'-phosphate
  modified_base 19: mod_base = OTHER; note = 2'-O-methyladenosine-3'-phosphate
  modified_base 20: mod_base = OTHER; note = 2'-O-methylguanosine-3'-phosphate
  modified_base 21: mod_base = OTHER; note = 2'-O-methyluridine-3'-phosphate N-[tris(GalNAc-alkyl)-amidodecanoyl)]-4-hydroxyprolinol (Hyp-(GalNAc-alkyl)3)
cgccatgaacttctgcatagt

SEQ ID NO: 5161 - RNA, 21 nt, synthetic construct
  source 1..21: mol_type = other RNA
  modified_base 1: mod_base = OTHER; note = 2'-O-methyluridine-3'-phosphorothioate
  modified_base 2: mod_base = OTHER; note = 2'-O-methylguanosine-3'-phosphorothioate
  modified_base 3: mod_base = OTHER; note = 2'-O-methylcytidine-3'-phosphate
  modified_base 4: mod_base = OTHER; note = 2'-O-methylcytidine-3'-phosphate
  modified_base 5: mod_base = OTHER; note = 2'-O-methylcytidine-3'-phosphate
  modified_base 6: mod_base = OTHER; note = 2'-O-methyladenosine-3'-phosphate
  modified_base 7: mod_base = OTHER; note = 2'-fluorocytidine-3'-phosphate
  modified_base 8: mod_base = OTHER; note = 2'-O-methyluridine-3'-phosphate
  modified_base 9: mod_base = OTHER; note = 2'-fluoroadenosine-3'-phosphate
  modified_base 10: mod_base = OTHER; note = 2'-fluorocytidine-3'-phosphate
  modified_base 11: mod_base = OTHER; note = 2'-fluoroadenosine-3'-phosphate
  modified_base 12: mod_base = OTHER; note = 2'-O-methylcytidine-3'-phosphate
  modified_base 13: mod_base = OTHER; note = 2'-O-methyladenosine-3'-phosphate
  modified_base 14: mod_base = OTHER; note = 2'-O-methyluridine-3'-phosphate
  modified_base 15: mod_base = OTHER; note = 2'-O-methyladenosine-3'-phosphate
  modified_base 16: mod_base = OTHER; note = 2'-O-methylguanosine-3'-phosphate
  modified_base 17: mod_base = OTHER; note = 2'-O-methylcytidine-3'-phosphate
  modified_base 18: mod_base = OTHER; note = 2'-O-methyladenosine-3'-phosphate
  modified_base 19: mod_base = OTHER; note = 2'-O-methylguanosine-3'-phosphate
  modified_base 20: mod_base = OTHER; note = 2'-O-methylguanosine-3'-phosphate
  modified_base 21: mod_base = OTHER; note = 2'-O-methyluridine-3'-phosphate N-[tris(GalNAc-alkyl)-amidodecanoyl)]-4-hydroxyprolinol (Hyp-(GalNAc-alkyl)3)
tgcccactacacatagcaggt

SEQ ID NO: 5162 - RNA, 21 nt, synthetic construct
  source 1..21: mol_type = other RNA
  modified_base 1: mod_base = OTHER; note = 2'-O-methylguanosine-3'-phosphorothioate
  modified_base 2: mod_base = OTHER; note = 2'-O-methylguanosine-3'-phosphorothioate
  modified_base 3: mod_base = OTHER; note = 2'-O-methylcytidine-3'-phosphate
  modified_base 4: mod_base = OTHER; note = 2'-O-methyladenosine-3'-phosphate
  modified_base 5: mod_base = OTHER; note = 2'-O-methyluridine-3'-phosphate
  modified_base 6: mod_base = OTHER; note = 2'-O-methylguanosine-3'-phosphate
  modified_base 7: mod_base = OTHER; note = 2'-fluorocytidine-3'-phosphate
  modified_base 8: mod_base = OTHER; note = 2'-O-methylcytidine-3'-phosphate
  modified_base 9: mod_base = OTHER; note = 2'-fluorouridine-3'-phosphate
  modified_base 10: mod_base = OTHER; note = 2'-fluoroguanosine-3'-phosphate
  modified_base 11: mod_base = OTHER; note = 2'-fluoroguanosine-3'-phosphate
  modified_base 12: mod_base = OTHER; note = 2'-O-methyluridine-3'-phosphate
  modified_base 13: mod_base = OTHER; note = 2'-O-methyladenosine-3'-phosphate
  modified_base 14: mod_base = OTHER; note = 2'-O-methyluridine-3'-phosphate
  modified_base 15: mod_base = OTHER; note = 2'-O-methyluridine-3'-phosphate
  modified_base 16: mod_base = OTHER; note = 2'-O-methylguanosine-3'-phosphate
  modified_base 17: mod_base = OTHER; note = 2'-O-methylcytidine-3'-phosphate
  modified_base 18: mod_base = OTHER; note = 2'-O-methyluridine-3'-phosphate
  modified_base 19: mod_base = OTHER; note = 2'-O-methylguanosine-3'-phosphate
  modified_base 20: mod_base = OTHER; note = 2'-O-methylcytidine-3'-phosphate
  modified_base 21: mod_base = OTHER; note = 2'-O-methyluridine-3'-phosphate N-[tris(GalNAc-alkyl)-amidodecanoyl)]-4-hydroxyprolinol (Hyp-(GalNAc-alkyl)3)
ggcatgcctggtattgctgct

SEQ ID NO: 5163 - RNA, 21 nt, synthetic construct
  source 1..21: mol_type = other RNA
  modified_base 1: mod_base = OTHER; note = 2'-O-methylcytidine-3'-phosphorothioate
  modified_base 2: mod_base = OTHER; note = 2'-O-methyluridine-3'-phosphorothioate
  modified_base 3: mod_base = OTHER; note = 2'-O-methylguanosine-3'-phosphate
  modified_base 4: mod_base = OTHER; note = 2'-O-methylcytidine-3'-phosphate
  modified_base 5: mod_base = OTHER; note = 2'-O-methylcytidine-3'-phosphate
  modified_base 6: mod_base = OTHER; note = 2'-O-methyluridine-3'-phosphate
  modified_base 7: mod_base = OTHER; note = 2'-fluorocytidine-3'-phosphate
  modified_base 8: mod_base = OTHER; note = 2'-O-methylcytidine-3'-phosphate
  modified_base 9: mod_base = OTHER; note = 2'-fluorouridine-3'-phosphate
  modified_base 10: mod_base = OTHER; note = 2'-fluorouridine-3'-phosphate
  modified_base 11: mod_base = OTHER; note = 2'-fluorouridine-3'-phosphate
  modified_base 12: mod_base = OTHER; note = 2'-O-methylcytidine-3'-phosphate
  modified_base 13: mod_base = OTHER; note = 2'-O-methyladenosine-3'-phosphate
  modified_base 14: mod_base = OTHER; note = 2'-O-methylcytidine-3'-phosphate
  modified_base 15: mod_base = OTHER; note = 2'-O-methyladenosine-3'-phosphate
  modified_base 16: mod_base = OTHER; note = 2'-O-methylcytidine-3'-phosphate
  modified_base 17: mod_base = OTHER; note = 2'-O-methyluridine-3'-phosphate
  modified_base 18: mod_base = OTHER; note = 2'-O-methylguanosine-3'-phosphate
  modified_base 19: mod_base = OTHER; note = 2'-O-methylcytidine-3'-phosphate
  modified_base 20: mod_base = OTHER; note = 2'-O-methyladenosine-3'-phosphate
  modified_base 21: mod_base = OTHER; note = 2'-O-methyluridine-3'-phosphate N-[tris(GalNAc-alkyl)-amidodecanoyl)]-4-hydroxyprolinol (Hyp-(GalNAc-alkyl)3)
ctgcctcctttcacactgcat

SEQ ID NO: 5164 - RNA, 21 nt, synthetic construct
  source 1..21: mol_type = other RNA
  modified_base 1: mod_base = OTHER; note = 2'-O-methylguanosine-3'-phosphorothioate
  modified_base 2: mod_base = OTHER; note = 2'-O-methylcytidine-3'-phosphorothioate
  modified_base 3: mod_base = OTHER; note = 2'-O-methyladenosine-3'-phosphate
  modified_base 4: mod_base = OTHER; note = 2'-O-methylguanosine-3'-phosphate
  modified_base 5: mod_base = OTHER; note = 2'-O-methyluridine-3'-phosphate
  modified_base 6: mod_base = OTHER; note = 2'-O-methylguanosine-3'-phosphate
  modified_base 7: mod_base = OTHER; note = 2'-fluorocytidine-3'-phosphate
  modified_base 8: mod_base = OTHER; note = 2'-O-methyluridine-3'-phosphate
  modified_base 9: mod_base = OTHER; note = 2'-fluorocytidine-3'-phosphate
  modified_base 10: mod_base = OTHER; note = 2'-fluoroadenosine-3'-phosphate
  modified_base 11: mod_base = OTHER; note = 2'-fluoroadenosine-3'-phosphate
  modified_base 12: mod_base = OTHER; note = 2'-O-methyluridine-3'-phosphate
  modified_base 13: mod_base = OTHER; note = 2'-O-methylcytidine-3'-phosphate
  modified_base 14: mod_base = OTHER; note = 2'-O-methyluridine-3'-phosphate
  modified_base 15: mod_base = OTHER; note = 2'-O-methyluridine-3'-phosphate
  modified_base 16: mod_base = OTHER; note = 2'-O-methylcytidine-3'-phosphate
  modified_base 17: mod_base = OTHER; note = 2'-O-methyluridine-3'-phosphate
  modified_base 18: mod_base = OTHER; note = 2'-O-methylcytidine-3'-phosphate
  modified_base 19: mod_base = OTHER; note = 2'-O-methyladenosine-3'-phosphate
  modified_base 20: mod_base = OTHER; note = 2'-O-methyladenosine-3'-phosphate
  modified_base 21: mod_base = OTHER; note = 2'-O-methyluridine-3'-phosphate N-[tris(GalNAc-alkyl)-amidodecanoyl)]-4-hydroxyprolinol (Hyp-(GalNAc-alkyl)3)
gcagtgctcaatcttctcaat

SEQ ID NO: 5165 - RNA, 21 nt, synthetic construct
  source 1..21: mol_type = other RNA
  modified_base 1: mod_base = OTHER; note = 2'-O-methyladenosine-3'-phosphorothioate
  modified_base 2: mod_base = OTHER; note = 2'-O-methyladenosine-3'-phosphorothioate
  modified_base 3: mod_base = OTHER; note = 2'-O-methylguanosine-3'-phosphate
  modified_base 4: mod_base = OTHER; note = 2'-O-methylguanosine-3'-phosphate
  modified_base 5: mod_base = OTHER; note = 2'-O-methylcytidine-3'-phosphate
  modified_base 6: mod_base = OTHER; note = 2'-O-methylcytidine-3'-phosphate
  modified_base 7: mod_base = OTHER; note = 2'-fluoroadenosine-3'-phosphate
  modified_base 8: mod_base = OTHER; note = 2'-O-methyladenosine-3'-phosphate
  modified_base 9: mod_base = OTHER; note = 2'-fluorocytidine-3'-phosphate
  modified_base 10: mod_base = OTHER; note = 2'-fluoroadenosine-3'-phosphate
  modified_base 11: mod_base = OTHER; note = 2'-fluorocytidine-3'-phosphate
  modified_base 12: mod_base = OTHER; note = 2'-O-methyladenosine-3'-phosphate
  modified_base 13: mod_base = OTHER; note = 2'-O-methylguanosine-3'-phosphate
  modified_base 14: mod_base = OTHER; note = 2'-O-methylcytidine-3'-phosphate
  modified_base 15: mod_base = OTHER; note = 2'-O-methyluridine-3'-phosphate
  modified_base 16: mod_base = OTHER; note = 2'-O-methylguanosine-3'-phosphate
  modified_base 17: mod_base = OTHER; note = 2'-O-methylcytidine-3'-phosphate
  modified_base 18: mod_base = OTHER; note = 2'-O-methyladenosine-3'-phosphate
  modified_base 19: mod_base = OTHER; note = 2'-O-methylguanosine-3'-phosphate
  modified_base 20: mod_base = OTHER; note = 2'-O-methylguanosine-3'-phosphate
  modified_base 21: mod_base = OTHER; note = 2'-O-methyluridine-3'-phosphate N-[tris(GalNAc-alkyl)-amidodecanoyl)]-4-hydroxyprolinol (Hyp-(GalNAc-alkyl)3)
aaggccaacacagctgcaggt

SEQ ID NO: 5166 - RNA, 21 nt, synthetic construct
  source 1..21: mol_type = other RNA
  modified_base 1: mod_base = OTHER; note = 2'-O-methylguanosine-3'-phosphorothioate
  modified_base 2: mod_base = OTHER; note = 2'-O-methylcytidine-3'-phosphorothioate
  modified_base 3: mod_base = OTHER; note = 2'-O-methyluridine-3'-phosphate
  modified_base 4: mod_base = OTHER; note = 2'-O-methylcytidine-3'-phosphate
  modified_base 5: mod_base = OTHER; note = 2'-O-methyladenosine-3'-phosphate
  modified_base 6: mod_base = OTHER; note = 2'-O-methyluridine-3'-phosphate
  modified_base 7: mod_base = OTHER; note = 2'-fluoroguanosine-3'-phosphate
  modified_base 8: mod_base = OTHER; note = 2'-O-methylcytidine-3'-phosphate
  modified_base 9: mod_base = OTHER; note = 2'-fluorouridine-3'-phosphate
  modified_base 10: mod_base = OTHER; note = 2'-fluoroguanosine-3'-phosphate
  modified_base 11: mod_base = OTHER; note = 2'-fluorouridine-3'-phosphate
  modified_base 12: mod_base = OTHER; note = 2'-O-methylguanosine-3'-phosphate
  modified_base 13: mod_base = OTHER; note = 2'-O-methyluridine-3'-phosphate
  modified_base 14: mod_base = OTHER; note = 2'-O-methyladenosine-3'-phosphate
  modified_base 15: mod_base = OTHER; note = 2'-O-methylcytidine-3'-phosphate
  modified_base 16: mod_base = OTHER; note = 2'-O-methylcytidine-3'-phosphate
  modified_base 17: mod_base = OTHER; note = 2'-O-methylcytidine-3'-phosphate
  modified_base 18: mod_base = OTHER; note = 2'-O-methyladenosine-3'-phosphate
  modified_base 19: mod_base = OTHER; note = 2'-O-methylcytidine-3'-phosphate
  modified_base 20: mod_base = OTHER; note = 2'-O-methylguanosine-3'-phosphate
  modified_base 21: mod_base = OTHER; note = 2'-O-methyluridine-3'-phosphate N-[tris(GalNAc-alkyl)-amidodecanoyl)]-4-hydroxyprolinol (Hyp-(GalNAc-alkyl)3)
gctcatgctgtgtacccacgt

SEQ ID NO: 5167 - RNA, 21 nt, synthetic construct
  source 1..21: mol_type = other RNA
  modified_base 1: mod_base = OTHER; note = 2'-O-methylguanosine-3'-phosphorothioate
  modified_base 2: mod_base = OTHER; note = 2'-O-methyluridine-3'-phosphorothioate
  modified_base 3: mod_base = OTHER; note = 2'-O-methylcytidine-3'-phosphate
  modified_base 4: mod_base = OTHER; note = 2'-O-methyluridine-3'-phosphate
  modified_base 5: mod_base = OTHER; note = 2'-O-methylcytidine-3'-phosphate
  modified_base 6: mod_base = OTHER; note = 2'-O-methyluridine-3'-phosphate
  modified_base 7: mod_base = OTHER; note = 2'-fluoroguanosine-3'-phosphate
  modified_base 8: mod_base = OTHER; note = 2'-O-methylcytidine-3'-phosphate
  modified_base 9: mod_base = OTHER; note = 2'-fluorouridine-3'-phosphate
  modified_base 10: mod_base = OTHER; note = 2'-fluorocytidine-3'-phosphate
  modified_base 11: mod_base = OTHER; note = 2'-fluorouridine-3'-phosphate
  modified_base 12: mod_base = OTHER; note = 2'-O-methyladenosine-3'-phosphate
  modified_base 13: mod_base = OTHER; note = 2'-O-methyluridine-3'-phosphate
  modified_base 14: mod_base = OTHER; note = 2'-O-methyluridine-3'-phosphate
  modified_base 15: mod_base = OTHER; note = 2'-O-methyladenosine-3'-phosphate
  modified_base 16: mod_base = OTHER; note = 2'-O-methyluridine-3'-phosphate
  modified_base 17: mod_base = OTHER; note = 2'-O-methylguanosine-3'-phosphate
  modified_base 18: mod_base = OTHER; note = 2'-O-methyladenosine-3'-phosphate
  modified_base 19: mod_base = OTHER; note = 2'-O-methylcytidine-3'-phosphate
  modified_base 20: mod_base = OTHER; note = 2'-O-methyladenosine-3'-phosphate
  modified_base 21: mod_base = OTHER; note = 2'-O-methyluridine-3'-phosphate N-[tris(GalNAc-alkyl)-amidodecanoyl)]-4-hydroxyprolinol (Hyp-(GalNAc-alkyl)3)
gtctctgctctattatgacat

SEQ ID NO: 5168 - RNA, 21 nt, synthetic construct
  source 1..21: mol_type = other RNA
  modified_base 1: mod_base = OTHER; note = 2'-O-methylguanosine-3'-phosphorothioate
  modified_base 2: mod_base = OTHER; note = 2'-O-methyladenosine-3'-phosphorothioate
  modified_base 3: mod_base = OTHER; note = 2'-O-methylcytidine-3'-phosphate
  modified_base 4: mod_base = OTHER; note = 2'-O-methyladenosine-3'-phosphate
  modified_base 5: mod_base = OTHER; note = 2'-O-methylguanosine-3'-phosphate
  modified_base 6: mod_base = OTHER; note = 2'-O-methylguanosine-3'-phosphate
  modified_base 7: mod_base = OTHER; note = 2'-fluoroguanosine-3'-phosphate
  modified_base 8: mod_base = OTHER; note = 2'-O-methyladenosine-3'-phosphate
  modified_base 9: mod_base = OTHER; note = 2'-fluorocytidine-3'-phosphate
  modified_base 10: mod_base = OTHER; note = 2'-fluoroadenosine-3'-phosphate
  modified_base 11: mod_base = OTHER; note = 2'-fluoroguanosine-3'-phosphate
  modified_base 12: mod_base = OTHER; note = 2'-O-methylcytidine-3'-phosphate
  modified_base 13: mod_base = OTHER; note = 2'-O-methyladenosine-3'-phosphate
  modified_base 14: mod_base = OTHER; note = 2'-O-methyladenosine-3'-phosphate
  modified_base 15: mod_base = OTHER; note = 2'-O-methylcytidine-3'-phosphate
  modified_base 16: mod_base = OTHER; note = 2'-O-methyladenosine-3'-phosphate
  modified_base 17: mod_base = OTHER; note = 2'-O-methyluridine-3'-phosphate
  modified_base 18: mod_base = OTHER; note = 2'-O-methyluridine-3'-phosphate
  modified_base 19: mod_base = OTHER; note = 2'-O-methylguanosine-3'-phosphate
  modified_base 20: mod_base = OTHER; note = 2'-O-methyluridine-3'-phosphate
  modified_base 21: mod_base = OTHER; note = 2'-O-methyluridine-3'-phosphate N-[tris(GalNAc-alkyl)-amidodecanoyl)]-4-hydroxyprolinol (Hyp-(GalNAc-alkyl)3)
gacagggacagcaacattgtt

SEQ ID NO: 5169 - RNA, 21 nt, synthetic construct
  source 1..21: mol_type = other RNA
  modified_base 1: mod_base = OTHER; note = 2'-O-methyluridine-3'-phosphorothioate
  modified_base 2: mod_base = OTHER; note = 2'-O-methylguanosine-3'-phosphorothioate
  modified_base 3: mod_base = OTHER; note = 2'-O-methyluridine-3'-phosphate
  modified_base 4: mod_base = OTHER; note = 2'-O-methylcytidine-3'-phosphate
  modified_base 5: mod_base = OTHER; note = 2'-O-methyladenosine-3'-phosphate
  modified_base 6: mod_base = OTHER; note = 2'-O-methyladenosine-3'-phosphate
  modified_base 7: mod_base = OTHER; note = 2'-fluoroguanosine-3'-phosphate
  modified_base 8: mod_base = OTHER; note = 2'-O-methyladenosine-3'-phosphate
  modified_base 9: mod_base = OTHER; note = 2'-fluorocytidine-3'-phosphate
  modified_base 10: mod_base = OTHER; note = 2'-fluorouridine-3'-phosphate
  modified_base 11: mod_base = OTHER; note = 2'-fluoroguanosine-3'-phosphate
  modified_base 12: mod_base = OTHER; note = 2'-O-methyladenosine-3'-phosphate
  modified_base 13: mod_base = OTHER; note = 2'-O-methylcytidine-3'-phosphate
  modified_base 14: mod_base = OTHER; note = 2'-O-methyladenosine-3'-phosphate
  modified_base 15: mod_base = OTHER; note = 2'-O-methyluridine-3'-phosphate
  modified_base 16: mod_base = OTHER; note = 2'-O-methyladenosine-3'-phosphate
  modified_base 17: mod_base = OTHER; note = 2'-O-methylcytidine-3'-phosphate
  modified_base 18: mod_base = OTHER; note = 2'-O-methylcytidine-3'-phosphate
  modified_base 19: mod_base = OTHER; note = 2'-O-methyluridine-3'-phosphate
  modified_base 20: mod_base = OTHER; note = 2'-O-methylguanosine-3'-phosphate
  modified_base 21: mod_base = OTHER; note = 2'-O-methyluridine-3'-phosphate N-[tris(GalNAc-alkyl)-amidodecanoyl)]-4-hydroxyprolinol (Hyp-(GalNAc-alkyl)3)
tgtcaagactgacatacctgt

SEQ ID NO: 5170 - RNA, 21 nt, synthetic construct
  source 1..21: mol_type = other RNA
  modified_base 1: mod_base = OTHER; note = 2'-O-methylcytidine-3'-phosphorothioate
  modified_base 2: mod_base = OTHER; note = 2'-O-methylcytidine-3'-phosphorothioate
  modified_base 3: mod_base = OTHER; note = 2'-O-methyluridine-3'-phosphate
  modified_base 4: mod_base = OTHER; note = 2'-O-methylguanosine-3'-phosphate
  modified_base 5: mod_base = OTHER; note = 2'-O-methyladenosine-3'-phosphate
  modified_base 6: mod_base = OTHER; note = 2'-O-methylcytidine-3'-phosphate
  modified_base 7: mod_base = OTHER; note = 2'-fluoroadenosine-3'-phosphate
  modified_base 8: mod_base = OTHER; note = 2'-O-methyluridine-3'-phosphate
  modified_base 9: mod_base = OTHER; note = 2'-fluoroguanosine-3'-phosphate
  modified_base 10: mod_base = OTHER; note = 2'-fluoroguanosine-3'-phosphate
  modified_base 11: mod_base = OTHER; note = 2'-fluorouridine-3'-phosphate
  modified_base 12: mod_base = OTHER; note = 2'-O-methyladenosine-3'-phosphate
  modified_base 13: mod_base = OTHER; note = 2'-O-methylguanosine-3'-phosphate
  modified_base 14: mod_base = OTHER; note = 2'-O-methyluridine-3'-phosphate
  modified_base 15: mod_base = OTHER; note = 2'-O-methyladenosine-3'-phosphate
  modified_base 16: mod_base = OTHER; note = 2'-O-methylguanosine-3'-phosphate
  modified_base 17: mod_base = OTHER; note = 2'-O-methyladenosine-3'-phosphate
  modified_base 18: mod_base = OTHER; note = 2'-O-methylguanosine-3'-phosphate
  modified_base 19: mod_base = OTHER; note = 2'-O-methylguanosine-3'-phosphate
  modified_base 20: mod_base = OTHER; note = 2'-O-methylcytidine-3'-phosphate
  modified_base 21: mod_base = OTHER; note = 2'-O-methyluridine-3'-phosphate N-[tris(GalNAc-alkyl)-amidodecanoyl)]-4-hydroxyprolinol (Hyp-(GalNAc-alkyl)3)
cctgacatggtagtagaggct

SEQ ID NO: 5171 - RNA, 21 nt, synthetic construct
  source 1..21: mol_type = other RNA
  modified_base 1: mod_base = OTHER; note = 2'-O-methyladenosine-3'-phosphorothioate
  modified_base 2: mod_base = OTHER; note = 2'-O-methylguanosine-3'-phosphorothioate
  modified_base 3: mod_base = OTHER; note = 2'-O-methyluridine-3'-phosphate
  modified_base 4: mod_base = OTHER; note = 2'-O-methyluridine-3'-phosphate
  modified_base 5: mod_base = OTHER; note = 2'-O-methyladenosine-3'-phosphate
  modified_base 6: mod_base = OTHER; note = 2'-O-methylguanosine-3'-phosphate
  modified_base 7: mod_base = OTHER; note = 2'-fluorouridine-3'-phosphate
  modified_base 8: mod_base = OTHER; note = 2'-O-methylcytidine-3'-phosphate
  modified_base 9: mod_base = OTHER; note = 2'-fluorouridine-3'-phosphate
  modified_base 10: mod_base = OTHER; note = 2'-fluoroadenosine-3'-phosphate
  modified_base 11: mod_base = OTHER; note = 2'-fluorouridine-3'-phosphate
  modified_base 12: mod_base = OTHER; note = 2'-O-methylguanosine-3'-phosphate
  modified_base 13: mod_base = OTHER; note = 2'-O-methyluridine-3'-phosphate
  modified_base 14: mod_base = OTHER; note = 2'-O-methylguanosine-3'-phosphate
  modified_base 15: mod_base = OTHER; note = 2'-O-methyluridine-3'-phosphate
  modified_base 16: mod_base = OTHER; note = 2'-O-methylguanosine-3'-phosphate
  modified_base 17: mod_base = OTHER; note = 2'-O-methylguanosine-3'-phosphate
  modified_base 18: mod_base = OTHER; note = 2'-O-methyluridine-3'-phosphate
  modified_base 19: mod_base = OTHER; note = 2'-O-methyladenosine-3'-phosphate
  modified_base 20: mod_base = OTHER; note = 2'-O-methyluridine-3'-phosphate
  modified_base 21: mod_base = OTHER; note = 2'-O-methyluridine-3'-phosphate N-[tris(GalNAc-alkyl)-amidodecanoyl)]-4-hydroxyprolinol (Hyp-(GalNAc-alkyl)3)
agttagtctatgtgtggtatt

SEQ ID NO: 5172 - RNA, 21 nt, synthetic construct
  source 1..21: mol_type = other RNA
  modified_base 1: mod_base = OTHER; note = 2'-O-methylcytidine-3'-phosphorothioate
  modified_base 2: mod_base = OTHER; note = 2'-O-methylcytidine-3'-phosphorothioate
  modified_base 3: mod_base = OTHER; note = 2'-O-methyladenosine-3'-phosphate
  modified_base 4: mod_base = OTHER; note = 2'-O-methyladenosine-3'-phosphate
  modified_base 5: mod_base = OTHER; note = 2'-O-methylguanosine-3'-phosphate
  modified_base 6: mod_base = OTHER; note = 2'-O-methylguanosine-3'-phosphate
  modified_base 7: mod_base = OTHER; note = 2'-fluorouridine-3'-phosphate
  modified_base 8: mod_base = OTHER; note = 2'-O-methyluridine-3'-phosphate
  modified_base 9: mod_base = OTHER; note = 2'-fluoroguanosine-3'-phosphate
  modified_base 10: mod_base = OTHER; note = 2'-fluorocytidine-3'-phosphate
  modified_base 11: mod_base = OTHER; note = 2'-fluoroadenosine-3'-phosphate
  modified_base 12: mod_base = OTHER; note = 2'-O-methyluridine-3'-phosphate
  modified_base 13: mod_base = OTHER; note = 2'-O-methylguanosine-3'-phosphate
  modified_base 14: mod_base = OTHER; note = 2'-O-methylguanosine-3'-phosphate
  modified_base 15: mod_base = OTHER; note = 2'-O-methylguanosine-3'-phosphate
  modified_base 16: mod_base = OTHER; note = 2'-O-methyladenosine-3'-phosphate
  modified_base 17: mod_base = OTHER; note = 2'-O-methyladenosine-3'-phosphate
  modified_base 18: mod_base = OTHER; note = 2'-O-methyladenosine-3'-phosphate
  modified_base 19: mod_base = OTHER; note = 2'-O-methyladenosine-3'-phosphate
  modified_base 20: mod_base = OTHER; note = 2'-O-methylcytidine-3'-phosphate
  modified_base 21: mod_base = OTHER; note = 2'-O-methyluridine-3'-phosphate N-[tris(GalNAc-alkyl)-amidodecanoyl)]-4-hydroxyprolinol (Hyp-(GalNAc-alkyl)3)
ccaaggttgcatgggaaaact

SEQ ID NO: 5173 - RNA, 21 nt, synthetic construct
  source 1..21: mol_type = other RNA
  modified_base 1: mod_base = OTHER; note = 2'-O-methyladenosine-3'-phosphorothioate
  modified_base 2: mod_base = OTHER; note = 2'-O-methylcytidine-3'-phosphorothioate
  modified_base 3: mod_base = OTHER; note = 2'-O-methyladenosine-3'-phosphate
  modified_base 4: mod_base = OTHER; note = 2'-O-methylguanosine-3'-phosphate
  modified_base 5: mod_base = OTHER; note = 2'-O-methyladenosine-3'-phosphate
  modified_base 6: mod_base = OTHER; note = 2'-O-methyladenosine-3'-phosphate
  modified_base 7: mod_base = OTHER; note = 2'-fluoroguanosine-3'-phosphate
  modified_base 8: mod_base = OTHER; note = 2'-O-methyluridine-3'-phosphate
  modified_base 9: mod_base = OTHER; note = 2'-fluoroguanosine-3'-phosphate
  modified_base 10: mod_base = OTHER; note = 2'-fluorocytidine-3'-phosphate
  modified_base 11: mod_base = OTHER; note = 2'-fluoroadenosine-3'-phosphate
  modified_base 12: mod_base = OTHER; note = 2'-O-methylcytidine-3'-phosphate
  modified_base 13: mod_base = OTHER; note = 2'-O-methyluridine-3'-phosphate
  modified_base 14: mod_base = OTHER; note = 2'-O-methyluridine-3'-phosphate
  modified_base 15: mod_base = OTHER; note = 2'-O-methylcytidine-3'-phosphate
  modified_base 16: mod_base = OTHER; note = 2'-O-methylcytidine-3'-phosphate
  modified_base 17: mod_base = OTHER; note = 2'-O-methyluridine-3'-phosphate
  modified_base 18: mod_base = OTHER; note = 2'-O-methyluridine-3'-phosphate
  modified_base 19: mod_base = OTHER; note = 2'-O-methylguanosine-3'-phosphate
  modified_base 20: mod_base = OTHER; note = 2'-O-methyladenosine-3'-phosphate
  modified_base 21: mod_base = OTHER; note = 2'-O-methyluridine-3'-phosphate N-[tris(GalNAc-alkyl)-amidodecanoyl)]-4-hydroxyprolinol (Hyp-(GalNAc-alkyl)3)
acagaagtgcacttccttgat

SEQ ID NO: 5174 - RNA, 21 nt, synthetic construct
  source 1..21: mol_type = other RNA
  modified_base 1: mod_base = OTHER; note = 2'-O-methyladenosine-3'-phosphorothioate
  modified_base 2: mod_base = OTHER; note = 2'-O-methylguanosine-3'-phosphorothioate
  modified_base 3: mod_base = OTHER; note = 2'-O-methyladenosine-3'-phosphate
  modified_base 4: mod_base = OTHER; note = 2'-O-methylguanosine-3'-phosphate
  modified_base 5: mod_base = OTHER; note = 2'-O-methylguanosine-3'-phosphate
  modified_base 6: mod_base = OTHER; note = 2'-O-methyladenosine-3'-phosphate
  modified_base 7: mod_base = OTHER; note = 2'-fluoroguanosine-3'-phosphate
  modified_base 8: mod_base = OTHER; note = 2'-O-methylguanosine-3'-phosphate
  modified_base 9: mod_base = OTHER; note = 2'-fluoroguanosine-3'-phosphate
  modified_base 10: mod_base = OTHER; note = 2'-fluoroadenosine-3'-phosphate
  modified_base 11: mod_base = OTHER; note = 2'-fluoroadenosine-3'-phosphate
  modified_base 12: mod_base = OTHER; note = 2'-O-methyluridine-3'-phosphate
  modified_base 13: mod_base = OTHER; note = 2'-O-methylguanosine-3'-phosphate
  modified_base 14: mod_base = OTHER; note = 2'-O-methyladenosine-3'-phosphate
  modified_base 15: mod_base = OTHER; note = 2'-O-methylcytidine-3'-phosphate
  modified_base 16: mod_base = OTHER; note = 2'-O-methylcytidine-3'-phosphate
  modified_base 17: mod_base = OTHER; note = 2'-O-methyluridine-3'-phosphate
  modified_base 18: mod_base = OTHER; note = 2'-O-methylcytidine-3'-phosphate
  modified_base 19: mod_base = OTHER; note = 2'-O-methyladenosine-3'-phosphate
  modified_base 20: mod_base = OTHER; note = 2'-O-methyluridine-3'-phosphate
  modified_base 21: mod_base = OTHER; note = 2'-O-methyluridine-3'-phosphate N-[tris(GalNAc-alkyl)-amidodecanoyl)]-4-hydroxyprolinol (Hyp-(GalNAc-alkyl)3)
agaggagggaatgacctcatt

SEQ ID NO: 5175 - RNA, 21 nt, synthetic construct
  source 1..21: mol_type = other RNA
  modified_base 1: mod_base = OTHER; note = 2'-O-methyluridine-3'-phosphorothioate
  modified_base 2: mod_base = OTHER; note = 2'-O-methylcytidine-3'-phosphorothioate
  modified_base 3: mod_base = OTHER; note = 2'-O-methyladenosine-3'-phosphate
  modified_base 4: mod_base = OTHER; note = 2'-O-methyluridine-3'-phosphate
  modified_base 5: mod_base = OTHER; note = 2'-O-methyluridine-3'-phosphate
  modified_base 6: mod_base = OTHER; note = 2'-O-methylcytidine-3'-phosphate
  modified_base 7: mod_base = OTHER; note = 2'-fluorouridine-3'-phosphate
  modified_base 8: mod_base = OTHER; note = 2'-O-methylcytidine-3'-phosphate
  modified_base 9: mod_base = OTHER; note = 2'-fluorouridine-3'-phosphate
  modified_base 10: mod_base = OTHER; note = 2'-fluoroguanosine-3'-phosphate
  modified_base 11: mod_base = OTHER; note = 2'-fluorouridine-3'-phosphate
  modified_base 12: mod_base = OTHER; note = 2'-O-methylcytidine-3'-phosphate
  modified_base 13: mod_base = OTHER; note = 2'-O-methylcytidine-3'-phosphate
  modified_base 14: mod_base = OTHER; note = 2'-O-methyladenosine-3'-phosphate
  modified_base 15: mod_base = OTHER; note = 2'-O-methylguanosine-3'-phosphate
  modified_base 16: mod_base = OTHER; note = 2'-O-methyladenosine-3'-phosphate
  modified_base 17: mod_base = OTHER; note = 2'-O-methyladenosine-3'-phosphate
  modified_base 18: mod_base = OTHER; note = 2'-O-methyluridine-3'-phosphate
  modified_base 19: mod_base = OTHER; note = 2'-O-methylguanosine-3'-phosphate
  modified_base 20: mod_base = OTHER; note = 2'-O-methyluridine-3'-phosphate
  modified_base 21: mod_base = OTHER; note = 2'-O-methyluridine-3'-phosphate N-[tris(GalNAc-alkyl)-amidodecanoyl)]-4-hydroxyprolinol (Hyp-(GalNAc-alkyl)3)
tcattctctgtccagaatgtt

SEQ ID NO: 5176 - RNA, 21 nt, synthetic construct
  source 1..21: mol_type = other RNA
  modified_base 1: mod_base = OTHER; note = 2'-O-methylguanosine-3'-phosphorothioate
  modified_base 2: mod_base = OTHER; note = 2'-O-methyluridine-3'-phosphorothioate
  modified_base 3: mod_base = OTHER; note = 2'-O-methylguanosine-3'-phosphate
  modified_base 4: mod_base = OTHER; note = 2'-O-methylguanosine-3'-phosphate
  modified_base 5: mod_base = OTHER; note = 2'-O-methyladenosine-3'-phosphate
  modified_base 6: mod_base = OTHER; note = 2'-O-methylcytidine-3'-phosphate
  modified_base 7: mod_base = OTHER; note = 2'-fluorouridine-3'-phosphate
  modified_base 8: mod_base = OTHER; note = 2'-O-methylcytidine-3'-phosphate
  modified_base 9: mod_base = OTHER; note = 2'-fluorocytidine-3'-phosphate
  modified_base 10: mod_base = OTHER; note = 2'-fluorocytidine-3'-phosphate
  modified_base 11: mod_base = OTHER; note = 2'-fluorouridine-3'-phosphate
  modified_base 12: mod_base = OTHER; note = 2'-O-methylcytidine-3'-phosphate
  modified_base 13: mod_base = OTHER; note = 2'-O-methyluridine-3'-phosphate
  modified_base 14: mod_base = OTHER; note = 2'-O-methyluridine-3'-phosphate
  modified_base 15: mod_base = OTHER; note = 2'-O-methylcytidine-3'-phosphate
  modified_base 16: mod_base = OTHER; note = 2'-O-methylcytidine-3'-phosphate
  modified_base 17: mod_base = OTHER; note = 2'-O-methyluridine-3'-phosphate
  modified_base 18: mod_base = OTHER; note = 2'-O-methylguanosine-3'-phosphate
  modified_base 19: mod_base = OTHER; note = 2'-O-methyladenosine-3'-phosphate
  modified_base 20: mod_base = OTHER; note = 2'-O-methylguanosine-3'-phosphate
  modified_base 21: mod_base = OTHER; note = 2'-O-methyluridine-3'-phosphate N-[tris(GalNAc-alkyl)-amidodecanoyl)]-4-hydroxyprolinol (Hyp-(GalNAc-alkyl)3)
gtggactccctcttcctgagt

SEQ ID NO: 5177 - RNA, 21 nt, synthetic construct
  source 1..21: mol_type = other RNA
  modified_base 1: mod_base = OTHER; note = 2'-O-methylguanosine-3'-phosphorothioate
  modified_base 2: mod_base = OTHER; note = 2'-O-methyladenosine-3'-phosphorothioate
  modified_base 3: mod_base = OTHER; note = 2'-O-methylguanosine-3'-phosphate
  modified_base 4: mod_base = OTHER; note = 2'-O-methylcytidine-3'-phosphate
  modified_base 5: mod_base = OTHER; note = 2'-O-methyladenosine-3'-phosphate
  modified_base 6: mod_base = OTHER; note = 2'-O-methyluridine-3'-phosphate
  modified_base 7: mod_base = OTHER; note = 2'-fluorocytidine-3'-phosphate
  modified_base 8: mod_base = OTHER; note = 2'-O-methyluridine-3'-phosphate
  modified_base 9: mod_base = OTHER; note = 2'-fluorouridine-3'-phosphate
  modified_base 10: mod_base = OTHER; note = 2'-fluoroadenosine-3'-phosphate
  modified_base 11: mod_base = OTHER; note = 2'-fluorouridine-3'-phosphate
  modified_base 12: mod_base = OTHER; note = 2'-O-methylguanosine-3'-phosphate
  modified_base 13: mod_base = OTHER; note = 2'-O-methylguanosine-3'-phosphate
  modified_base 14: mod_base = OTHER; note = 2'-O-methyladenosine-3'-phosphate
  modified_base 15: mod_base = OTHER; note = 2'-O-methyladenosine-3'-phosphate
  modified_base 16: mod_base = OTHER; note = 2'-O-methyladenosine-3'-phosphate
  modified_base 17: mod_base = OTHER; note = 2'-O-methyluridine-3'-phosphate
  modified_base 18: mod_base = OTHER; note = 2'-O-methyluridine-3'-phosphate
  modified_base 19: mod_base = OTHER; note = 2'-O-methyladenosine-3'-phosphate
  modified_base 20: mod_base = OTHER; note = 2'-O-methylcytidine-3'-phosphate
  modified_base 21: mod_base = OTHER; note = 2'-O-methyluridine-3'-phosphate N-[tris(GalNAc-alkyl)-amidodecanoyl)]-4-hydroxyprolinol (Hyp-(GalNAc-alkyl)3)
gagcatcttatggaaattact

SEQ ID NO: 5178 - RNA, 21 nt, synthetic construct
  source 1..21: mol_type = other RNA
  modified_base 1: mod_base = OTHER; note = 2'-O-methylcytidine-3'-phosphorothioate
  modified_base 2: mod_base = OTHER; note = 2'-O-methyladenosine-3'-phosphorothioate
  modified_base 3: mod_base = OTHER; note = 2'-O-methylcytidine-3'-phosphate
  modified_base 4: mod_base = OTHER; note = 2'-O-methylcytidine-3'-phosphate
  modified_base 5: mod_base = OTHER; note = 2'-O-methyluridine-3'-phosphate
  modified_base 6: mod_base = OTHER; note = 2'-O-methyluridine-3'-phosphate
  modified_base 7: mod_base = OTHER; note = 2'-fluorouridine-3'-phosphate
  modified_base 8: mod_base = OTHER; note = 2'-O-methylguanosine-3'-phosphate
  modified_base 9: mod_base = OTHER; note = 2'-fluoroadenosine-3'-phosphate
  modified_base 10: mod_base = OTHER; note = 2'-fluorocytidine-3'-phosphate
  modified_base 11: mod_base = OTHER; note = 2'-fluorouridine-3'-phosphate
  modified_base 12: mod_base = OTHER; note = 2'-O-methyluridine-3'-phosphate
  modified_base 13: mod_base = OTHER; note = 2'-O-methylguanosine-3'-phosphate
  modified_base 14: mod_base = OTHER; note = 2'-O-methyladenosine-3'-phosphate
  modified_base 15: mod_base = OTHER; note = 2'-O-methyladenosine-3'-phosphate
  modified_base 16: mod_base = OTHER; note = 2'-O-methylguanosine-3'-phosphate
  modified_base 17: mod_base = OTHER; note = 2'-O-methyladenosine-3'-phosphate
  modified_base 18: mod_base = OTHER; note = 2'-O-methyladenosine-3'-phosphate
  modified_base 19: mod_base = OTHER; note = 2'-O-methyladenosine-3'-phosphate
  modified_base 20: mod_base = OTHER; note = 2'-O-methylcytidine-3'-phosphate
  modified_base 21: mod_base = OTHER; note = 2'-O-methyluridine-3'-phosphate N-[tris(GalNAc-alkyl)-amidodecanoyl)]-4-hydroxyprolinol (Hyp-(GalNAc-alkyl)3)
cacctttgacttgaagaaact

SEQ ID NO: 5179 - RNA, 21 nt, synthetic construct
  source 1..21: mol_type = other RNA
  modified_base 1: mod_base = OTHER; note = 2'-O-methylcytidine-3'-phosphorothioate
  modified_base 2: mod_base = OTHER; note = 2'-O-methyluridine-3'-phosphorothioate
  modified_base 3: mod_base = OTHER; note = 2'-O-methyluridine-3'-phosphate
  modified_base 4: mod_base = OTHER; note = 2'-O-methylcytidine-3'-phosphate
  modified_base 5: mod_base = OTHER; note = 2'-O-methyladenosine-3'-phosphate
  modified_base 6: mod_base = OTHER; note = 2'-O-methyluridine-3'-phosphate
  modified_base 7: mod_base = OTHER; note = 2'-fluorocytidine-3'-phosphate
  modified_base 8: mod_base = OTHER; note = 2'-O-methyluridine-3'-phosphate
  modified_base 9: mod_base = OTHER; note = 2'-fluoroadenosine-3'-phosphate
  modified_base 10: mod_base = OTHER; note = 2'-fluoroadenosine-3'-phosphate
  modified_base 11: mod_base = OTHER; note = 2'-fluoroadenosine-3'-phosphate
  modified_base 12: mod_base = OTHER; note = 2'-O-methylguanosine-3'-phosphate
  modified_base 13: mod_base = OTHER; note = 2'-O-methylcytidine-3'-phosphate
  modified_base 14: mod_base = OTHER; note = 2'-O-methyladenosine-3'-phosphate
  modified_base 15: mod_base = OTHER; note = 2'-O-methyladenosine-3'-phosphate
  modified_base 16: mod_base = OTHER; note = 2'-O-methylguanosine-3'-phosphate
  modified_base 17: mod_base = OTHER; note = 2'-O-methyluridine-3'-phosphate
  modified_base 18: mod_base = OTHER; note = 2'-O-methylcytidine-3'-phosphate
  modified_base 19: mod_base = OTHER; note = 2'-O-methyladenosine-3'-phosphate
  modified_base 20: mod_base = OTHER; note = 2'-O-methylcytidine-3'-phosphate
  modified_base 21: mod_base = OTHER; note = 2'-O-methyluridine-3'-phosphate N-[tris(GalNAc-alkyl)-amidodecanoyl)]-4-hydroxyprolinol (Hyp-(GalNAc-alkyl)3)
cttcatctaaagcaagtcact

SEQ ID NO: 5180 - RNA, 21 nt, synthetic construct
  source 1..21: mol_type = other RNA
  modified_base 1: mod_base = OTHER; note = 2'-O-methyluridine-3'-phosphorothioate
  modified_base 2: mod_base = OTHER; note = 2'-O-methylcytidine-3'-phosphorothioate
  modified_base 3: mod_base = OTHER; note = 2'-O-methyladenosine-3'-phosphate
  modified_base 4: mod_base = OTHER; note = 2'-O-methylcytidine-3'-phosphate
  modified_base 5: mod_base = OTHER; note = 2'-O-methyluridine-3'-phosphate
  modified_base 6: mod_base = OTHER; note = 2'-O-methylguanosine-3'-phosphate
  modified_base 7: mod_base = OTHER; note = 2'-fluorouridine-3'-phosphate
  modified_base 8: mod_base = OTHER; note = 2'-O-methylguanosine-3'-phosphate
  modified_base 9: mod_base = OTHER; note = 2'-fluorocytidine-3'-phosphate
  modified_base 10: mod_base = OTHER; note = 2'-fluorocytidine-3'-phosphate
  modified_base 11: mod_base = OTHER; note = 2'-fluoroadenosine-3'-phosphate
  modified_base 12: mod_base = OTHER; note = 2'-O-methyluridine-3'-phosphate
  modified_base 13: mod_base = OTHER; note = 2'-O-methylcytidine-3'-phosphate
  modified_base 14: mod_base = OTHER; note = 2'-O-methyluridine-3'-phosphate
  modified_base 15: mod_base = OTHER; note = 2'-O-methyluridine-3'-phosphate
  modified_base 16: mod_base = OTHER; note = 2'-O-methylcytidine-3'-phosphate
  modified_base 17: mod_base = OTHER; note = 2'-O-methylcytidine-3'-phosphate
  modified_base 18: mod_base = OTHER; note = 2'-O-methyluridine-3'-phosphate
  modified_base 19: mod_base = OTHER; note = 2'-O-methylguanosine-3'-phosphate
  modified_base 20: mod_base = OTHER; note = 2'-O-methyladenosine-3'-phosphate
  modified_base 21: mod_base = OTHER; note = 2'-O-methyluridine-3'-phosphate N-[tris(GalNAc-alkyl)-amidodecanoyl)]-4-hydroxyprolinol (Hyp-(GalNAc-alkyl)3)
tcactgtgccatcttcctgat

SEQ ID NO: 5181 - RNA, 21 nt, synthetic construct
  source 1..21: mol_type = other RNA
  modified_base 1: mod_base = OTHER; note = 2'-O-methylguanosine-3'-phosphorothioate
  modified_base 2: mod_base = OTHER; note = 2'-O-methyladenosine-3'-phosphorothioate
  modified_base 3: mod_base = OTHER; note = 2'-O-methylcytidine-3'-phosphate
  modified_base 4: mod_base = OTHER; note = 2'-O-methylcytidine-3'-phosphate
  modified_base 5: mod_base = OTHER; note = 2'-O-methyladenosine-3'-phosphate
  modified_base 6: mod_base = OTHER; note = 2'-O-methylcytidine-3'-phosphate
  modified_base 7: mod_base = OTHER; note = 2'-fluorouridine-3'-phosphate
  modified_base 8: mod_base = OTHER; note = 2'-O-methyladenosine-3'-phosphate
  modified_base 9: mod_base = OTHER; note = 2'-fluorocytidine-3'-phosphate
  modified_base 10: mod_base = OTHER; note = 2'-fluorocytidine-3'-phosphate
  modified_base 11: mod_base = OTHER; note = 2'-fluorocytidine-3'-phosphate
  modified_base 12: mod_base = OTHER; note = 2'-O-methyluridine-3'-phosphate
  modified_base 13: mod_base = OTHER; note = 2'-O-methylcytidine-3'-phosphate
  modified_base 14: mod_base = OTHER; note = 2'-O-methyluridine-3'-phosphate
  modified_base 15: mod_base = OTHER; note = 2'-O-methyluridine-3'-phosphate
  modified_base 16: mod_base = OTHER; note = 2'-O-methyluridine-3'-phosphate
  modified_base 17: mod_base = OTHER; note = 2'-O-methylcytidine-3'-phosphate
  modified_base 18: mod_base = OTHER; note = 2'-O-methylcytidine-3'-phosphate
  modified_base 19: mod_base = OTHER; note = 2'-O-methyluridine-3'-phosphate
  modified_base 20: mod_base = OTHER; note = 2'-O-methyladenosine-3'-phosphate
  modified_base 21: mod_base = OTHER; note = 2'-O-methyluridine-3'-phosphate N-[tris(GalNAc-alkyl)-amidodecanoyl)]-4-hydroxyprolinol (Hyp-(GalNAc-alkyl)3)
gaccactaccctctttcctat

SEQ ID NO: 5182 - RNA, 21 nt, synthetic construct
  source 1..21: mol_type = other RNA
  modified_base 1: mod_base = OTHER; note = 2'-O-methyluridine-3'-phosphorothioate
  modified_base 2: mod_base = OTHER; note = 2'-O-methylcytidine-3'-phosphorothioate
  modified_base 3: mod_base = OTHER; note = 2'-O-methylcytidine-3'-phosphate
  modified_base 4: mod_base = OTHER; note = 2'-O-methyladenosine-3'-phosphate
  modified_base 5: mod_base = OTHER; note = 2'-O-methyluridine-3'-phosphate
  modified_base 6: mod_base = OTHER; note = 2'-O-methylcytidine-3'-phosphate
  modified_base 7: mod_base = OTHER; note = 2'-fluorocytidine-3'-phosphate
  modified_base 8: mod_base = OTHER; note = 2'-O-methylcytidine-3'-phosphate
  modified_base 9: mod_base = OTHER; note = 2'-fluoroguanosine-3'-phosphate
  modified_base 10: mod_base = OTHER; note = 2'-fluorocytidine-3'-phosphate
  modified_base 11: mod_base = OTHER; note = 2'-fluorouridine-3'-phosphate
  modified_base 12: mod_base = OTHER; note = 2'-O-methyladenosine-3'-phosphate
  modified_base 13: mod_base = OTHER; note = 2'-O-methylguanosine-3'-phosphate
  modified_base 14: mod_base = OTHER; note = 2'-O-methyluridine-3'-phosphate
  modified_base 15: mod_base = OTHER; note = 2'-O-methylcytidine-3'-phosphate
  modified_base 16: mod_base = OTHER; note = 2'-O-methylcytidine-3'-phosphate
  modified_base 17: mod_base = OTHER; note = 2'-O-methyladenosine-3'-phosphate
  modified_base 18: mod_base = OTHER; note = 2'-O-methyluridine-3'-phosphate
  modified_base 19: mod_base = OTHER; note = 2'-O-methylcytidine-3'-phosphate
  modified_base 20: mod_base = OTHER; note = 2'-O-methylcytidine-3'-phosphate
  modified_base 21: mod_base = OTHER; note = 2'-O-methyluridine-3'-phosphate N-[tris(GalNAc-alkyl)-amidodecanoyl)]-4-hydroxyprolinol (Hyp-(GalNAc-alkyl)3)
tccatcccgctagtccatcct

SEQ ID NO: 5183 - RNA, 21 nt, synthetic construct
  source 1..21: mol_type = other RNA
  modified_base 1: mod_base = OTHER; note = 2'-O-methyladenosine-3'-phosphorothioate
  modified_base 2: mod_base = OTHER; note = 2'-O-methylcytidine-3'-phosphorothioate
  modified_base 3: mod_base = OTHER; note = 2'-O-methylcytidine-3'-phosphate
  modified_base 4: mod_base = OTHER; note = 2'-O-methylcytidine-3'-phosphate
  modified_base 5: mod_base = OTHER; note = 2'-O-methyladenosine-3'-phosphate
  modified_base 6: mod_base = OTHER; note = 2'-O-methyluridine-3'-phosphate
  modified_base 7: mod_base = OTHER; note = 2'-fluorocytidine-3'-phosphate
  modified_base 8: mod_base = OTHER; note = 2'-O-methyluridine-3'-phosphate
  modified_base 9: mod_base = OTHER; note = 2'-fluorocytidine-3'-phosphate
  modified_base 10: mod_base = OTHER; note = 2'-fluorocytidine-3'-phosphate
  modified_base 11: mod_base = OTHER; note = 2'-fluoroadenosine-3'-phosphate
  modified_base 12: mod_base = OTHER; note = 2'-O-methyladenosine-3'-phosphate
  modified_base 13: mod_base = OTHER; note = 2'-O-methylcytidine-3'-phosphate
  modified_base 14: mod_base = OTHER; note = 2'-O-methylcytidine-3'-phosphate
  modified_base 15: mod_base = OTHER; note = 2'-O-methyladenosine-3'-phosphate
  modified_base 16: mod_base = OTHER; note = 2'-O-methyluridine-3'-phosphate
  modified_base 17: mod_base = OTHER; note = 2'-O-methylguanosine-3'-phosphate
  modified_base 18: mod_base = OTHER; note = 2'-O-methyladenosine-3'-phosphate
  modified_base 19: mod_base = OTHER; note = 2'-O-methylguanosine-3'-phosphate
  modified_base 20: mod_base = OTHER; note = 2'-O-methylcytidine-3'-phosphate
  modified_base 21: mod_base = OTHER; note = 2'-O-methyluridine-3'-phosphate N-[tris(GalNAc-alkyl)-amidodecanoyl)]-4-hydroxyprolinol (Hyp-(GalNAc-alkyl)3)
acccatctccaaccatgagct

SEQ ID NO: 5184 - RNA, 21 nt, synthetic construct
  source 1..21: mol_type = other RNA
  modified_base 1: mod_base = OTHER; note = 2'-O-methylguanosine-3'-phosphorothioate
  modified_base 2: mod_base = OTHER; note = 2'-O-methyladenosine-3'-phosphorothioate
  modified_base 3: mod_base = OTHER; note = 2'-O-methylguanosine-3'-phosphate
  modified_base 4: mod_base = OTHER; note = 2'-O-methylcytidine-3'-phosphate
  modified_base 5: mod_base = OTHER; note = 2'-O-methyladenosine-3'-phosphate
  modified_base 6: mod_base = OTHER; note = 2'-O-methyladenosine-3'-phosphate
  modified_base 7: mod_base = OTHER; note = 2'-fluorouridine-3'-phosphate
  modified_base 8: mod_base = OTHER; note = 2'-O-methylguanosine-3'-phosphate
  modified_base 9: mod_base = OTHER; note = 2'-fluorocytidine-3'-phosphate
  modified_base 10: mod_base = OTHER; note = 2'-fluorocytidine-3'-phosphate
  modified_base 11: mod_base = OTHER; note = 2'-fluoroadenosine-3'-phosphate
  modified_base 12: mod_base = OTHER; note = 2'-O-methyluridine-3'-phosphate
  modified_base 13: mod_base = OTHER; note = 2'-O-methylcytidine-3'-phosphate
  modified_base 14: mod_base = OTHER; note = 2'-O-methyluridine-3'-phosphate
  modified_base 15: mod_base = OTHER; note = 2'-O-methylguanosine-3'-phosphate
  modified_base 16: mod_base = OTHER; note = 2'-O-methylguanosine-3'-phosphate
  modified_base 17: mod_base = OTHER; note = 2'-O-methyluridine-3'-phosphate
  modified_base 18: mod_base = OTHER; note = 2'-O-methyluridine-3'-phosphate
  modified_base 19: mod_base = OTHER; note = 2'-O-methylcytidine-3'-phosphate
  modified_base 20: mod_base = OTHER; note = 2'-O-methylcytidine-3'-phosphate
  modified_base 21: mod_base = OTHER; note = 2'-O-methyluridine-3'-phosphate N-[tris(GalNAc-alkyl)-amidodecanoyl)]-4-hydroxyprolinol (Hyp-(GalNAc-alkyl)3)
gagcaatgccatctggttcct

SEQ ID NO: 5185 - RNA, 21 nt, synthetic construct
  source 1..21: mol_type = other RNA
  modified_base 1: mod_base = OTHER; note = 2'-O-methyluridine-3'-phosphorothioate
  modified_base 2: mod_base = OTHER; note = 2'-O-methylcytidine-3'-phosphorothioate
  modified_base 3: mod_base = OTHER; note = 2'-O-methylcytidine-3'-phosphate
  modified_base 4: mod_base = OTHER; note = 2'-O-methylcytidine-3'-phosphate
  modified_base 5: mod_base = OTHER; note = 2'-O-methyladenosine-3'-phosphate
  modified_base 6: mod_base = OTHER; note = 2'-O-methylguanosine-3'-phosphate
  modified_base 7: mod_base = OTHER; note = 2'-fluoroguanosine-3'-phosphate
  modified_base 8: mod_base = OTHER; note = 2'-O-methylcytidine-3'-phosphate
  modified_base 9: mod_base = OTHER; note = 2'-fluoroadenosine-3'-phosphate
  modified_base 10: mod_base = OTHER; note = 2'-fluoroadenosine-3'-phosphate
  modified_base 11: mod_base = OTHER; note = 2'-fluoroadenosine-3'-phosphate
  modified_base 12: mod_base = OTHER; note = 2'-O-methylguanosine-3'-phosphate
  modified_base 13: mod_base = OTHER; note = 2'-O-methyladenosine-3'-phosphate
  modified_base 14: mod_base = OTHER; note = 2'-O-methylcytidine-3'-phosphate
  modified_base 15: mod_base = OTHER; note = 2'-O-methyladenosine-3'-phosphate
  modified_base 16: mod_base = OTHER; note = 2'-O-methylcytidine-3'-phosphate
  modified_base 17: mod_base = OTHER; note = 2'-O-methylcytidine-3'-phosphate
  modified_base 18: mod_base = OTHER; note = 2'-O-methylcytidine-3'-phosphate
  modified_base 19: mod_base = OTHER; note = 2'-O-methyluridine-3'-phosphate
  modified_base 20: mod_base = OTHER; note = 2'-O-methyluridine-3'-phosphate
  modified_base 21: mod_base = OTHER; note = 2'-O-methyluridine-3'-phosphate N-[tris(GalNAc-alkyl)-amidodecanoyl)]-4-hydroxyprolinol (Hyp-(GalNAc-alkyl)3)
tcccaggcaaagacacccttt

SEQ ID NO: 5186 - RNA, 21 nt, synthetic construct
  source 1..21: mol_type = other RNA
  modified_base 1: mod_base = OTHER; note = 2'-O-methylcytidine-3'-phosphorothioate
  modified_base 2: mod_base = OTHER; note = 2'-O-methylcytidine-3'-phosphorothioate
  modified_base 3: mod_base = OTHER; note = 2'-O-methyluridine-3'-phosphate
  modified_base 4: mod_base = OTHER; note = 2'-O-methyluridine-3'-phosphate
  modified_base 5: mod_base = OTHER; note = 2'-O-methyladenosine-3'-phosphate
  modified_base 6: mod_base = OTHER; note = 2'-O-methylguanosine-3'-phosphate
  modified_base 7: mod_base = OTHER; note = 2'-fluorocytidine-3'-phosphate
  modified_base 8: mod_base = OTHER; note = 2'-O-methyluridine-3'-phosphate
  modified_base 9: mod_base = OTHER; note = 2'-fluorocytidine-3'-phosphate
  modified_base 10: mod_base = OTHER; note = 2'-fluoroadenosine-3'-phosphate
  modified_base 11: mod_base = OTHER; note = 2'-fluorocytidine-3'-phosphate
  modified_base 12: mod_base = OTHER; note = 2'-O-methylcytidine-3'-phosphate
  modified_base 13: mod_base = OTHER; note = 2'-O-methyluridine-3'-phosphate
  modified_base 14: mod_base = OTHER; note = 2'-O-methyluridine-3'-phosphate
  modified_base 15: mod_base = OTHER; note = 2'-O-methyluridine-3'-phosphate
  modified_base 16: mod_base = OTHER; note = 2'-O-methyladenosine-3'-phosphate
  modified_base 17: mod_base = OTHER; note = 2'-O-methyladenosine-3'-phosphate
  modified_base 18: mod_base = OTHER; note = 2'-O-methyluridine-3'-phosphate
  modified_base 19: mod_base = OTHER; note = 2'-O-methyladenosine-3'-phosphate
  modified_base 20: mod_base = OTHER; note = 2'-O-methylguanosine-3'-phosphate
  modified_base 21: mod_base = OTHER; note = 2'-O-methyluridine-3'-phosphate N-[tris(GalNAc-alkyl)-amidodecanoyl)]-4-hydroxyprolinol (Hyp-(GalNAc-alkyl)3)
ccttagctcacctttaatagt

SEQ ID NO: 5187 - RNA, 21 nt, synthetic construct
  source 1..21: mol_type = other RNA
  modified_base 1: mod_base = OTHER; note = 2'-O-methyladenosine-3'-phosphorothioate
  modified_base 2: mod_base = OTHER; note = 2'-O-methylcytidine-3'-phosphorothioate
  modified_base 3: mod_base = OTHER; note = 2'-O-methylcytidine-3'-phosphate
  modified_base 4: mod_base = OTHER; note = 2'-O-methylcytidine-3'-phosphate
  modified_base 5: mod_base = OTHER; note = 2'-O-methyladenosine-3'-phosphate
  modified_base 6: mod_base = OTHER; note = 2'-O-methylcytidine-3'-phosphate
  modified_base 7: mod_base = OTHER; note = 2'-fluorouridine-3'-phosphate
  modified_base 8: mod_base = OTHER; note = 2'-O-methyladenosine-3'-phosphate
  modified_base 9: mod_base = OTHER; note = 2'-fluorouridine-3'-phosphate
  modified_base 10: mod_base = OTHER; note = 2'-fluoroguanosine-3'-phosphate
  modified_base 11: mod_base = OTHER; note = 2'-fluorocytidine-3'-phosphate
  modified_base 12: mod_base = OTHER; note = 2'-O-methylcytidine-3'-phosphate
  modified_base 13: mod_base = OTHER; note = 2'-O-methyluridine-3'-phosphate
  modified_base 14: mod_base = OTHER; note = 2'-O-methyluridine-3'-phosphate
  modified_base 15: mod_base = OTHER; note = 2'-O-methylcytidine-3'-phosphate
  modified_base 16: mod_base = OTHER; note = 2'-O-methylcytidine-3'-phosphate
  modified_base 17: mod_base = OTHER; note = 2'-O-methyluridine-3'-phosphate
  modified_base 18: mod_base = OTHER; note = 2'-O-methylguanosine-3'-phosphate
  modified_base 19: mod_base = OTHER; note = 2'-O-methyluridine-3'-phosphate
  modified_base 20: mod_base = OTHER; note = 2'-O-methylcytidine-3'-phosphate
  modified_base 21: mod_base = OTHER; note = 2'-O-methyluridine-3'-phosphate N-[tris(GalNAc-alkyl)-amidodecanoyl)]-4-hydroxyprolinol (Hyp-(GalNAc-alkyl)3)
acccactatgccttcctgtct

SEQ ID NO: 5188 - RNA, 21 nt, synthetic construct
  source 1..21: mol_type = other RNA
  modified_base 1: mod_base = OTHER; note = 2'-O-methylguanosine-3'-phosphorothioate
  modified_base 2: mod_base = OTHER; note = 2'-O-methyluridine-3'-phosphorothioate
  modified_base 3: mod_base = OTHER; note = 2'-O-methylcytidine-3'-phosphate
  modified_base 4: mod_base = OTHER; note = 2'-O-methylcytidine-3'-phosphate
  modified_base 5: mod_base = OTHER; note = 2'-O-methyluridine-3'-phosphate
  modified_base 6: mod_base = OTHER; note = 2'-O-methyluridine-3'-phosphate
  modified_base 7: mod_base = OTHER; note = 2'-fluorouridine-3'-phosphate
  modified_base 8: mod_base = OTHER; note = 2'-O-methylcytidine-3'-phosphate
  modified_base 9: mod_base = OTHER; note = 2'-fluorouridine-3'-phosphate
  modified_base 10: mod_base = OTHER; note = 2'-fluoroadenosine-3'-phosphate
  modified_base 11: mod_base = OTHER; note = 2'-fluorocytidine-3'-phosphate
  modified_base 12: mod_base = OTHER; note = 2'-O-methyluridine-3'-phosphate
  modified_base 13: mod_base = OTHER; note = 2'-O-methylcytidine-3'-phosphate
  modified_base 14: mod_base = OTHER; note = 2'-O-methyladenosine-3'-phosphate
  modified_base 15: mod_base = OTHER; note = 2'-O-methyladenosine-3'-phosphate
  modified_base 16: mod_base = OTHER; note = 2'-O-methyluridine-3'-phosphate
  modified_base 17: mod_base = OTHER; note = 2'-O-methylguanosine-3'-phosphate
  modified_base 18: mod_base = OTHER; note = 2'-O-methylguanosine-3'-phosphate
  modified_base 19: mod_base = OTHER; note = 2'-O-methyluridine-3'-phosphate
  modified_base 20: mod_base = OTHER; note = 2'-O-methylcytidine-3'-phosphate
  modified_base 21: mod_base = OTHER; note = 2'-O-methyluridine-3'-phosphate N-[tris(GalNAc-alkyl)-amidodecanoyl)]-4-hydroxyprolinol (Hyp-(GalNAc-alkyl)3)
gtcctttctactcaatggtct

SEQ ID NO: 5189 - RNA, 21 nt, synthetic construct
  source 1..21: mol_type = other RNA
  modified_base 1: mod_base = OTHER; note = 2'-O-methyluridine-3'-phosphorothioate
  modified_base 2: mod_base = OTHER; note = 2'-O-methylcytidine-3'-phosphorothioate
  modified_base 3: mod_base = OTHER; note = 2'-O-methylcytidine-3'-phosphate
  modified_base 4: mod_base = OTHER; note = 2'-O-methyladenosine-3'-phosphate
  modified_base 5: mod_base = OTHER; note = 2'-O-methyladenosine-3'-phosphate
  modified_base 6: mod_base = OTHER; note = 2'-O-methylguanosine-3'-phosphate
  modified_base 7: mod_base = OTHER; note = 2'-fluoroadenosine-3'-phosphate
  modified_base 8: mod_base = OTHER; note = 2'-O-methyluridine-3'-phosphate
  modified_base 9: mod_base = OTHER; note = 2'-fluoroguanosine-3'-phosphate
  modified_base 10: mod_base = OTHER; note = 2'-fluoroadenosine-3'-phosphate
  modified_base 11: mod_base = OTHER; note = 2'-fluoroguanosine-3'-phosphate
  modified_base 12: mod_base = OTHER; note = 2'-O-methyluridine-3'-phosphate
  modified_base 13: mod_base = OTHER; note = 2'-O-methyluridine-3'-phosphate
  modified_base 14: mod_base = OTHER; note = 2'-O-methylguanosine-3'-phosphate
  modified_base 15: mod_base = OTHER; note = 2'-O-methyladenosine-3'-phosphate
  modified_base 16: mod_base = OTHER; note = 2'-O-methylcytidine-3'-phosphate
  modified_base 17: mod_base = OTHER; note = 2'-O-methyladenosine-3'-phosphate
  modified_base 18: mod_base = OTHER; note = 2'-O-methylcytidine-3'-phosphate
  modified_base 19: mod_base = OTHER; note = 2'-O-methyladenosine-3'-phosphate
  modified_base 20: mod_base = OTHER; note = 2'-O-methyladenosine-3'-phosphate
  modified_base 21: mod_base = OTHER; note = 2'-O-methyluridine-3'-phosphate N-[tris(GalNAc-alkyl)-amidodecanoyl)]-4-hydroxyprolinol (Hyp-(GalNAc-alkyl)3)
tccaagatgagttgacacaat

SEQ ID NO: 5190 - RNA, 21 nt, synthetic construct
  source 1..21: mol_type = other RNA
  modified_base 1: mod_base = OTHER; note = 2'-O-methylcytidine-3'-phosphorothioate
  modified_base 2: mod_base = OTHER; note = 2'-O-methyladenosine-3'-phosphorothioate
  modified_base 3: mod_base = OTHER; note = 2'-O-methyladenosine-3'-phosphate
  modified_base 4: mod_base = OTHER; note = 2'-O-methyluridine-3'-phosphate
  modified_base 5: mod_base = OTHER; note = 2'-O-methyluridine-3'-phosphate
  modified_base 6: mod_base = OTHER; note = 2'-O-methyluridine-3'-phosphate
  modified_base 7: mod_base = OTHER; note = 2'-fluorouridine-3'-phosphate
  modified_base 8: mod_base = OTHER; note = 2'-O-methyluridine-3'-phosphate
  modified_base 9: mod_base = OTHER; note = 2'-fluoroguanosine-3'-phosphate
  modified_base 10: mod_base = OTHER; note = 2'-fluorouridine-3'-phosphate
  modified_base 11: mod_base = OTHER; note = 2'-fluoroguanosine-3'-phosphate
  modified_base 12: mod_base = OTHER; note = 2'-O-methylguanosine-3'-phosphate
  modified_base 13: mod_base = OTHER; note = 2'-O-methyladenosine-3'-phosphate
  modified_base 14: mod_base = OTHER; note = 2'-O-methyluridine-3'-phosphate
  modified_base 15: mod_base = OTHER; note = 2'-O-methylcytidine-3'-phosphate
  modified_base 16: mod_base = OTHER; note = 2'-O-methyluridine-3'-phosphate
  modified_base 17: mod_base = OTHER; note = 2'-O-methylcytidine-3'-phosphate
  modified_base 18: mod_base = OTHER; note = 2'-O-methylcytidine-3'-phosphate
  modified_base 19: mod_base = OTHER; note = 2'-O-methyladenosine-3'-phosphate
  modified_base 20: mod_base = OTHER; note = 2'-O-methylguanosine-3'-phosphate
  modified_base 21: mod_base = OTHER; note = 2'-O-methyluridine-3'-phosphate N-[tris(GalNAc-alkyl)-amidodecanoyl)]-4-hydroxyprolinol (Hyp-(GalNAc-alkyl)3)
caatttttgtggatctccagt

SEQ ID NO: 5191 - RNA, 21 nt, synthetic construct
  source 1..21: mol_type = other RNA
  modified_base 1: mod_base = OTHER; note = 2'-O-methyluridine-3'-phosphorothioate
  modified_base 2: mod_base = OTHER; note = 2'-O-methylcytidine-3'-phosphorothioate
  modified_base 3: mod_base = OTHER; note = 2'-O-methyluridine-3'-phosphate
  modified_base 4: mod_base = OTHER; note = 2'-O-methyluridine-3'-phosphate
  modified_base 5: mod_base = OTHER; note = 2'-O-methyluridine-3'-phosphate
  modified_base 6: mod_base = OTHER; note = 2'-O-methylguanosine-3'-phosphate
  modified_base 7: mod_base = OTHER; note = 2'-fluoroguanosine-3'-phosphate
  modified_base 8: mod_base = OTHER; note = 2'-O-methyladenosine-3'-phosphate
  modified_base 9: mod_base = OTHER; note = 2'-fluorouridine-3'-phosphate
  modified_base 10: mod_base = OTHER; note = 2'-fluorouridine-3'-phosphate
  modified_base 11: mod_base = OTHER; note = 2'-fluorocytidine-3'-phosphate
  modified_base 12: mod_base = OTHER; note = 2'-O-methyladenosine-3'-phosphate
  modified_base 13: mod_base = OTHER; note = 2'-O-methylcytidine-3'-phosphate
  modified_base 14: mod_base = OTHER; note = 2'-O-methylcytidine-3'-phosphate
  modified_base 15: mod_base = OTHER; note = 2'-O-methyladenosine-3'-phosphate
  modified_base 16: mod_base = OTHER; note = 2'-O-methyladenosine-3'-phosphate
  modified_base 17: mod_base = OTHER; note = 2'-O-methyladenosine-3'-phosphate
  modified_base 18: mod_base = OTHER; note = 2'-O-methylguanosine-3'-phosphate
  modified_base 19: mod_base = OTHER; note = 2'-O-methyluridine-3'-phosphate
  modified_base 20: mod_base = OTHER; note = 2'-O-methyluridine-3'-phosphate
  modified_base 21: mod_base = OTHER; note = 2'-O-methyluridine-3'-phosphate N-[tris(GalNAc-alkyl)-amidodecanoyl)]-4-hydroxyprolinol (Hyp-(GalNAc-alkyl)3)
tctttggattcaccaaagttt

SEQ ID NO: 5192 - RNA, 21 nt, synthetic construct
  source 1..21: mol_type = other RNA
  modified_base 1: mod_base = OTHER; note = 2'-O-methyluridine-3'-phosphorothioate
  modified_base 2: mod_base = OTHER; note = 2'-O-methylguanosine-3'-phosphorothioate
  modified_base 3: mod_base = OTHER; note = 2'-O-methylcytidine-3'-phosphate
  modified_base 4: mod_base = OTHER; note = 2'-O-methylcytidine-3'-phosphate
  modified_base 5: mod_base = OTHER; note = 2'-O-methylcytidine-3'-phosphate
  modified_base 6: mod_base = OTHER; note = 2'-O-methyladenosine-3'-phosphate
  modified_base 7: mod_base = OTHER; note = 2'-fluoroadenosine-3'-phosphate
  modified_base 8: mod_base = OTHER; note = 2'-O-methyladenosine-3'-phosphate
  modified_base 9: mod_base = OTHER; note = 2'-fluoroadenosine-3'-phosphate
  modified_base 10: mod_base = OTHER; note = 2'-fluorouridine-3'-phosphate
  modified_base 11: mod_base = OTHER; note = 2'-fluoroadenosine-3'-phosphate
  modified_base 12: mod_base = OTHER; note = 2'-O-methylguanosine-3'-phosphate
  modified_base 13: mod_base = OTHER; note = 2'-O-methyladenosine-3'-phosphate
  modified_base 14: mod_base = OTHER; note = 2'-O-methylguanosine-3'-phosphate
  modified_base 15: mod_base = OTHER; note = 2'-O-methylguanosine-3'-phosphate
  modified_base 16: mod_base = OTHER; note = 2'-O-methylcytidine-3'-phosphate
  modified_base 17: mod_base = OTHER; note = 2'-O-methyluridine-3'-phosphate
  modified_base 18: mod_base = OTHER; note = 2'-O-methyluridine-3'-phosphate
  modified_base 19: mod_base = OTHER; note = 2'-O-methyladenosine-3'-phosphate
  modified_base 20: mod_base = OTHER; note = 2'-O-methylcytidine-3'-phosphate
  modified_base 21: mod_base = OTHER; note = 2'-O-methyluridine-3'-phosphate N-[tris(GalNAc-alkyl)-amidodecanoyl)]-4-hydroxyprolinol (Hyp-(GalNAc-alkyl)3)
tgcccaaaatagaggcttact

SEQ ID NO: 5193 - RNA, 21 nt, synthetic construct
  source 1..21: mol_type = other RNA
  modified_base 1: mod_base = OTHER; note = 2'-O-methylcytidine-3'-phosphorothioate
  modified_base 2: mod_base = OTHER; note = 2'-O-methyluridine-3'-phosphorothioate
  modified_base 3: mod_base = OTHER; note = 2'-O-methylguanosine-3'-phosphate
  modified_base 4: mod_base = OTHER; note = 2'-O-methyluridine-3'-phosphate
  modified_base 5: mod_base = OTHER; note = 2'-O-methylcytidine-3'-phosphate
  modified_base 6: mod_base = OTHER; note = 2'-O-methylcytidine-3'-phosphate
  modified_base 7: mod_base = OTHER; note = 2'-fluorouridine-3'-phosphate
  modified_base 8: mod_base = OTHER; note = 2'-O-methyluridine-3'-phosphate
  modified_base 9: mod_base = OTHER; note = 2'-fluorocytidine-3'-phosphate
  modified_base 10: mod_base = OTHER; note = 2'-fluorouridine-3'-phosphate
  modified_base 11: mod_base = OTHER; note = 2'-fluorouridine-3'-phosphate
  modified_base 12: mod_base = OTHER; note = 2'-O-methyladenosine-3'-phosphate
  modified_base 13: mod_base = OTHER; note = 2'-O-methylguanosine-3'-phosphate
  modified_base 14: mod_base = OTHER; note = 2'-O-methyluridine-3'-phosphate
  modified_base 15: mod_base = OTHER; note = 2'-O-methyluridine-3'-phosphate
  modified_base 16: mod_base = OTHER; note = 2'-O-methylguanosine-3'-phosphate
  modified_base 17: mod_base = OTHER; note = 2'-O-methyluridine-3'-phosphate
  modified_base 18: mod_base = OTHER; note = 2'-O-methylcytidine-3'-phosphate
  modified_base 19: mod_base = OTHER; note = 2'-O-methylcytidine-3'-phosphate
  modified_base 20: mod_base = OTHER; note = 2'-O-methyladenosine-3'-phosphate
  modified_base 21: mod_base = OTHER; note = 2'-O-methyluridine-3'-phosphate N-[tris(GalNAc-alkyl)-amidodecanoyl)]-4-hydroxyprolinol (Hyp-(GalNAc-alkyl)3)
ctgtccttcttagttgtccat

SEQ ID NO: 5194 - RNA, 21 nt, synthetic construct
  source 1..21: mol_type = other RNA
  modified_base 1: mod_base = OTHER; note = 2'-O-methylguanosine-3'-phosphorothioate
  modified_base 2: mod_base = OTHER; note = 2'-O-methyladenosine-3'-phosphorothioate
  modified_base 3: mod_base = OTHER; note = 2'-O-methyladenosine-3'-phosphate
  modified_base 4: mod_base = OTHER; note = 2'-O-methylcytidine-3'-phosphate
  modified_base 5: mod_base = OTHER; note = 2'-O-methyluridine-3'-phosphate
  modified_base 6: mod_base = OTHER; note = 2'-O-methyladenosine-3'-phosphate
  modified_base 7: mod_base = OTHER; note = 2'-fluorocytidine-3'-phosphate
  modified_base 8: mod_base = OTHER; note = 2'-O-methyluridine-3'-phosphate
  modified_base 9: mod_base = OTHER; note = 2'-fluoroadenosine-3'-phosphate
  modified_base 10: mod_base = OTHER; note = 2'-fluoroadenosine-3'-phosphate
  modified_base 11: mod_base = OTHER; note = 2'-fluoroadenosine-3'-phosphate
  modified_base 12: mod_base = OTHER; note = 2'-O-methylguanosine-3'-phosphate
  modified_base 13: mod_base = OTHER; note = 2'-O-methylcytidine-3'-phosphate
  modified_base 14: mod_base = OTHER; note = 2'-O-methyluridine-3'-phosphate
  modified_base 15: mod_base = OTHER; note = 2'-O-methylcytidine-3'-phosphate
  modified_base 16: mod_base = OTHER; note = 2'-O-methyluridine-3'-phosphate
  modified_base 17: mod_base = OTHER; note = 2'-O-methylcytidine-3'-phosphate
  modified_base 18: mod_base = OTHER; note = 2'-O-methyluridine-3'-phosphate
  modified_base 19: mod_base = OTHER; note = 2'-O-methyluridine-3'-phosphate
  modified_base 20: mod_base = OTHER; note = 2'-O-methyluridine-3'-phosphate
  modified_base 21: mod_base = OTHER; note = 2'-O-methyluridine-3'-phosphate N-[tris(GalNAc-alkyl)-amidodecanoyl)]-4-hydroxyprolinol (Hyp-(GalNAc-alkyl)3)
gaactactaaagctctctttt

SEQ ID NO: 5195 - RNA, 21 nt, synthetic construct
  source 1..21: mol_type = other RNA
  modified_base 1: mod_base = OTHER; note = 2'-O-methylcytidine-3'-phosphorothioate
  modified_base 2: mod_base = OTHER; note = 2'-O-methyluridine-3'-phosphorothioate
  modified_base 3: mod_base = OTHER; note = 2'-O-methyluridine-3'-phosphate
  modified_base 4: mod_base = OTHER; note = 2'-O-methyluridine-3'-phosphate
  modified_base 5: mod_base = OTHER; note = 2'-O-methylguanosine-3'-phosphate
  modified_base 6: mod_base = OTHER; note = 2'-O-methylcytidine-3'-phosphate
  modified_base 7: mod_base = OTHER; note = 2'-fluoroadenosine-3'-phosphate
  modified_base 8: mod_base = OTHER; note = 2'-O-methyluridine-3'-phosphate
  modified_base 9: mod_base = OTHER; note = 2'-fluoroadenosine-3'-phosphate
  modified_base 10: mod_base = OTHER; note = 2'-fluorocytidine-3'-phosphate
  modified_base 11: mod_base = OTHER; note = 2'-fluorocytidine-3'-phosphate
  modified_base 12: mod_base = OTHER; note = 2'-O-methyluridine-3'-phosphate
  modified_base 13: mod_base = OTHER; note = 2'-O-methyluridine-3'-phosphate
  modified_base 14: mod_base = OTHER; note = 2'-O-methylcytidine-3'-phosphate
  modified_base 15: mod_base = OTHER; note = 2'-O-methyladenosine-3'-phosphate
  modified_base 16: mod_base = OTHER; note = 2'-O-methyluridine-3'-phosphate
  modified_base 17: mod_base = OTHER; note = 2'-O-methylcytidine-3'-phosphate
  modified_base 18: mod_base = OTHER; note = 2'-O-methylcytidine-3'-phosphate
  modified_base 19: mod_base = OTHER; note = 2'-O-methyladenosine-3'-phosphate
  modified_base 20: mod_base = OTHER; note = 2'-O-methyluridine-3'-phosphate
  modified_base 21: mod_base = OTHER; note = 2'-O-methyluridine-3'-phosphate N-[tris(GalNAc-alkyl)-amidodecanoyl)]-4-hydroxyprolinol (Hyp-(GalNAc-alkyl)3)
ctttgcataccttcatccatt

SEQ ID NO: 5196 - RNA, 21 nt, synthetic construct
  source 1..21: mol_type = other RNA
  modified_base 1: mod_base = OTHER; note = 2'-O-methylcytidine-3'-phosphorothioate
  modified_base 2: mod_base = OTHER; note = 2'-O-methylcytidine-3'-phosphorothioate
  modified_base 3: mod_base = OTHER; note = 2'-O-methyladenosine-3'-phosphate
  modified_base 4: mod_base = OTHER; note = 2'-O-methyluridine-3'-phosphate
  modified_base 5: mod_base = OTHER; note = 2'-O-methyluridine-3'-phosphate
  modified_base 6: mod_base = OTHER; note = 2'-O-methyluridine-3'-phosphate
  modified_base 7: mod_base = OTHER; note = 2'-fluorouridine-3'-phosphate
  modified_base 8: mod_base = OTHER; note = 2'-O-methyluridine-3'-phosphate
  modified_base 9: mod_base = OTHER; note = 2'-fluorouridine-3'-phosphate
  modified_base 10: mod_base = OTHER; note = 2'-fluoroguanosine-3'-phosphate
  modified_base 11: mod_base = OTHER; note = 2'-fluorouridine-3'-phosphate
  modified_base 12: mod_base = OTHER; note = 2'-O-methylcytidine-3'-phosphate
  modified_base 13: mod_base = OTHER; note = 2'-O-methylcytidine-3'-phosphate
  modified_base 14: mod_base = OTHER; note = 2'-O-methyluridine-3'-phosphate
  modified_base 15: mod_base = OTHER; note = 2'-O-methyluridine-3'-phosphate
  modified_base 16: mod_base = OTHER; note = 2'-O-methylcytidine-3'-phosphate
  modified_base 17: mod_base = OTHER; note = 2'-O-methyluridine-3'-phosphate
  modified_base 18: mod_base = OTHER; note = 2'-O-methylcytidine-3'-phosphate
  modified_base 19: mod_base = OTHER; note = 2'-O-methyluridine-3'-phosphate
  modified_base 20: mod_base = OTHER; note = 2'-O-methylguanosine-3'-phosphate
  modified_base 21: mod_base = OTHER; note = 2'-O-methyluridine-3'-phosphate N-[tris(GalNAc-alkyl)-amidodecanoyl)]-4-hydroxyprolinol (Hyp-(GalNAc-alkyl)3)
ccattttttgtccttctctgt

SEQ ID NO: 5197 - RNA, 21 nt, synthetic construct
  source 1..21: mol_type = other RNA
  modified_base 1: mod_base = OTHER; note = 2'-O-methylguanosine-3'-phosphorothioate
  modified_base 2: mod_base = OTHER; note = 2'-O-methylcytidine-3'-phosphorothioate
  modified_base 3: mod_base = OTHER; note = 2'-O-methylcytidine-3'-phosphate
  modified_base 4: mod_base = OTHER; note = 2'-O-methyluridine-3'-phosphate
  modified_base 5: mod_base = OTHER; note = 2'-O-methyluridine-3'-phosphate
  modified_base 6: mod_base = OTHER; note = 2'-O-methyluridine-3'-phosphate
  modified_base 7: mod_base = OTHER; note = 2'-fluorocytidine-3'-phosphate
  modified_base 8: mod_base = OTHER; note = 2'-O-methyluridine-3'-phosphate
  modified_base 9: mod_base = OTHER; note = 2'-fluorocytidine-3'-phosphate
  modified_base 10: mod_base = OTHER; note = 2'-fluorouridine-3'-phosphate
  modified_base 11: mod_base = OTHER; note = 2'-fluoroadenosine-3'-phosphate
  modified_base 12: mod_base = OTHER; note = 2'-O-methyluridine-3'-phosphate
  modified_base 13: mod_base = OTHER; note = 2'-O-methylguanosine-3'-phosphate
  modified_base 14: mod_base = OTHER; note = 2'-O-methylcytidine-3'-phosphate
  modified_base 15: mod_base = OTHER; note = 2'-O-methylcytidine-3'-phosphate
  modified_base 16: mod_base = OTHER; note = 2'-O-methylcytidine-3'-phosphate
  modified_base 17: mod_base = OTHER; note = 2'-O-methyluridine-3'-phosphate
  modified_base 18: mod_base = OTHER; note = 2'-O-methyluridine-3'-phosphate
  modified_base 19: mod_base = OTHER; note = 2'-O-methyladenosine-3'-phosphate
  modified_base 20: mod_base = OTHER; note = 2'-O-methyladenosine-3'-phosphate
  modified_base 21: mod_base = OTHER; note = 2'-O-methyluridine-3'-phosphate N-[tris(GalNAc-alkyl)-amidodecanoyl)]-4-hydroxyprolinol (Hyp-(GalNAc-alkyl)3)
gcctttctctatgcccttaat

SEQ ID NO: 5198 - RNA, 21 nt, synthetic construct
  source 1..21: mol_type = other RNA
  modified_base 1: mod_base = OTHER; note = 2'-O-methyluridine-3'-phosphorothioate
  modified_base 2: mod_base = OTHER; note = 2'-O-methyluridine-3'-phosphorothioate
  modified_base 3: mod_base = OTHER; note = 2'-O-methyladenosine-3'-phosphate
  modified_base 4: mod_base = OTHER; note = 2'-O-methyladenosine-3'-phosphate
  modified_base 5: mod_base = OTHER; note = 2'-O-methylguanosine-3'-phosphate
  modified_base 6: mod_base = OTHER; note = 2'-O-methylguanosine-3'-phosphate
  modified_base 7: mod_base = OTHER; note = 2'-fluoroguanosine-3'-phosphate
  modified_base 8: mod_base = OTHER; note = 2'-O-methylcytidine-3'-phosphate
  modified_base 9: mod_base = OTHER; note = 2'-fluorouridine-3'-phosphate
  modified_base 10: mod_base = OTHER; note = 2'-fluoroguanosine-3'-phosphate
  modified_base 11: mod_base = OTHER; note = 2'-fluoroadenosine-3'-phosphate
  modified_base 12: mod_base = OTHER; note = 2'-O-methylcytidine-3'-phosphate
  modified_base 13: mod_base = OTHER; note = 2'-O-methyluridine-3'-phosphate
  modified_base 14: mod_base = OTHER; note = 2'-O-methyluridine-3'-phosphate
  modified_base 15: mod_base = OTHER; note = 2'-O-methylguanosine-3'-phosphate
  modified_base 16: mod_base = OTHER; note = 2'-O-methylcytidine-3'-phosphate
  modified_base 17: mod_base = OTHER; note = 2'-O-methylcytidine-3'-phosphate
  modified_base 18: mod_base = OTHER; note = 2'-O-methyluridine-3'-phosphate
  modified_base 19: mod_base = OTHER; note = 2'-O-methylguanosine-3'-phosphate
  modified_base 20: mod_base = OTHER; note = 2'-O-methyladenosine-3'-phosphate
  modified_base 21: mod_base = OTHER; note = 2'-O-methyluridine-3'-phosphate N-[tris(GalNAc-alkyl)-amidodecanoyl)]-4-hydroxyprolinol (Hyp-(GalNAc-alkyl)3)
ttaagggctgacttgcctgat

SEQ ID NO: 5199 - RNA, 21 nt, synthetic construct
  source 1..21: mol_type = other RNA
  modified_base 1: mod_base = OTHER; note = 2'-O-methyluridine-3'-phosphorothioate
  modified_base 2: mod_base = OTHER; note = 2'-O-methylguanosine-3'-phosphorothioate
  modified_base 3: mod_base = OTHER; note = 2'-O-methyladenosine-3'-phosphate
  modified_base 4: mod_base = OTHER; note = 2'-O-methylguanosine-3'-phosphate
  modified_base 5: mod_base = OTHER; note = 2'-O-methylcytidine-3'-phosphate
  modified_base 6: mod_base = OTHER; note = 2'-O-methyluridine-3'-phosphate
  modified_base 7: mod_base = OTHER; note = 2'-fluorocytidine-3'-phosphate
  modified_base 8: mod_base = OTHER; note = 2'-O-methyluridine-3'-phosphate
  modified_base 9: mod_base = OTHER; note = 2'-fluoroadenosine-3'-phosphate
  modified_base 10: mod_base = OTHER; note = 2'-fluorouridine-3'-phosphate
  modified_base 11: mod_base = OTHER; note = 2'-fluorocytidine-3'-phosphate
  modified_base 12: mod_base = OTHER; note = 2'-O-methyladenosine-3'-phosphate
  modified_base 13: mod_base = OTHER; note = 2'-O-methylcytidine-3'-phosphate
  modified_base 14: mod_base = OTHER; note = 2'-O-methylcytidine-3'-phosphate
  modified_base 15: mod_base = OTHER; note = 2'-O-methyluridine-3'-phosphate
  modified_base 16: mod_base = OTHER; note = 2'-O-methylguanosine-3'-phosphate
  modified_base 17: mod_base = OTHER; note = 2'-O-methyladenosine-3'-phosphate
  modified_base 18: mod_base = OTHER; note = 2'-O-methylguanosine-3'-phosphate
  modified_base 19: mod_base = OTHER; note = 2'-O-methylcytidine-3'-phosphate
  modified_base 20: mod_base = OTHER; note = 2'-O-methyluridine-3'-phosphate
  modified_base 21: mod_base = OTHER; note = 2'-O-methyluridine-3'-phosphate N-[tris(GalNAc-alkyl)-amidodecanoyl)]-4-hydroxyprolinol (Hyp-(GalNAc-alkyl)3)
tgagctctatcacctgagctt

SEQ ID NO: 5200 - RNA, 21 nt, synthetic construct
  source 1..21: mol_type = other RNA
  modified_base 1: mod_base = OTHER; note = 2'-O-methyluridine-3'-phosphorothioate
  modified_base 2: mod_base = OTHER; note = 2'-O-methylcytidine-3'-phosphorothioate
  modified_base 3: mod_base = OTHER; note = 2'-O-methyluridine-3'-phosphate
  modified_base 4: mod_base = OTHER; note = 2'-O-methylguanosine-3'-phosphate
  modified_base 5: mod_base = OTHER; note = 2'-O-methylguanosine-3'-phosphate
  modified_base 6: mod_base = OTHER; note = 2'-O-methylcytidine-3'-phosphate
  modified_base 7: mod_base = OTHER; note = 2'-fluorouridine-3'-phosphate
  modified_base 8: mod_base = OTHER; note = 2'-O-methyluridine-3'-phosphate
  modified_base 9: mod_base = OTHER; note = 2'-fluorocytidine-3'-phosphate
  modified_base 10: mod_base = OTHER; note = 2'-fluorocytidine-3'-phosphate
  modified_base 11: mod_base = OTHER; note = 2'-fluorouridine-3'-phosphate
  modified_base 12: mod_base = OTHER; note = 2'-O-methylguanosine-3'-phosphate
  modified_base 13: mod_base = OTHER; note = 2'-O-methylcytidine-3'-phosphate
  modified_base 14: mod_base = OTHER; note = 2'-O-methyluridine-3'-phosphate
  modified_base 15: mod_base = OTHER; note = 2'-O-methylguanosine-3'-phosphate
  modified_base 16: mod_base = OTHER; note = 2'-O-methyladenosine-3'-phosphate
  modified_base 17: mod_base = OTHER; note = 2'-O-methylguanosine-3'-phosphate
  modified_base 18: mod_base = OTHER; note = 2'-O-methylguanosine-3'-phosphate
  modified_base 19: mod_base = OTHER; note = 2'-O-methyluridine-3'-phosphate
  modified_base 20: mod_base = OTHER; note = 2'-O-methylcytidine-3'-phosphate
  modified_base 21: mod_base = OTHER; note = 2'-O-methyluridine-3'-phosphate N-[tris(GalNAc-alkyl)-amidodecanoyl)]-4-hydroxyprolinol (Hyp-(GalNAc-alkyl)3)
tctggcttcctgctgaggtct

SEQ ID NO: 5201 - RNA, 21 nt, synthetic construct
  source 1..21: mol_type = other RNA
  modified_base 1: mod_base = OTHER; note = 2'-O-methyluridine-3'-phosphorothioate
  modified_base 2: mod_base = OTHER; note = 2'-O-methyluridine-3'-phosphorothioate
  modified_base 3: mod_base = OTHER; note = 2'-O-methyluridine-3'-phosphate
  modified_base 4: mod_base = OTHER; note = 2'-O-methylcytidine-3'-phosphate
  modified_base 5: mod_base = OTHER; note = 2'-O-methyluridine-3'-phosphate
  modified_base 6: mod_base = OTHER; note = 2'-O-methyluridine-3'-phosphate
  modified_base 7: mod_base = OTHER; note = 2'-fluoroadenosine-3'-phosphate
  modified_base 8: mod_base = OTHER; note = 2'-O-methyluridine-3'-phosphate
  modified_base 9: mod_base = OTHER; note = 2'-fluorocytidine-3'-phosphate
  modified_base 10: mod_base = OTHER; note = 2'-fluorocytidine-3'-phosphate
  modified_base 11: mod_base = OTHER; note = 2'-fluorocytidine-3'-phosphate
  modified_base 12: mod_base = OTHER; note = 2'-O-methyluridine-3'-phosphate
  modified_base 13: mod_base = OTHER; note = 2'-O-methylguanosine-3'-phosphate
  modified_base 14: mod_base = OTHER; note = 2'-O-methyluridine-3'-phosphate
  modified_base 15: mod_base = OTHER; note = 2'-O-methyluridine-3'-phosphate
  modified_base 16: mod_base = OTHER; note = 2'-O-methylcytidine-3'-phosphate
  modified_base 17: mod_base = OTHER; note = 2'-O-methylcytidine-3'-phosphate
  modified_base 18: mod_base = OTHER; note = 2'-O-methylcytidine-3'-phosphate
  modified_base 19: mod_base = OTHER; note = 2'-O-methyluridine-3'-phosphate
  modified_base 20: mod_base = OTHER; note = 2'-O-methylcytidine-3'-phosphate
  modified_base 21: mod_base = OTHER; note = 2'-O-methyluridine-3'-phosphate N-[tris(GalNAc-alkyl)-amidodecanoyl)]-4-hydroxyprolinol (Hyp-(GalNAc-alkyl)3)
tttcttatccctgttccctct

SEQ ID NO: 5202 - RNA, 21 nt, synthetic construct
  source 1..21: mol_type = other RNA
  modified_base 1: mod_base = OTHER; note = 2'-O-methyluridine-3'-phosphorothioate
  modified_base 2: mod_base = OTHER; note = 2'-O-methylcytidine-3'-phosphorothioate
  modified_base 3: mod_base = OTHER; note = 2'-O-methyluridine-3'-phosphate
  modified_base 4: mod_base = OTHER; note = 2'-O-methylguanosine-3'-phosphate
  modified_base 5: mod_base = OTHER; note = 2'-O-methyluridine-3'-phosphate
  modified_base 6: mod_base = OTHER; note = 2'-O-methylcytidine-3'-phosphate
  modified_base 7: mod_base = OTHER; note = 2'-fluorouridine-3'-phosphate
  modified_base 8: mod_base = OTHER; note = 2'-O-methyladenosine-3'-phosphate
  modified_base 9: mod_base = OTHER; note = 2'-fluoroguanosine-3'-phosphate
  modified_base 10: mod_base = OTHER; note = 2'-fluoroguanosine-3'-phosphate
  modified_base 11: mod_base = OTHER; note = 2'-fluorouridine-3'-phosphate
  modified_base 12: mod_base = OTHER; note = 2'-O-methylguanosine-3'-phosphate
  modified_base 13: mod_base = OTHER; note = 2'-O-methyluridine-3'-phosphate
  modified_base 14: mod_base = OTHER; note = 2'-O-methylcytidine-3'-phosphate
  modified_base 15: mod_base = OTHER; note = 2'-O-methyladenosine-3'-phosphate
  modified_base 16: mod_base = OTHER; note = 2'-O-methyluridine-3'-phosphate
  modified_base 17: mod_base = OTHER; note = 2'-O-methylguanosine-3'-phosphate
  modified_base 18: mod_base = OTHER; note = 2'-O-methylguanosine-3'-phosphate
  modified_base 19: mod_base = OTHER; note = 2'-O-methyluridine-3'-phosphate
  modified_base 20: mod_base = OTHER; note = 2'-O-methyluridine-3'-phosphate
  modified_base 21: mod_base = OTHER; note = 2'-O-methyluridine-3'-phosphate N-[tris(GalNAc-alkyl)-amidodecanoyl)]-4-hydroxyprolinol (Hyp-(GalNAc-alkyl)3)
tctgtctaggtgtcatggttt

SEQ ID NO: 5203 - RNA, 21 nt, synthetic construct
  source 1..21: mol_type = other RNA
  modified_base 1: mod_base = OTHER; note = 2'-O-methyluridine-3'-phosphorothioate
  modified_base 2: mod_base = OTHER; note = 2'-O-methylcytidine-3'-phosphorothioate
  modified_base 3: mod_base = OTHER; note = 2'-O-methyluridine-3'-phosphate
  modified_base 4: mod_base = OTHER; note = 2'-O-methylguanosine-3'-phosphate
  modified_base 5: mod_base = OTHER; note = 2'-O-methyluridine-3'-phosphate
  modified_base 6: mod_base = OTHER; note = 2'-O-methylguanosine-3'-phosphate
  modified_base 7: mod_base = OTHER; note = 2'-fluorouridine-3'-phosphate
  modified_base 8: mod_base = OTHER; note = 2'-O-methyladenosine-3'-phosphate
  modified_base 9: mod_base = OTHER; note = 2'-fluoroadenosine-3'-phosphate
  modified_base 10: mod_base = OTHER; note = 2'-fluorocytidine-3'-phosphate
  modified_base 11: mod_base = OTHER; note = 2'-fluorouridine-3'-phosphate
  modified_base 12: mod_base = OTHER; note = 2'-O-methylguanosine-3'-phosphate
  modified_base 13: mod_base = OTHER; note = 2'-O-methyluridine-3'-phosphate
  modified_base 14: mod_base = OTHER; note = 2'-O-methylguanosine-3'-phosphate
  modified_base 15: mod_base = OTHER; note = 2'-O-methylguanosine-3'-phosphate
  modified_base 16: mod_base = OTHER; note = 2'-O-methylcytidine-3'-phosphate
  modified_base 17: mod_base = OTHER; note = 2'-O-methyluridine-3'-phosphate
  modified_base 18: mod_base = OTHER; note = 2'-O-methyladenosine-3'-phosphate
  modified_base 19: mod_base = OTHER; note = 2'-O-methyluridine-3'-phosphate
  modified_base 20: mod_base = OTHER; note = 2'-O-methyluridine-3'-phosphate
  modified_base 21: mod_base = OTHER; note = 2'-O-methyluridine-3'-phosphate N-[tris(GalNAc-alkyl)-amidodecanoyl)]-4-hydroxyprolinol (Hyp-(GalNAc-alkyl)3)
tctgtgtaactgtggctattt

SEQ ID NO: 5204 - RNA, 21 nt, synthetic construct
  source 1..21: mol_type = other RNA
  modified_base 1: mod_base = OTHER; note = 2'-O-methyluridine-3'-phosphorothioate
  modified_base 2: mod_base = OTHER; note = 2'-O-methyladenosine-3'-phosphorothioate
  modified_base 3: mod_base = OTHER; note = 2'-O-methyluridine-3'-phosphate
  modified_base 4: mod_base = OTHER; note = 2'-O-methyluridine-3'-phosphate
  modified_base 5: mod_base = OTHER; note = 2'-O-methylcytidine-3'-phosphate
  modified_base 6: mod_base = OTHER; note = 2'-O-methyluridine-3'-phosphate
  modified_base 7: mod_base = OTHER; note = 2'-fluoroguanosine-3'-phosphate
  modified_base 8: mod_base = OTHER; note = 2'-O-methyluridine-3'-phosphate
  modified_base 9: mod_base = OTHER; note = 2'-fluoroguanosine-3'-phosphate
  modified_base 10: mod_base = OTHER; note = 2'-fluorouridine-3'-phosphate
  modified_base 11: mod_base = OTHER; note = 2'-fluorocytidine-3'-phosphate
  modified_base 12: mod_base = OTHER; note = 2'-O-methylcytidine-3'-phosphate
  modified_base 13: mod_base = OTHER; note = 2'-O-methylcytidine-3'-phosphate
  modified_base 14: mod_base = OTHER; note = 2'-O-methyluridine-3'-phosphate
  modified_base 15: mod_base = OTHER; note = 2'-O-methyladenosine-3'-phosphate
  modified_base 16: mod_base = OTHER; note = 2'-O-methylcytidine-3'-phosphate
  modified_base 17: mod_base = OTHER; note = 2'-O-methyladenosine-3'-phosphate
  modified_base 18: mod_base = OTHER; note = 2'-O-methylcytidine-3'-phosphate
  modified_base 19: mod_base = OTHER; note = 2'-O-methyluridine-3'-phosphate
  modified_base 20: mod_base = OTHER; note = 2'-O-methyladenosine-3'-phosphate
  modified_base 21: mod_base = OTHER; note = 2'-O-methyluridine-3'-phosphate N-[tris(GalNAc-alkyl)-amidodecanoyl)]-4-hydroxyprolinol (Hyp-(GalNAc-alkyl)3)
tattctgtgtccctacactat

SEQ ID NO: 5205 - RNA, 21 nt, synthetic construct
  source 1..21: mol_type = other RNA
  modified_base 1: mod_base = OTHER; note = 2'-O-methylguanosine-3'-phosphorothioate
  modified_base 2: mod_base = OTHER; note = 2'-O-methylcytidine-3'-phosphorothioate
  modified_base 3: mod_base = OTHER; note = 2'-O-methylcytidine-3'-phosphate
  modified_base 4: mod_base = OTHER; note = 2'-O-methyluridine-3'-phosphate
  modified_base 5: mod_base = OTHER; note = 2'-O-methyladenosine-3'-phosphate
  modified_base 6: mod_base = OTHER; note = 2'-O-methylcytidine-3'-phosphate
  modified_base 7: mod_base = OTHER; note = 2'-fluoroadenosine-3'-phosphate
  modified_base 8: mod_base = OTHER; note = 2'-O-methyluridine-3'-phosphate
  modified_base 9: mod_base = OTHER; note = 2'-fluorouridine-3'-phosphate
  modified_base 10: mod_base = OTHER; note = 2'-fluorocytidine-3'-phosphate
  modified_base 11: mod_base = OTHER; note = 2'-fluorouridine-3'-phosphate
  modified_base 12: mod_base = OTHER; note = 2'-O-methylguanosine-3'-phosphate
  modified_base 13: mod_base = OTHER; note = 2'-O-methyladenosine-3'-phosphate
  modified_base 14: mod_base = OTHER; note = 2'-O-methyluridine-3'-phosphate
  modified_base 15: mod_base = OTHER; note = 2'-O-methyladenosine-3'-phosphate
  modified_base 16: mod_base = OTHER; note = 2'-O-methyluridine-3'-phosphate
  modified_base 17: mod_base = OTHER; note = 2'-O-methyladenosine-3'-phosphate
  modified_base 18: mod_base = OTHER; note = 2'-O-methyladenosine-3'-phosphate
  modified_base 19: mod_base = OTHER; note = 2'-O-methylcytidine-3'-phosphate
  modified_base 20: mod_base = OTHER; note = 2'-O-methyluridine-3'-phosphate
  modified_base 21: mod_base = OTHER; note = 2'-O-methyluridine-3'-phosphate N-[tris(GalNAc-alkyl)-amidodecanoyl)]-4-hydroxyprolinol (Hyp-(GalNAc-alkyl)3)
gcctacattctgatataactt

SEQ ID NO: 5206 - RNA, 21 nt, synthetic construct
  source 1..21: mol_type = other RNA
  modified_base 1: mod_base = OTHER; note = 2'-O-methylcytidine-3'-phosphorothioate
  modified_base 2: mod_base = OTHER; note = 2'-O-methylcytidine-3'-phosphorothioate
  modified_base 3: mod_base = OTHER; note = 2'-O-methyluridine-3'-phosphate
  modified_base 4: mod_base = OTHER; note = 2'-O-methyladenosine-3'-phosphate
  modified_base 5: mod_base = OTHER; note = 2'-O-methyladenosine-3'-phosphate
  modified_base 6: mod_base = OTHER; note = 2'-O-methyladenosine-3'-phosphate
  modified_base 7: mod_base = OTHER; note = 2'-fluoroguanosine-3'-phosphate
  modified_base 8: mod_base = OTHER; note = 2'-O-methylguanosine-3'-phosphate
  modified_base 9: mod_base = OTHER; note = 2'-fluorocytidine-3'-phosphate
  modified_base 10: mod_base = OTHER; note = 2'-fluorouridine-3'-phosphate
  modified_base 11: mod_base = OTHER; note = 2'-fluorouridine-3'-phosphate
  modified_base 12: mod_base = OTHER; note = 2'-O-methyluridine-3'-phosphate
  modified_base 13: mod_base = OTHER; note = 2'-O-methylcytidine-3'-phosphate
  modified_base 14: mod_base = OTHER; note = 2'-O-methyluridine-3'-phosphate
  modified_base 15: mod_base = OTHER; note = 2'-O-methyladenosine-3'-phosphate
  modified_base 16: mod_base = OTHER; note = 2'-O-methyluridine-3'-phosphate
  modified_base 17: mod_base = OTHER; note = 2'-O-methylcytidine-3'-phosphate
  modified_base 18: mod_base = OTHER; note = 2'-O-methyluridine-3'-phosphate
  modified_base 19: mod_base = OTHER; note = 2'-O-methyluridine-3'-phosphate
  modified_base 20: mod_base = OTHER; note = 2'-O-methylguanosine-3'-phosphate
  modified_base 21: mod_base = OTHER; note = 2'-O-methyluridine-3'-phosphate N-[tris(GalNAc-alkyl)-amidodecanoyl)]-4-hydroxyprolinol (Hyp-(GalNAc-alkyl)3)
cctaaaggctttctatcttgt

SEQ ID NO: 5207 - RNA, 21 nt, synthetic construct
  source 1..21: mol_type = other RNA
  modified_base 1: mod_base = OTHER; note = 2'-O-methylcytidine-3'-phosphorothioate
  modified_base 2: mod_base = OTHER; note = 2'-O-methyluridine-3'-phosphorothioate
  modified_base 3: mod_base = OTHER; note = 2'-O-methylcytidine-3'-phosphate
  modified_base 4: mod_base = OTHER; note = 2'-O-methyladenosine-3'-phosphate
  modified_base 5: mod_base = OTHER; note = 2'-O-methyladenosine-3'-phosphate
  modified_base 6: mod_base = OTHER; note = 2'-O-methylcytidine-3'-phosphate
  modified_base 7: mod_base = OTHER; note = 2'-fluoroadenosine-3'-phosphate
  modified_base 8: mod_base = OTHER; note = 2'-O-methyluridine-3'-phosphate
  modified_base 9: mod_base = OTHER; note = 2'-fluorocytidine-3'-phosphate
  modified_base 10: mod_base = OTHER; note = 2'-fluorouridine-3'-phosphate
  modified_base 11: mod_base = OTHER; note = 2'-fluorocytidine-3'-phosphate
  modified_base 12: mod_base = OTHER; note = 2'-O-methyladenosine-3'-phosphate
  modified_base 13: mod_base = OTHER; note = 2'-O-methyluridine-3'-phosphate
  modified_base 14: mod_base = OTHER; note = 2'-O-methyladenosine-3'-phosphate
  modified_base 15: mod_base = OTHER; note = 2'-O-methylcytidine-3'-phosphate
  modified_base 16: mod_base = OTHER; note = 2'-O-methyluridine-3'-phosphate
  modified_base 17: mod_base = OTHER; note = 2'-O-methylguanosine-3'-phosphate
  modified_base 18: mod_base = OTHER; note = 2'-O-methylguanosine-3'-phosphate
  modified_base 19: mod_base = OTHER; note = 2'-O-methyluridine-3'-phosphate
  modified_base 20: mod_base = OTHER; note = 2'-O-methyluridine-3'-phosphate
  modified_base 21: mod_base = OTHER; note = 2'-O-methyluridine-3'-phosphate N-[tris(GalNAc-alkyl)-amidodecanoyl)]-4-hydroxyprolinol (Hyp-(GalNAc-alkyl)3)
ctcaacatctcatactggttt

SEQ ID NO: 5208 - RNA, 21 nt, synthetic construct
  source 1..21: mol_type = other RNA
  modified_base 1: mod_base = OTHER; note = 2'-O-methylguanosine-3'-phosphorothioate
  modified_base 2: mod_base = OTHER; note = 2'-O-methylguanosine-3'-phosphorothioate
  modified_base 3: mod_base = OTHER; note = 2'-O-methyluridine-3'-phosphate
  modified_base 4: mod_base = OTHER; note = 2'-O-methyluridine-3'-phosphate
  modified_base 5: mod_base = OTHER; note = 2'-O-methylcytidine-3'-phosphate
  modified_base 6: mod_base = OTHER; note = 2'-O-methylcytidine-3'-phosphate
  modified_base 7: mod_base = OTHER; note = 2'-fluorocytidine-3'-phosphate
  modified_base 8: mod_base = OTHER; note = 2'-O-methyluridine-3'-phosphate
  modified_base 9: mod_base = OTHER; note = 2'-fluorouridine-3'-phosphate
  modified_base 10: mod_base = OTHER; note = 2'-fluoroadenosine-3'-phosphate
  modified_base 11: mod_base = OTHER; note = 2'-fluoroadenosine-3'-phosphate
  modified_base 12: mod_base = OTHER; note = 2'-O-methylcytidine-3'-phosphate
  modified_base 13: mod_base = OTHER; note = 2'-O-methyluridine-3'-phosphate
  modified_base 14: mod_base = OTHER; note = 2'-O-methylcytidine-3'-phosphate
  modified_base 15: mod_base = OTHER; note = 2'-O-methyluridine-3'-phosphate
  modified_base 16: mod_base = OTHER; note = 2'-O-methylguanosine-3'-phosphate
  modified_base 17: mod_base = OTHER; note = 2'-O-methylcytidine-3'-phosphate
  modified_base 18: mod_base = OTHER; note = 2'-O-methylcytidine-3'-phosphate
  modified_base 19: mod_base = OTHER; note = 2'-O-methyluridine-3'-phosphate
  modified_base 20: mod_base = OTHER; note = 2'-O-methyladenosine-3'-phosphate
  modified_base 21: mod_base = OTHER; note = 2'-O-methyluridine-3'-phosphate N-[tris(GalNAc-alkyl)-amidodecanoyl)]-4-hydroxyprolinol (Hyp-(GalNAc-alkyl)3)
ggttcccttaactctgcctat

SEQ ID NO: 5209 - RNA, 21 nt, synthetic construct
  source 1..21: mol_type = other RNA
  modified_base 1: mod_base = OTHER; note = 2'-O-methylcytidine-3'-phosphorothioate
  modified_base 2: mod_base = OTHER; note = 2'-O-methylcytidine-3'-phosphorothioate
  modified_base 3: mod_base = OTHER; note = 2'-O-methyluridine-3'-phosphate
  modified_base 4: mod_base = OTHER; note = 2'-O-methyladenosine-3'-phosphate
  modified_base 5: mod_base = OTHER; note = 2'-O-methyluridine-3'-phosphate
  modified_base 6: mod_base = OTHER; note = 2'-O-methyladenosine-3'-phosphate
  modified_base 7: mod_base = OTHER; note = 2'-fluorocytidine-3'-phosphate
  modified_base 8: mod_base = OTHER; note = 2'-O-methylcytidine-3'-phosphate
  modified_base 9: mod_base = OTHER; note = 2'-fluorouridine-3'-phosphate
  modified_base 10: mod_base = OTHER; note = 2'-fluorocytidine-3'-phosphate
  modified_base 11: mod_base = OTHER; note = 2'-fluorouridine-3'-phosphate
  modified_base 12: mod_base = OTHER; note = 2'-O-methylguanosine-3'-phosphate
  modified_base 13: mod_base = OTHER; note = 2'-O-methyluridine-3'-phosphate
  modified_base 14: mod_base = OTHER; note = 2'-O-methyladenosine-3'-phosphate
  modified_base 15: mod_base = OTHER; note = 2'-O-methyladenosine-3'-phosphate
  modified_base 16: mod_base = OTHER; note = 2'-O-methyladenosine-3'-phosphate
  modified_base 17: mod_base = OTHER; note = 2'-O-methyluridine-3'-phosphate
  modified_base 18: mod_base = OTHER; note = 2'-O-methyladenosine-3'-phosphate
  modified_base 19: mod_base = OTHER; note = 2'-O-methyladenosine-3'-phosphate
  modified_base 20: mod_base = OTHER; note = 2'-O-methyluridine-3'-phosphate
  modified_base 21: mod_base = OTHER; note = 2'-O-methyluridine-3'-phosphate N-[tris(GalNAc-alkyl)-amidodecanoyl)]-4-hydroxyprolinol (Hyp-(GalNAc-alkyl)3)
cctatacctctgtaaataatt

SEQ ID NO: 5210 - RNA, 21 nt, synthetic construct
  source 1..21: mol_type = other RNA
  modified_base 1: mod_base = OTHER; note = 2'-O-methyluridine-3'-phosphorothioate
  modified_base 2: mod_base = OTHER; note = 2'-O-methyladenosine-3'-phosphorothioate
  modified_base 3: mod_base = OTHER; note = 2'-O-methyladenosine-3'-phosphate
  modified_base 4: mod_base = OTHER; note = 2'-O-methyluridine-3'-phosphate
  modified_base 5: mod_base = OTHER; note = 2'-O-methyluridine-3'-phosphate
  modified_base 6: mod_base = OTHER; note = 2'-O-methylcytidine-3'-phosphate
  modified_base 7: mod_base = OTHER; note = 2'-fluorocytidine-3'-phosphate
  modified_base 8: mod_base = OTHER; note = 2'-O-methyluridine-3'-phosphate
  modified_base 9: mod_base = OTHER; note = 2'-fluorouridine-3'-phosphate
  modified_base 10: mod_base = OTHER; note = 2'-fluorocytidine-3'-phosphate
  modified_base 11: mod_base = OTHER; note = 2'-fluoroadenosine-3'-phosphate
  modified_base 12: mod_base = OTHER; note = 2'-O-methylcytidine-3'-phosphate
  modified_base 13: mod_base = OTHER; note = 2'-O-methyluridine-3'-phosphate
  modified_base 14: mod_base = OTHER; note = 2'-O-methyladenosine-3'-phosphate
  modified_base 15: mod_base = OTHER; note = 2'-O-methyladenosine-3'-phosphate
  modified_base 16: mod_base = OTHER; note = 2'-O-methylguanosine-3'-phosphate
  modified_base 17: mod_base = OTHER; note = 2'-O-methyluridine-3'-phosphate
  modified_base 18: mod_base = OTHER; note = 2'-O-methyluridine-3'-phosphate
  modified_base 19: mod_base = OTHER; note = 2'-O-methylcytidine-3'-phosphate
  modified_base 20: mod_base = OTHER; note = 2'-O-methyluridine-3'-phosphate
  modified_base 21: mod_base = OTHER; note = 2'-O-methyluridine-3'-phosphate N-[tris(GalNAc-alkyl)-amidodecanoyl)]-4-hydroxyprolinol (Hyp-(GalNAc-alkyl)3)
taattccttcactaagttctt

SEQ ID NO: 5211 - RNA, 21 nt, synthetic construct
  source 1..21: mol_type = other RNA
  modified_base 1: mod_base = OTHER; note = 2'-O-methyladenosine-3'-phosphorothioate
  modified_base 2: mod_base = OTHER; note = 2'-O-methyladenosine-3'-phosphorothioate
  modified_base 3: mod_base = OTHER; note = 2'-O-methyladenosine-3'-phosphate
  modified_base 4: mod_base = OTHER; note = 2'-O-methylguanosine-3'-phosphate
  modified_base 5: mod_base = OTHER; note = 2'-O-methyluridine-3'-phosphate
  modified_base 6: mod_base = OTHER; note = 2'-O-methylcytidine-3'-phosphate
  modified_base 7: mod_base = OTHER; note = 2'-fluorocytidine-3'-phosphate
  modified_base 8: mod_base = OTHER; note = 2'-O-methyluridine-3'-phosphate
  modified_base 9: mod_base = OTHER; note = 2'-fluorocytidine-3'-phosphate
  modified_base 10: mod_base = OTHER; note = 2'-fluorouridine-3'-phosphate
  modified_base 11: mod_base = OTHER; note = 2'-fluoroadenosine-3'-phosphate
  modified_base 12: mod_base = OTHER; note = 2'-O-methyluridine-3'-phosphate
  modified_base 13: mod_base = OTHER; note = 2'-O-methylcytidine-3'-phosphate
  modified_base 14: mod_base = OTHER; note = 2'-O-methyluridine-3'-phosphate
  modified_base 15: mod_base = OTHER; note = 2'-O-methylcytidine-3'-phosphate
  modified_base 16: mod_base = OTHER; note = 2'-O-methylcytidine-3'-phosphate
  modified_base 17: mod_base = OTHER; note = 2'-O-methyluridine-3'-phosphate
  modified_base 18: mod_base = OTHER; note = 2'-O-methyladenosine-3'-phosphate
  modified_base 19: mod_base = OTHER; note = 2'-O-methylcytidine-3'-phosphate
  modified_base 20: mod_base = OTHER; note = 2'-O-methyladenosine-3'-phosphate
  modified_base 21: mod_base = OTHER; note = 2'-O-methyluridine-3'-phosphate N-[tris(GalNAc-alkyl)-amidodecanoyl)]-4-hydroxyprolinol (Hyp-(GalNAc-alkyl)3)
aaagtcctctatctcctacat

SEQ ID NO: 5212 - RNA, 21 nt, synthetic construct
  source 1..21: mol_type = other RNA
  modified_base 1: mod_base = OTHER; note = 2'-O-methyluridine-3'-phosphorothioate
  modified_base 2: mod_base = OTHER; note = 2'-O-methyladenosine-3'-phosphorothioate
  modified_base 3: mod_base = OTHER; note = 2'-O-methylcytidine-3'-phosphate
  modified_base 4: mod_base = OTHER; note = 2'-O-methyladenosine-3'-phosphate
  modified_base 5: mod_base = OTHER; note = 2'-O-methyladenosine-3'-phosphate
  modified_base 6: mod_base = OTHER; note = 2'-O-methylguanosine-3'-phosphate
  modified_base 7: mod_base = OTHER; note = 2'-fluoroguanosine-3'-phosphate
  modified_base 8: mod_base = OTHER; note = 2'-O-methylguanosine-3'-phosphate
  modified_base 9: mod_base = OTHER; note = 2'-fluorocytidine-3'-phosphate
  modified_base 10: mod_base = OTHER; note = 2'-fluorocytidine-3'-phosphate
  modified_base 11: mod_base = OTHER; note = 2'-fluorocytidine-3'-phosphate
  modified_base 12: mod_base = OTHER; note = 2'-O-methyluridine-3'-phosphate
  modified_base 13: mod_base = OTHER; note = 2'-O-methyladenosine-3'-phosphate
  modified_base 14: mod_base = OTHER; note = 2'-O-methyladenosine-3'-phosphate
  modified_base 15: mod_base = OTHER; note = 2'-O-methylcytidine-3'-phosphate
  modified_base 16: mod_base = OTHER; note = 2'-O-methyluridine-3'-phosphate
  modified_base 17: mod_base = OTHER; note = 2'-O-methylguanosine-3'-phosphate
  modified_base 18: mod_base = OTHER; note = 2'-O-methylguanosine-3'-phosphate
  modified_base 19: mod_base = OTHER; note = 2'-O-methylcytidine-3'-phosphate
  modified_base 20: mod_base = OTHER; note = 2'-O-methyladenosine-3'-phosphate
  modified_base 21: mod_base = OTHER; note = 2'-O-methyluridine-3'-phosphate N-[tris(GalNAc-alkyl)-amidodecanoyl)]-4-hydroxyprolinol (Hyp-(GalNAc-alkyl)3)
tacaagggccctaactggcat

SEQ ID NO: 5213 - RNA, 21 nt, synthetic construct
  source 1..21: mol_type = other RNA
  modified_base 1: mod_base = OTHER; note = 2'-O-methylcytidine-3'-phosphorothioate
  modified_base 2: mod_base = OTHER; note = 2'-O-methyladenosine-3'-phosphorothioate
  modified_base 3: mod_base = OTHER; note = 2'-O-methylguanosine-3'-phosphate
  modified_base 4: mod_base = OTHER; note = 2'-O-methyladenosine-3'-phosphate
  modified_base 5: mod_base = OTHER; note = 2'-O-methyluridine-3'-phosphate
  modified_base 6: mod_base = OTHER; note = 2'-O-methylguanosine-3'-phosphate
  modified_base 7: mod_base = OTHER; note = 2'-fluoroadenosine-3'-phosphate
  modified_base 8: mod_base = OTHER; note = 2'-O-methylcytidine-3'-phosphate
  modified_base 9: mod_base = OTHER; note = 2'-fluoroadenosine-3'-phosphate
  modified_base 10: mod_base = OTHER; note = 2'-fluorocytidine-3'-phosphate
  modified_base 11: mod_base = OTHER; note = 2'-fluoroadenosine-3'-phosphate
  modified_base 12: mod_base = OTHER; note = 2'-O-methylguanosine-3'-phosphate
  modified_base 13: mod_base = OTHER; note = 2'-O-methyladenosine-3'-phosphate
  modified_base 14: mod_base = OTHER; note = 2'-O-methylguanosine-3'-phosphate
  modified_base 15: mod_base = OTHER; note = 2'-O-methylcytidine-3'-phosphate
  modified_base 16: mod_base = OTHER; note = 2'-O-methylcytidine-3'-phosphate
  modified_base 17: mod_base = OTHER; note = 2'-O-methyluridine-3'-phosphate
  modified_base 18: mod_base = OTHER; note = 2'-O-methylguanosine-3'-phosphate
  modified_base 19: mod_base = OTHER; note = 2'-O-methylcytidine-3'-phosphate
  modified_base 20: mod_base = OTHER; note = 2'-O-methylcytidine-3'-phosphate
  modified_base 21: mod_base = OTHER; note = 2'-O-methyluridine-3'-phosphate N-[tris(GalNAc-alkyl)-amidodecanoyl)]-4-hydroxyprolinol (Hyp-(GalNAc-alkyl)3)
cagatgacacagagcctgcct

SEQ ID NO: 5214 - RNA, 21 nt, synthetic construct
  source 1..21: mol_type = other RNA
  modified_base 1: mod_base = OTHER; note = 2'-O-methylcytidine-3'-phosphorothioate
  modified_base 2: mod_base = OTHER; note = 2'-O-methyluridine-3'-phosphorothioate
  modified_base 3: mod_base = OTHER; note = 2'-O-methylguanosine-3'-phosphate
  modified_base 4: mod_base = OTHER; note = 2'-O-methylcytidine-3'-phosphate
  modified_base 5: mod_base = OTHER; note = 2'-O-methyluridine-3'-phosphate
  modified_base 6: mod_base = OTHER; note = 2'-O-methyluridine-3'-phosphate
  modified_base 7: mod_base = OTHER; note = 2'-fluoroadenosine-3'-phosphate
  modified_base 8: mod_base = OTHER; note = 2'-O-methyluridine-3'-phosphate
  modified_base 9: mod_base = OTHER; note = 2'-fluoroguanosine-3'-phosphate
  modified_base 10: mod_base = OTHER; note = 2'-fluorocytidine-3'-phosphate
  modified_base 11: mod_base = OTHER; note = 2'-fluorouridine-3'-phosphate
  modified_base 12: mod_base = OTHER; note = 2'-O-methylguanosine-3'-phosphate
  modified_base 13: mod_base = OTHER; note = 2'-O-methyluridine-3'-phosphate
  modified_base 14: mod_base = OTHER; note = 2'-O-methyladenosine-3'-phosphate
  modified_base 15: mod_base = OTHER; note = 2'-O-methylguanosine-3'-phosphate
  modified_base 16: mod_base = OTHER; note = 2'-O-methyluridine-3'-phosphate
  modified_base 17: mod_base = OTHER; note = 2'-O-methylcytidine-3'-phosphate
  modified_base 18: mod_base = OTHER; note = 2'-O-methyluridine-3'-phosphate
  modified_base 19: mod_base = OTHER; note = 2'-O-methylguanosine-3'-phosphate
  modified_base 20: mod_base = OTHER; note = 2'-O-methylcytidine-3'-phosphate
  modified_base 21: mod_base = OTHER; note = 2'-O-methyluridine-3'-phosphate N-[tris(GalNAc-alkyl)-amidodecanoyl)]-4-hydroxyprolinol (Hyp-(GalNAc-alkyl)3)
ctgcttatgctgtagtctgct

SEQ ID NO: 5215 - RNA, 21 nt, synthetic construct
  source 1..21: mol_type = other RNA
  modified_base 1: mod_base = OTHER; note = 2'-O-methyladenosine-3'-phosphorothioate
  modified_base 2: mod_base = OTHER; note = 2'-O-methylcytidine-3'-phosphorothioate
  modified_base 3: mod_base = OTHER; note = 2'-O-methyluridine-3'-phosphate
  modified_base 4: mod_base = OTHER; note = 2'-O-methylcytidine-3'-phosphate
  modified_base 5: mod_base = OTHER; note = 2'-O-methyluridine-3'-phosphate
  modified_base 6: mod_base = OTHER; note = 2'-O-methylguanosine-3'-phosphate
  modified_base 7: mod_base = OTHER; note = 2'-fluorocytidine-3'-phosphate
  modified_base 8: mod_base = OTHER; note = 2'-O-methyluridine-3'-phosphate
  modified_base 9: mod_base = OTHER; note = 2'-fluoroguanosine-3'-phosphate
  modified_base 10: mod_base = OTHER; note = 2'-fluorouridine-3'-phosphate
  modified_base 11: mod_base = OTHER; note = 2'-fluorocytidine-3'-phosphate
  modified_base 12: mod_base = OTHER; note = 2'-O-methyluridine-3'-phosphate
  modified_base 13: mod_base = OTHER; note = 2'-O-methylcytidine-3'-phosphate
  modified_base 14: mod_base = OTHER; note = 2'-O-methyluridine-3'-phosphate
  modified_base 15: mod_base = OTHER; note = 2'-O-methyluridine-3'-phosphate
  modified_base 16: mod_base = OTHER; note = 2'-O-methylcytidine-3'-phosphate
  modified_base 17: mod_base = OTHER; note = 2'-O-methyladenosine-3'-phosphate
  modified_base 18: mod_base = OTHER; note = 2'-O-methylcytidine-3'-phosphate
  modified_base 19: mod_base = OTHER; note = 2'-O-methyladenosine-3'-phosphate
  modified_base 20: mod_base = OTHER; note = 2'-O-methyluridine-3'-phosphate
  modified_base 21: mod_base = OTHER; note = 2'-O-methyluridine-3'-phosphate N-[tris(GalNAc-alkyl)-amidodecanoyl)]-4-hydroxyprolinol (Hyp-(GalNAc-alkyl)3)
actctgctgtctcttcacatt

SEQ ID NO: 5216 - RNA, 21 nt, synthetic construct
  source 1..21: mol_type = other RNA
  modified_base 1: mod_base = OTHER; note = 2'-O-methyladenosine-3'-phosphorothioate
  modified_base 2: mod_base = OTHER; note = 2'-O-methyluridine-3'-phosphorothioate
  modified_base 3: mod_base = OTHER; note = 2'-O-methylguanosine-3'-phosphate
  modified_base 4: mod_base = OTHER; note = 2'-O-methylguanosine-3'-phosphate
  modified_base 5: mod_base = OTHER; note = 2'-O-methyluridine-3'-phosphate
  modified_base 6: mod_base = OTHER; note = 2'-O-methylcytidine-3'-phosphate
  modified_base 7: mod_base = OTHER; note = 2'-fluorouridine-3'-phosphate
  modified_base 8: mod_base = OTHER; note = 2'-O-methylcytidine-3'-phosphate
  modified_base 9: mod_base = OTHER; note = 2'-fluorocytidine-3'-phosphate
  modified_base 10: mod_base = OTHER; note = 2'-fluorouridine-3'-phosphate
  modified_base 11: mod_base = OTHER; note = 2'-fluorocytidine-3'-phosphate
  modified_base 12: mod_base = OTHER; note = 2'-O-methyladenosine-3'-phosphate
  modified_base 13: mod_base = OTHER; note = 2'-O-methylguanosine-3'-phosphate
  modified_base 14: mod_base = OTHER; note = 2'-O-methyladenosine-3'-phosphate
  modified_base 15: mod_base = OTHER; note = 2'-O-methyladenosine-3'-phosphate
  modified_base 16: mod_base = OTHER; note = 2'-O-methylcytidine-3'-phosphate
  modified_base 17: mod_base = OTHER; note = 2'-O-methyluridine-3'-phosphate
  modified_base 18: mod_base = OTHER; note = 2'-O-methylguanosine-3'-phosphate
  modified_base 19: mod_base = OTHER; note = 2'-O-methyladenosine-3'-phosphate
  modified_base 20: mod_base = OTHER; note = 2'-O-methyladenosine-3'-phosphate
  modified_base 21: mod_base = OTHER; note = 2'-O-methyluridine-3'-phosphate N-[tris(GalNAc-alkyl)-amidodecanoyl)]-4-hydroxyprolinol (Hyp-(GalNAc-alkyl)3)
atggtctcctcagaactgaat

SEQ ID NO: 5217 - RNA, 21 nt, synthetic construct
  source 1..21: mol_type = other RNA
  modified_base 1: mod_base = OTHER; note = 2'-O-methyladenosine-3'-phosphorothioate
  modified_base 2: mod_base = OTHER; note = 2'-O-methyladenosine-3'-phosphorothioate
  modified_base 3: mod_base = OTHER; note = 2'-O-methylcytidine-3'-phosphate
  modified_base 4: mod_base = OTHER; note = 2'-O-methyluridine-3'-phosphate
  modified_base 5: mod_base = OTHER; note = 2'-O-methyladenosine-3'-phosphate
  modified_base 6: mod_base = OTHER; note = 2'-O-methyluridine-3'-phosphate
  modified_base 7: mod_base = OTHER; note = 2'-fluorouridine-3'-phosphate
  modified_base 8: mod_base = OTHER; note = 2'-O-methylguanosine-3'-phosphate
  modified_base 9: mod_base = OTHER; note = 2'-fluorouridine-3'-phosphate
  modified_base 10: mod_base = OTHER; note = 2'-fluoroadenosine-3'-phosphate
  modified_base 11: mod_base = OTHER; note = 2'-fluorouridine-3'-phosphate
  modified_base 12: mod_base = OTHER; note = 2'-O-methylcytidine-3'-phosphate
  modified_base 13: mod_base = OTHER; note = 2'-O-methylcytidine-3'-phosphate
  modified_base 14: mod_base = OTHER; note = 2'-O-methyladenosine-3'-phosphate
  modified_base 15: mod_base = OTHER; note = 2'-O-methyluridine-3'-phosphate
  modified_base 16: mod_base = OTHER; note = 2'-O-methylcytidine-3'-phosphate
  modified_base 17: mod_base = OTHER; note = 2'-O-methyluridine-3'-phosphate
  modified_base 18: mod_base = OTHER; note = 2'-O-methylcytidine-3'-phosphate
  modified_base 19: mod_base = OTHER; note = 2'-O-methyladenosine-3'-phosphate
  modified_base 20: mod_base = OTHER; note = 2'-O-methylcytidine-3'-phosphate
  modified_base 21: mod_base = OTHER; note = 2'-O-methyluridine-3'-phosphate N-[tris(GalNAc-alkyl)-amidodecanoyl)]-4-hydroxyprolinol (Hyp-(GalNAc-alkyl)3)
aactattgtatccatctcact

SEQ ID NO: 5218 - RNA, 21 nt, synthetic construct
  source 1..21: mol_type = other RNA
  modified_base 1: mod_base = OTHER; note = 2'-O-methyluridine-3'-phosphorothioate
  modified_base 2: mod_base = OTHER; note = 2'-O-methylcytidine-3'-phosphorothioate
  modified_base 3: mod_base = OTHER; note = 2'-O-methyladenosine-3'-phosphate
  modified_base 4: mod_base = OTHER; note = 2'-O-methylcytidine-3'-phosphate
  modified_base 5: mod_base = OTHER; note = 2'-O-methyladenosine-3'-phosphate
  modified_base 6: mod_base = OTHER; note = 2'-O-methylcytidine-3'-phosphate
  modified_base 7: mod_base = OTHER; note = 2'-fluorouridine-3'-phosphate
  modified_base 8: mod_base = OTHER; note = 2'-O-methyluridine-3'-phosphate
  modified_base 9: mod_base = OTHER; note = 2'-fluorouridine-3'-phosphate
  modified_base 10: mod_base = OTHER; note = 2'-fluoroadenosine-3'-phosphate
  modified_base 11: mod_base = OTHER; note = 2'-fluorouridine-3'-phosphate
  modified_base 12: mod_base = OTHER; note = 2'-O-methylguanosine-3'-phosphate
  modified_base 13: mod_base = OTHER; note = 2'-O-methylcytidine-3'-phosphate
  modified_base 14: mod_base = OTHER; note = 2'-O-methylcytidine-3'-phosphate
  modified_base 15: mod_base = OTHER; note = 2'-O-methyluridine-3'-phosphate
  modified_base 16: mod_base = OTHER; note = 2'-O-methylcytidine-3'-phosphate
  modified_base 17: mod_base = OTHER; note = 2'-O-methyluridine-3'-phosphate
  modified_base 18: mod_base = OTHER; note = 2'-O-methyluridine-3'-phosphate
  modified_base 19: mod_base = OTHER; note = 2'-O-methylcytidine-3'-phosphate
  modified_base 20: mod_base = OTHER; note = 2'-O-methyluridine-3'-phosphate
  modified_base 21: mod_base = OTHER; note = 2'-O-methyluridine-3'-phosphate N-[tris(GalNAc-alkyl)-amidodecanoyl)]-4-hydroxyprolinol (Hyp-(GalNAc-alkyl)3)
tcacactttatgcctcttctt

SEQ ID NO: 5219 - RNA, 21 nt, synthetic construct
  source 1..21: mol_type = other RNA
  modified_base 1: mod_base = OTHER; note = 2'-O-methyladenosine-3'-phosphorothioate
  modified_base 2: mod_base = OTHER; note = 2'-O-methyluridine-3'-phosphorothioate
  modified_base 3: mod_base = OTHER; note = 2'-O-methylcytidine-3'-phosphate
  modified_base 4: mod_base = OTHER; note = 2'-O-methylcytidine-3'-phosphate
  modified_base 5: mod_base = OTHER; note = 2'-O-methyluridine-3'-phosphate
  modified_base 6: mod_base = OTHER; note = 2'-O-methyluridine-3'-phosphate
  modified_base 7: mod_base = OTHER; note = 2'-fluorocytidine-3'-phosphate
  modified_base 8: mod_base = OTHER; note = 2'-O-methylcytidine-3'-phosphate
  modified_base 9: mod_base = OTHER; note = 2'-fluoroadenosine-3'-phosphate
  modified_base 10: mod_base = OTHER; note = 2'-fluoroguanosine-3'-phosphate
  modified_base 11: mod_base = OTHER; note = 2'-fluoroadenosine-3'-phosphate
  modified_base 12: mod_base = OTHER; note = 2'-O-methyladenosine-3'-phosphate
  modified_base 13: mod_base = OTHER; note = 2'-O-methylcytidine-3'-phosphate
  modified_base 14: mod_base = OTHER; note = 2'-O-methylcytidine-3'-phosphate
  modified_base 15: mod_base = OTHER; note = 2'-O-methyladenosine-3'-phosphate
  modified_base 16: mod_base = OTHER; note = 2'-O-methyluridine-3'-phosphate
  modified_base 17: mod_base = OTHER; note = 2'-O-methylcytidine-3'-phosphate
  modified_base 18: mod_base = OTHER; note = 2'-O-methyluridine-3'-phosphate
  modified_base 19: mod_base = OTHER; note = 2'-O-methyluridine-3'-phosphate
  modified_base 20: mod_base = OTHER; note = 2'-O-methyluridine-3'-phosphate
  modified_base 21: mod_base = OTHER; note = 2'-O-methyluridine-3'-phosphate N-[tris(GalNAc-alkyl)-amidodecanoyl)]-4-hydroxyprolinol (Hyp-(GalNAc-alkyl)3)
atccttccagaaccatctttt

SEQ ID NO: 5220 - RNA, 21 nt, synthetic construct
  source 1..21: mol_type = other RNA
  modified_base 1: mod_base = OTHER; note = 2'-O-methyluridine-3'-phosphorothioate
  modified_base 2: mod_base = OTHER; note = 2'-O-methyluridine-3'-phosphorothioate
  modified_base 3: mod_base = OTHER; note = 2'-O-methyluridine-3'-phosphate
  modified_base 4: mod_base = OTHER; note = 2'-O-methylguanosine-3'-phosphate
  modified_base 5: mod_base = OTHER; note = 2'-O-methyladenosine-3'-phosphate
  modified_base 6: mod_base = OTHER; note = 2'-O-methylguanosine-3'-phosphate
  modified_base 7: mod_base = OTHER; note = 2'-fluoroguanosine-3'-phosphate
  modified_base 8: mod_base = OTHER; note = 2'-O-methyluridine-3'-phosphate
  modified_base 9: mod_base = OTHER; note = 2'-fluorocytidine-3'-phosphate
  modified_base 10: mod_base = OTHER; note = 2'-fluorouridine-3'-phosphate
  modified_base 11: mod_base = OTHER; note = 2'-fluorocytidine-3'-phosphate
  modified_base 12: mod_base = OTHER; note = 2'-O-methyladenosine-3'-phosphate
  modified_base 13: mod_base = OTHER; note = 2'-O-methyluridine-3'-phosphate
  modified_base 14: mod_base = OTHER; note = 2'-O-methylguanosine-3'-phosphate
  modified_base 15: mod_base = OTHER; note = 2'-O-methylguanosine-3'-phosphate
  modified_base 16: mod_base = OTHER; note = 2'-O-methylcytidine-3'-phosphate
  modified_base 17: mod_base = OTHER; note = 2'-O-methyluridine-3'-phosphate
  modified_base 18: mod_base = OTHER; note = 2'-O-methyladenosine-3'-phosphate
  modified_base 19: mod_base = OTHER; note = 2'-O-methyladenosine-3'-phosphate
  modified_base 20: mod_base = OTHER; note = 2'-O-methyluridine-3'-phosphate
  modified_base 21: mod_base = OTHER; note = 2'-O-methyluridine-3'-phosphate N-[tris(GalNAc-alkyl)-amidodecanoyl)]-4-hydroxyprolinol (Hyp-(GalNAc-alkyl)3)
tttgaggtctcatggctaatt

SEQ ID NO: 5221 - RNA, 21 nt, synthetic construct
  source 1..21: mol_type = other RNA
  modified_base 1: mod_base = OTHER; note = 2'-O-methyluridine-3'-phosphorothioate
  modified_base 2: mod_base = OTHER; note = 2'-O-methyladenosine-3'-phosphorothioate
  modified_base 3: mod_base = OTHER; note = 2'-O-methylguanosine-3'-phosphate
  modified_base 4: mod_base = OTHER; note = 2'-O-methylguanosine-3'-phosphate
  modified_base 5: mod_base = OTHER; note = 2'-O-methylcytidine-3'-phosphate
  modified_base 6: mod_base = OTHER; note = 2'-O-methyluridine-3'-phosphate
  modified_base 7: mod_base = OTHER; note = 2'-fluorouridine-3'-phosphate
  modified_base 8: mod_base = OTHER; note = 2'-O-methyluridine-3'-phosphate
  modified_base 9: mod_base = OTHER; note = 2'-fluoroadenosine-3'-phosphate
  modified_base 10: mod_base = OTHER; note = 2'-fluorocytidine-3'-phosphate
  modified_base 11: mod_base = OTHER; note = 2'-fluorocytidine-3'-phosphate
  modified_base 12: mod_base = OTHER; note = 2'-O-methyluridine-3'-phosphate
  modified_base 13: mod_base = OTHER; note = 2'-O-methylguanosine-3'-phosphate
  modified_base 14: mod_base = OTHER; note = 2'-O-methyluridine-3'-phosphate
  modified_base 15: mod_base = OTHER; note = 2'-O-methyluridine-3'-phosphate
  modified_base 16: mod_base = OTHER; note = 2'-O-methylcytidine-3'-phosphate
  modified_base 17: mod_base = OTHER; note = 2'-O-methylcytidine-3'-phosphate
  modified_base 18: mod_base = OTHER; note = 2'-O-methylcytidine-3'-phosphate
  modified_base 19: mod_base = OTHER; note = 2'-O-methyluridine-3'-phosphate
  modified_base 20: mod_base = OTHER; note = 2'-O-methylcytidine-3'-phosphate
  modified_base 21: mod_base = OTHER; note = 2'-O-methyluridine-3'-phosphate N-[tris(GalNAc-alkyl)-amidodecanoyl)]-4-hydroxyprolinol (Hyp-(GalNAc-alkyl)3)
taggctttacctgttccctct

SEQ ID NO: 5222 - RNA, 21 nt, synthetic construct
  source 1..21: mol_type = other RNA
  modified_base 1: mod_base = OTHER; note = 2'-O-methyluridine-3'-phosphorothioate
  modified_base 2: mod_base = OTHER; note = 2'-O-methylcytidine-3'-phosphorothioate
  modified_base 3: mod_base = OTHER; note = 2'-O-methyluridine-3'-phosphate
  modified_base 4: mod_base = OTHER; note = 2'-O-methylguanosine-3'-phosphate
  modified_base 5: mod_base = OTHER; note = 2'-O-methyluridine-3'-phosphate
  modified_base 6: mod_base = OTHER; note = 2'-O-methyladenosine-3'-phosphate
  modified_base 7: mod_base = OTHER; note = 2'-fluoroadenosine-3'-phosphate
  modified_base 8: mod_base = OTHER; note = 2'-O-methyluridine-3'-phosphate
  modified_base 9: mod_base = OTHER; note = 2'-fluorocytidine-3'-phosphate
  modified_base 10: mod_base = OTHER; note = 2'-fluorocytidine-3'-phosphate
  modified_base 11: mod_base = OTHER; note = 2'-fluorocytidine-3'-phosphate
  modified_base 12: mod_base = OTHER; note = 2'-O-methyluridine-3'-phosphate
  modified_base 13: mod_base = OTHER; note = 2'-O-methylcytidine-3'-phosphate
  modified_base 14: mod_base = OTHER; note = 2'-O-methylcytidine-3'-phosphate
  modified_base 15: mod_base = OTHER; note = 2'-O-methyladenosine-3'-phosphate
  modified_base 16: mod_base = OTHER; note = 2'-O-methyladenosine-3'-phosphate
  modified_base 17: mod_base = OTHER; note = 2'-O-methyladenosine-3'-phosphate
  modified_base 18: mod_base = OTHER; note = 2'-O-methyladenosine-3'-phosphate
  modified_base 19: mod_base = OTHER; note = 2'-O-methylguanosine-3'-phosphate
  modified_base 20: mod_base = OTHER; note = 2'-O-methyladenosine-3'-phosphate
  modified_base 21: mod_base = OTHER; note = 2'-O-methyluridine-3'-phosphate N-[tris(GalNAc-alkyl)-amidodecanoyl)]-4-hydroxyprolinol (Hyp-(GalNAc-alkyl)3)
tctgtaatccctccaaaagat

SEQ ID NO: 5223 - RNA, 21 nt, synthetic construct
  source 1..21: mol_type = other RNA
  modified_base 1: mod_base = OTHER; note = 2'-O-methyladenosine-3'-phosphorothioate
  modified_base 2: mod_base = OTHER; note = 2'-O-methyluridine-3'-phosphorothioate
  modified_base 3: mod_base = OTHER; note = 2'-O-methylguanosine-3'-phosphate
  modified_base 4: mod_base = OTHER; note = 2'-O-methyladenosine-3'-phosphate
  modified_base 5: mod_base = OTHER; note = 2'-O-methylguanosine-3'-phosphate
  modified_base 6: mod_base = OTHER; note = 2'-O-methyladenosine-3'-phosphate
  modified_base 7: mod_base = OTHER; note = 2'-fluorocytidine-3'-phosphate
  modified_base 8: mod_base = OTHER; note = 2'-O-methyladenosine-3'-phosphate
  modified_base 9: mod_base = OTHER; note = 2'-fluoroguanosine-3'-phosphate
  modified_base 10: mod_base = OTHER; note = 2'-fluoroadenosine-3'-phosphate
  modified_base 11: mod_base = OTHER; note = 2'-fluorouridine-3'-phosphate
  modified_base 12: mod_base = OTHER; note = 2'-O-methylcytidine-3'-phosphate
  modified_base 13: mod_base = OTHER; note = 2'-O-methyluridine-3'-phosphate
  modified_base 14: mod_base = OTHER; note = 2'-O-methyladenosine-3'-phosphate
  modified_base 15: mod_base = OTHER; note = 2'-O-methyluridine-3'-phosphate
  modified_base 16: mod_base = OTHER; note = 2'-O-methylguanosine-3'-phosphate
  modified_base 17: mod_base = OTHER; note = 2'-O-methylcytidine-3'-phosphate
  modified_base 18: mod_base = OTHER; note = 2'-O-methyluridine-3'-phosphate
  modified_base 19: mod_base = OTHER; note = 2'-O-methyluridine-3'-phosphate
  modified_base 20: mod_base = OTHER; note = 2'-O-methylguanosine-3'-phosphate
  modified_base 21: mod_base = OTHER; note = 2'-O-methyluridine-3'-phosphate N-[tris(GalNAc-alkyl)-amidodecanoyl)]-4-hydroxyprolinol (Hyp-(GalNAc-alkyl)3)
atgagacagatctatgcttgt

SEQ ID NO: 5224 - RNA, 21 nt, synthetic construct
  source 1..21: mol_type = other RNA
  modified_base 1: mod_base = OTHER; note = 2'-O-methyluridine-3'-phosphorothioate
  modified_base 2: mod_base = OTHER; note = 2'-O-methyluridine-3'-phosphorothioate
  modified_base 3: mod_base = OTHER; note = 2'-O-methylguanosine-3'-phosphate
  modified_base 4: mod_base = OTHER; note = 2'-O-methylguanosine-3'-phosphate
  modified_base 5: mod_base = OTHER; note = 2'-O-methyluridine-3'-phosphate
  modified_base 6: mod_base = OTHER; note = 2'-O-methylcytidine-3'-phosphate
  modified_base 7: mod_base = OTHER; note = 2'-fluoroadenosine-3'-phosphate
  modified_base 8: mod_base = OTHER; note = 2'-O-methyluridine-3'-phosphate
  modified_base 9: mod_base = OTHER; note = 2'-fluorocytidine-3'-phosphate
  modified_base 10: mod_base = OTHER; note = 2'-fluorocytidine-3'-phosphate
  modified_base 11: mod_base = OTHER; note = 2'-fluoroadenosine-3'-phosphate
  modified_base 12: mod_base = OTHER; note = 2'-O-methylguanosine-3'-phosphate
  modified_base 13: mod_base = OTHER; note = 2'-O-methyluridine-3'-phosphate
  modified_base 14: mod_base = OTHER; note = 2'-O-methyladenosine-3'-phosphate
  modified_base 15: mod_base = OTHER; note = 2'-O-methyladenosine-3'-phosphate
  modified_base 16: mod_base = OTHER; note = 2'-O-methyladenosine-3'-phosphate
  modified_base 17: mod_base = OTHER; note = 2'-O-methylcytidine-3'-phosphate
  modified_base 18: mod_base = OTHER; note = 2'-O-methyluridine-3'-phosphate
  modified_base 19: mod_base = OTHER; note = 2'-O-methylguanosine-3'-phosphate
  modified_base 20: mod_base = OTHER; note = 2'-O-methyladenosine-3'-phosphate
  modified_base 21: mod_base = OTHER; note = 2'-O-methyluridine-3'-phosphate N-[tris(GalNAc-alkyl)-amidodecanoyl)]-4-hydroxyprolinol (Hyp-(GalNAc-alkyl)3)
ttggtcatccagtaaactgat

SEQ ID NO: 5225 - RNA, 21 nt, synthetic construct
  source 1..21: mol_type = other RNA
  modified_base 1: mod_base = OTHER; note = 2'-O-methylguanosine-3'-phosphorothioate
  modified_base 2: mod_base = OTHER; note = 2'-O-methyluridine-3'-phosphorothioate
  modified_base 3: mod_base = OTHER; note = 2'-O-methylguanosine-3'-phosphate
  modified_base 4: mod_base = OTHER; note = 2'-O-methylguanosine-3'-phosphate
  modified_base 5: mod_base = OTHER; note = 2'-O-methylguanosine-3'-phosphate
  modified_base 6: mod_base = OTHER; note = 2'-O-methylcytidine-3'-phosphate
  modified_base 7: mod_base = OTHER; note = 2'-fluoroadenosine-3'-phosphate
  modified_base 8: mod_base = OTHER; note = 2'-O-methylcytidine-3'-phosphate
  modified_base 9: mod_base = OTHER; note = 2'-fluoroguanosine-3'-phosphate
  modified_base 10: mod_base = OTHER; note = 2'-fluorocytidine-3'-phosphate
  modified_base 11: mod_base = OTHER; note = 2'-fluoroadenosine-3'-phosphate
  modified_base 12: mod_base = OTHER; note = 2'-O-methyladenosine-3'-phosphate
  modified_base 13: mod_base = OTHER; note = 2'-O-methylguanosine-3'-phosphate
  modified_base 14: mod_base = OTHER; note = 2'-O-methyluridine-3'-phosphate
  modified_base 15: mod_base = OTHER; note = 2'-O-methylguanosine-3'-phosphate
  modified_base 16: mod_base = OTHER; note = 2'-O-methyluridine-3'-phosphate
  modified_base 17: mod_base = OTHER; note = 2'-O-methylguanosine-3'-phosphate
  modified_base 18: mod_base = OTHER; note = 2'-O-methylguanosine-3'-phosphate
  modified_base 19: mod_base = OTHER; note = 2'-O-methylguanosine-3'-phosphate
  modified_base 20: mod_base = OTHER; note = 2'-O-methyladenosine-3'-phosphate
  modified_base 21: mod_base = OTHER; note = 2'-O-methyluridine-3'-phosphate N-[tris(GalNAc-alkyl)-amidodecanoyl)]-4-hydroxyprolinol (Hyp-(GalNAc-alkyl)3)
gtgggcacgcaagtgtgggat

SEQ ID NO: 5226 - RNA, 21 nt, synthetic construct
  source 1..21: mol_type = other RNA
  modified_base 1: mod_base = OTHER; note = 2'-O-methyladenosine-3'-phosphorothioate
  modified_base 2: mod_base = OTHER; note = 2'-O-methylguanosine-3'-phosphorothioate
  modified_base 3: mod_base = OTHER; note = 2'-O-methylguanosine-3'-phosphate
  modified_base 4: mod_base = OTHER; note = 2'-O-methylcytidine-3'-phosphate
  modified_base 5: mod_base = OTHER; note = 2'-O-methyladenosine-3'-phosphate
  modified_base 6: mod_base = OTHER; note = 2'-O-methyluridine-3'-phosphate
  modified_base 7: mod_base = OTHER; note = 2'-fluoroguanosine-3'-phosphate
  modified_base 8: mod_base = OTHER; note = 2'-O-methylcytidine-3'-phosphate
  modified_base 9: mod_base = OTHER; note = 2'-fluorouridine-3'-phosphate
  modified_base 10: mod_base = OTHER; note = 2'-fluorocytidine-3'-phosphate
  modified_base 11: mod_base = OTHER; note = 2'-fluoroadenosine-3'-phosphate
  modified_base 12: mod_base = OTHER; note = 2'-O-methylguanosine-3'-phosphate
  modified_base 13: mod_base = OTHER; note = 2'-O-methyladenosine-3'-phosphate
  modified_base 14: mod_base = OTHER; note = 2'-O-methylguanosine-3'-phosphate
  modified_base 15: mod_base = OTHER; note = 2'-O-methylcytidine-3'-phosphate
  modified_base 16: mod_base = OTHER; note = 2'-O-methyluridine-3'-phosphate
  modified_base 17: mod_base = OTHER; note = 2'-O-methylguanosine-3'-phosphate
  modified_base 18: mod_base = OTHER; note = 2'-O-methylguanosine-3'-phosphate
  modified_base 19: mod_base = OTHER; note = 2'-O-methylcytidine-3'-phosphate
  modified_base 20: mod_base = OTHER; note = 2'-O-methyluridine-3'-phosphate
  modified_base 21: mod_base = OTHER; note = 2'-O-methyluridine-3'-phosphate N-[tris(GalNAc-alkyl)-amidodecanoyl)]-4-hydroxyprolinol (Hyp-(GalNAc-alkyl)3)
aggcatgctcagagctggctt

SEQ ID NO: 5227 - RNA, 21 nt, synthetic construct
  source 1..21: mol_type = other RNA
  modified_base 1: mod_base = OTHER; note = 2'-O-methyluridine-3'-phosphorothioate
  modified_base 2: mod_base = OTHER; note = 2'-O-methylcytidine-3'-phosphorothioate
  modified_base 3: mod_base = OTHER; note = 2'-O-methyluridine-3'-phosphate
  modified_base 4: mod_base = OTHER; note = 2'-O-methylguanosine-3'-phosphate
  modified_base 5: mod_base = OTHER; note = 2'-O-methyladenosine-3'-phosphate
  modified_base 6: mod_base = OTHER; note = 2'-O-methylcytidine-3'-phosphate
  modified_base 7: mod_base = OTHER; note = 2'-fluorouridine-3'-phosphate
  modified_base 8: mod_base = OTHER; note = 2'-O-methyluridine-3'-phosphate
  modified_base 9: mod_base = OTHER; note = 2'-fluoroguanosine-3'-phosphate
  modified_base 10: mod_base = OTHER; note = 2'-fluorocytidine-3'-phosphate
  modified_base 11: mod_base = OTHER; note = 2'-fluorocytidine-3'-phosphate
  modified_base 12: mod_base = OTHER; note = 2'-O-methyluridine-3'-phosphate
  modified_base 13: mod_base = OTHER; note = 2'-O-methyluridine-3'-phosphate
  modified_base 14: mod_base = OTHER; note = 2'-O-methylcytidine-3'-phosphate
  modified_base 15: mod_base = OTHER; note = 2'-O-methylcytidine-3'-phosphate
  modified_base 16: mod_base = OTHER; note = 2'-O-methyluridine-3'-phosphate
  modified_base 17: mod_base = OTHER; note = 2'-O-methyluridine-3'-phosphate
  modified_base 18: mod_base = OTHER; note = 2'-O-methyluridine-3'-phosphate
  modified_base 19: mod_base = OTHER; note = 2'-O-methylcytidine-3'-phosphate
  modified_base 20: mod_base = OTHER; note = 2'-O-methyladenosine-3'-phosphate
  modified_base 21: mod_base = OTHER; note = 2'-O-methyluridine-3'-phosphate N-[tris(GalNAc-alkyl)-amidodecanoyl)]-4-hydroxyprolinol (Hyp-(GalNAc-alkyl)3)
tctgacttgccttcctttcat

SEQ ID NO: 5228 - RNA, 21 nt, synthetic construct
  source 1..21: mol_type = other RNA
  modified_base 1: mod_base = OTHER; note = 2'-O-methyluridine-3'-phosphorothioate
  modified_base 2: mod_base = OTHER; note = 2'-O-methylguanosine-3'-phosphorothioate
  modified_base 3: mod_base = OTHER; note = 2'-O-methylcytidine-3'-phosphate
  modified_base 4: mod_base = OTHER; note = 2'-O-methyluridine-3'-phosphate
  modified_base 5: mod_base = OTHER; note = 2'-O-methylcytidine-3'-phosphate
  modified_base 6: mod_base = OTHER; note = 2'-O-methylcytidine-3'-phosphate
  modified_base 7: mod_base = OTHER; note = 2'-fluoroadenosine-3'-phosphate
  modified_base 8: mod_base = OTHER; note = 2'-O-methylcytidine-3'-phosphate
  modified_base 9: mod_base = OTHER; note = 2'-fluorocytidine-3'-phosphate
  modified_base 10: mod_base = OTHER; note = 2'-fluorocytidine-3'-phosphate
  modified_base 11: mod_base = OTHER; note = 2'-fluoroadenosine-3'-phosphate
  modified_base 12: mod_base = OTHER; note = 2'-O-methylguanosine-3'-phosphate
  modified_base 13: mod_base = OTHER; note = 2'-O-methylguanosine-3'-phosphate
  modified_base 14: mod_base = OTHER; note = 2'-O-methyladenosine-3'-phosphate
  modified_base 15: mod_base = OTHER; note = 2'-O-methylguanosine-3'-phosphate
  modified_base 16: mod_base = OTHER; note = 2'-O-methyluridine-3'-phosphate
  modified_base 17: mod_base = OTHER; note = 2'-O-methylcytidine-3'-phosphate
  modified_base 18: mod_base = OTHER; note = 2'-O-methylcytidine-3'-phosphate
  modified_base 19: mod_base = OTHER; note = 2'-O-methyluridine-3'-phosphate
  modified_base 20: mod_base = OTHER; note = 2'-O-methylguanosine-3'-phosphate
  modified_base 21: mod_base = OTHER; note = 2'-O-methyluridine-3'-phosphate N-[tris(GalNAc-alkyl)-amidodecanoyl)]-4-hydroxyprolinol (Hyp-(GalNAc-alkyl)3)
tgctccacccaggagtcctgt

SEQ ID NO: 5229 - RNA, 21 nt, synthetic construct
  source 1..21: mol_type = other RNA
  modified_base 1: mod_base = OTHER; note = 2'-O-methylcytidine-3'-phosphorothioate
  modified_base 2: mod_base = OTHER; note = 2'-O-methyluridine-3'-phosphorothioate
  modified_base 3: mod_base = OTHER; note = 2'-O-methylguanosine-3'-phosphate
  modified_base 4: mod_base = OTHER; note = 2'-O-methylguanosine-3'-phosphate
  modified_base 5: mod_base = OTHER; note = 2'-O-methyladenosine-3'-phosphate
  modified_base 6: mod_base = OTHER; note = 2'-O-methyladenosine-3'-phosphate
  modified_base 7: mod_base = OTHER; note = 2'-fluoroguanosine-3'-phosphate
  modified_base 8: mod_base = OTHER; note = 2'-O-methylcytidine-3'-phosphate
  modified_base 9: mod_base = OTHER; note = 2'-fluorouridine-3'-phosphate
  modified_base 10: mod_base = OTHER; note = 2'-fluoroguanosine-3'-phosphate
  modified_base 11: mod_base = OTHER; note = 2'-fluoroguanosine-3'-phosphate
  modified_base 12: mod_base = OTHER; note = 2'-O-methyladenosine-3'-phosphate
  modified_base 13: mod_base = OTHER; note = 2'-O-methyladenosine-3'-phosphate
  modified_base 14: mod_base = OTHER; note = 2'-O-methyluridine-3'-phosphate
  modified_base 15: mod_base = OTHER; note = 2'-O-methylguanosine-3'-phosphate
  modified_base 16: mod_base = OTHER; note = 2'-O-methylguanosine-3'-phosphate
  modified_base 17: mod_base = OTHER; note = 2'-O-methylguanosine-3'-phosphate
  modified_base 18: mod_base = OTHER; note = 2'-O-methylcytidine-3'-phosphate
  modified_base 19: mod_base = OTHER; note = 2'-O-methyladenosine-3'-phosphate
  modified_base 20: mod_base = OTHER; note = 2'-O-methyladenosine-3'-phosphate
  modified_base 21: mod_base = OTHER; note = 2'-O-methyluridine-3'-phosphate N-[tris(GalNAc-alkyl)-amidodecanoyl)]-4-hydroxyprolinol (Hyp-(GalNAc-alkyl)3)
ctggaagctggaatgggcaat

SEQ ID NO: 5230 - RNA, 21 nt, synthetic construct
  source 1..21: mol_type = other RNA
  modified_base 1: mod_base = OTHER; note = 2'-O-methylguanosine-3'-phosphorothioate
  modified_base 2: mod_base = OTHER; note = 2'-O-methylguanosine-3'-phosphorothioate
  modified_base 3: mod_base = OTHER; note = 2'-O-methylguanosine-3'-phosphate
  modified_base 4: mod_base = OTHER; note = 2'-O-methylcytidine-3'-phosphate
  modified_base 5: mod_base = OTHER; note = 2'-O-methyluridine-3'-phosphate
  modified_base 6: mod_base = OTHER; note = 2'-O-methylguanosine-3'-phosphate
  modified_base 7: mod_base = OTHER; note = 2'-fluorocytidine-3'-phosphate
  modified_base 8: mod_base = OTHER; note = 2'-O-methyluridine-3'-phosphate
  modified_base 9: mod_base = OTHER; note = 2'-fluoroguanosine-3'-phosphate
  modified_base 10: mod_base = OTHER; note = 2'-fluoroguanosine-3'-phosphate
  modified_base 11: mod_base = OTHER; note = 2'-fluoroadenosine-3'-phosphate
  modified_base 12: mod_base = OTHER; note = 2'-O-methylguanosine-3'-phosphate
  modified_base 13: mod_base = OTHER; note = 2'-O-methyluridine-3'-phosphate
  modified_base 14: mod_base = OTHER; note = 2'-O-methylguanosine-3'-phosphate
  modified_base 15: mod_base = OTHER; note = 2'-O-methylguanosine-3'-phosphate
  modified_base 16: mod_base = OTHER; note = 2'-O-methylguanosine-3'-phosphate
  modified_base 17: mod_base = OTHER; note = 2'-O-methyladenosine-3'-phosphate
  modified_base 18: mod_base = OTHER; note = 2'-O-methylcytidine-3'-phosphate
  modified_base 19: mod_base = OTHER; note = 2'-O-methyladenosine-3'-phosphate
  modified_base 20: mod_base = OTHER; note = 2'-O-methylguanosine-3'-phosphate
  modified_base 21: mod_base = OTHER; note = 2'-O-methyluridine-3'-phosphate N-[tris(GalNAc-alkyl)-amidodecanoyl)]-4-hydroxyprolinol (Hyp-(GalNAc-alkyl)3)
gggctgctggagtgggacagt

SEQ ID NO: 5231 - RNA, 21 nt, synthetic construct
  source 1..21: mol_type = other RNA
  modified_base 1: mod_base = OTHER; note = 2'-O-methylcytidine-3'-phosphorothioate
  modified_base 2: mod_base = OTHER; note = 2'-O-methyladenosine-3'-phosphorothioate
  modified_base 3: mod_base = OTHER; note = 2'-O-methylguanosine-3'-phosphate
  modified_base 4: mod_base = OTHER; note = 2'-O-methylguanosine-3'-phosphate
  modified_base 5: mod_base = OTHER; note = 2'-O-methylguanosine-3'-phosphate
  modified_base 6: mod_base = OTHER; note = 2'-O-methyladenosine-3'-phosphate
  modified_base 7: mod_base = OTHER; note = 2'-fluoroguanosine-3'-phosphate
  modified_base 8: mod_base = OTHER; note = 2'-O-methyladenosine-3'-phosphate
  modified_base 9: mod_base = OTHER; note = 2'-fluoroadenosine-3'-phosphate
  modified_base 10: mod_base = OTHER; note = 2'-fluoroguanosine-3'-phosphate
  modified_base 11: mod_base = OTHER; note = 2'-fluoroadenosine-3'-phosphate
  modified_base 12: mod_base = OTHER; note = 2'-O-methylguanosine-3'-phosphate
  modified_base 13: mod_base = OTHER; note = 2'-O-methylguanosine-3'-phosphate
  modified_base 14: mod_base = OTHER; note = 2'-O-methyladenosine-3'-phosphate
  modified_base 15: mod_base = OTHER; note = 2'-O-methyladenosine-3'-phosphate
  modified_base 16: mod_base = OTHER; note = 2'-O-methylguanosine-3'-phosphate
  modified_base 17: mod_base = OTHER; note = 2'-O-methylguanosine-3'-phosphate
  modified_base 18: mod_base = OTHER; note = 2'-O-methylcytidine-3'-phosphate
  modified_base 19: mod_base = OTHER; note = 2'-O-methylcytidine-3'-phosphate
  modified_base 20: mod_base = OTHER; note = 2'-O-methyluridine-3'-phosphate
  modified_base 21: mod_base = OTHER; note = 2'-O-methyluridine-3'-phosphate N-[tris(GalNAc-alkyl)-amidodecanoyl)]-4-hydroxyprolinol (Hyp-(GalNAc-alkyl)3)
cagggagaagaggaaggcctt

SEQ ID NO: 5232 - RNA, 21 nt, synthetic construct
  source 1..21: mol_type = other RNA
  modified_base 1: mod_base = OTHER; note = 2'-O-methylguanosine-3'-phosphorothioate
  modified_base 2: mod_base = OTHER; note = 2'-O-methylcytidine-3'-phosphorothioate
  modified_base 3: mod_base = OTHER; note = 2'-O-methylcytidine-3'-phosphate
  modified_base 4: mod_base = OTHER; note = 2'-O-methyluridine-3'-phosphate
  modified_base 5: mod_base = OTHER; note = 2'-O-methylguanosine-3'-phosphate
  modified_base 6: mod_base = OTHER; note = 2'-O-methylguanosine-3'-phosphate
  modified_base 7: mod_base = OTHER; note = 2'-fluoroadenosine-3'-phosphate
  modified_base 8: mod_base = OTHER; note = 2'-O-methyluridine-3'-phosphate
  modified_base 9: mod_base = OTHER; note = 2'-fluoroguanosine-3'-phosphate
  modified_base 10: mod_base = OTHER; note = 2'-fluoroadenosine-3'-phosphate
  modified_base 11: mod_base = OTHER; note = 2'-fluoroguanosine-3'-phosphate
  modified_base 12: mod_base = OTHER; note = 2'-O-methylguanosine-3'-phosphate
  modified_base 13: mod_base = OTHER; note = 2'-O-methyladenosine-3'-phosphate
  modified_base 14: mod_base = OTHER; note = 2'-O-methylguanosine-3'-phosphate
  modified_base 15: mod_base = OTHER; note = 2'-O-methyladenosine-3'-phosphate
  modified_base 16: mod_base = OTHER; note = 2'-O-methylguanosine-3'-phosphate
  modified_base 17: mod_base = OTHER; note = 2'-O-methylguanosine-3'-phosphate
  modified_base 18: mod_base = OTHER; note = 2'-O-methylguanosine-3'-phosphate
  modified_base 19: mod_base = OTHER; note = 2'-O-methyluridine-3'-phosphate
  modified_base 20: mod_base = OTHER; note = 2'-O-methylguanosine-3'-phosphate
  modified_base 21: mod_base = OTHER; note = 2'-O-methyluridine-3'-phosphate N-[tris(GalNAc-alkyl)-amidodecanoyl)]-4-hydroxyprolinol (Hyp-(GalNAc-alkyl)3)
gcctggatgaggagagggtgt

SEQ ID NO: 5233 - RNA, 21 nt, synthetic construct
  source 1..21: mol_type = other RNA
  modified_base 1: mod_base = OTHER; note = 2'-O-methylguanosine-3'-phosphorothioate
  modified_base 2: mod_base = OTHER; note = 2'-O-methyluridine-3'-phosphorothioate
  modified_base 3: mod_base = OTHER; note = 2'-O-methylguanosine-3'-phosphate
  modified_base 4: mod_base = OTHER; note = 2'-O-methylguanosine-3'-phosphate
  modified_base 5: mod_base = OTHER; note = 2'-O-methylcytidine-3'-phosphate
  modified_base 6: mod_base = OTHER; note = 2'-O-methyladenosine-3'-phosphate
  modified_base 7: mod_base = OTHER; note = 2'-fluorouridine-3'-phosphate
  modified_base 8: mod_base = OTHER; note = 2'-O-methyluridine-3'-phosphate
  modified_base 9: mod_base = OTHER; note = 2'-fluorouridine-3'-phosphate
  modified_base 10: mod_base = OTHER; note = 2'-fluoroguanosine-3'-phosphate
  modified_base 11: mod_base = OTHER; note = 2'-fluorocytidine-3'-phosphate
  modified_base 12: mod_base = OTHER; note = 2'-O-methyluridine-3'-phosphate
  modified_base 13: mod_base = OTHER; note = 2'-O-methylcytidine-3'-phosphate
  modified_base 14: mod_base = OTHER; note = 2'-O-methyluridine-3'-phosphate
  modified_base 15: mod_base = OTHER; note = 2'-O-methylguanosine-3'-phosphate
  modified_base 16: mod_base = OTHER; note = 2'-O-methyladenosine-3'-phosphate
  modified_base 17: mod_base = OTHER; note = 2'-O-methylguanosine-3'-phosphate
  modified_base 18: mod_base = OTHER; note = 2'-O-methyladenosine-3'-phosphate
  modified_base 19: mod_base = OTHER; note = 2'-O-methylcytidine-3'-phosphate
  modified_base 20: mod_base = OTHER; note = 2'-O-methyluridine-3'-phosphate
  modified_base 21: mod_base = OTHER; note = 2'-O-methyluridine-3'-phosphate N-[tris(GalNAc-alkyl)-amidodecanoyl)]-4-hydroxyprolinol (Hyp-(GalNAc-alkyl)3)
gtggcatttgctctgagactt

SEQ ID NO: 5234 - RNA, 21 nt, synthetic construct
  source 1..21: mol_type = other RNA
  modified_base 1: mod_base = OTHER; note = 2'-O-methyluridine-3'-phosphorothioate
  modified_base 2: mod_base = OTHER; note = 2'-O-methylguanosine-3'-phosphorothioate
  modified_base 3: mod_base = OTHER; note = 2'-O-methylguanosine-3'-phosphate
  modified_base 4: mod_base = OTHER; note = 2'-O-methylguanosine-3'-phosphate
  modified_base 5: mod_base = OTHER; note = 2'-O-methyluridine-3'-phosphate
  modified_base 6: mod_base = OTHER; note = 2'-O-methylcytidine-3'-phosphate
  modified_base 7: mod_base = OTHER; note = 2'-fluorocytidine-3'-phosphate
  modified_base 8: mod_base = OTHER; note = 2'-O-methyluridine-3'-phosphate
  modified_base 9: mod_base = OTHER; note = 2'-fluorouridine-3'-phosphate
  modified_base 10: mod_base = OTHER; note = 2'-fluorouridine-3'-phosphate
  modified_base 11: mod_base = OTHER; note = 2'-fluorouridine-3'-phosphate
  modified_base 12: mod_base = OTHER; note = 2'-O-methyluridine-3'-phosphate
  modified_base 13: mod_base = OTHER; note = 2'-O-methyladenosine-3'-phosphate
  modified_base 14: mod_base = OTHER; note = 2'-O-methylguanosine-3'-phosphate
  modified_base 15: mod_base = OTHER; note = 2'-O-methyladenosine-3'-phosphate
  modified_base 16: mod_base = OTHER; note = 2'-O-methylcytidine-3'-phosphate
  modified_base 17: mod_base = OTHER; note = 2'-O-methylcytidine-3'-phosphate
  modified_base 18: mod_base = OTHER; note = 2'-O-methyluridine-3'-phosphate
  modified_base 19: mod_base = OTHER; note = 2'-O-methyluridine-3'-phosphate
  modified_base 20: mod_base = OTHER; note = 2'-O-methyluridine-3'-phosphate
  modified_base 21: mod_base = OTHER; note = 2'-O-methyluridine-3'-phosphate N-[tris(GalNAc-alkyl)-amidodecanoyl)]-4-hydroxyprolinol (Hyp-(GalNAc-alkyl)3)
tgggtcctttttagacctttt

SEQ ID NO: 5235 - RNA, 21 nt, synthetic construct
  source 1..21: mol_type = other RNA
  modified_base 1: mod_base = OTHER; note = 2'-O-methylcytidine-3'-phosphorothioate
  modified_base 2: mod_base = OTHER; note = 2'-O-methyluridine-3'-phosphorothioate
  modified_base 3: mod_base = OTHER; note = 2'-O-methylcytidine-3'-phosphate
  modified_base 4: mod_base = OTHER; note = 2'-O-methylcytidine-3'-phosphate
  modified_base 5: mod_base = OTHER; note = 2'-O-methylcytidine-3'-phosphate
  modified_base 6: mod_base = OTHER; note = 2'-O-methyluridine-3'-phosphate
  modified_base 7: mod_base = OTHER; note = 2'-fluorouridine-3'-phosphate
  modified_base 8: mod_base = OTHER; note = 2'-O-methyluridine-3'-phosphate
  modified_base 9: mod_base = OTHER; note = 2'-fluoroguanosine-3'-phosphate
  modified_base 10: mod_base = OTHER; note = 2'-fluoroguanosine-3'-phosphate
  modified_base 11: mod_base = OTHER; note = 2'-fluorocytidine-3'-phosphate
  modified_base 12: mod_base = OTHER; note = 2'-O-methyluridine-3'-phosphate
  modified_base 13: mod_base = OTHER; note = 2'-O-methylguanosine-3'-phosphate
  modified_base 14: mod_base = OTHER; note = 2'-O-methylguanosine-3'-phosphate
  modified_base 15: mod_base = OTHER; note = 2'-O-methyladenosine-3'-phosphate
  modified_base 16: mod_base = OTHER; note = 2'-O-methylcytidine-3'-phosphate
  modified_base 17: mod_base = OTHER; note = 2'-O-methyladenosine-3'-phosphate
  modified_base 18: mod_base = OTHER; note = 2'-O-methylguanosine-3'-phosphate
  modified_base 19: mod_base = OTHER; note = 2'-O-methyluridine-3'-phosphate
  modified_base 20: mod_base = OTHER; note = 2'-O-methylcytidine-3'-phosphate
  modified_base 21: mod_base = OTHER; note = 2'-O-methyluridine-3'-phosphate N-[tris(GalNAc-alkyl)-amidodecanoyl)]-4-hydroxyprolinol (Hyp-(GalNAc-alkyl)3)
ctccctttggctggacagtct

SEQ ID NO: 5236 - RNA, 21 nt, synthetic construct
  source 1..21: mol_type = other RNA
  modified_base 1: mod_base = OTHER; note = 2'-O-methyluridine-3'-phosphorothioate
  modified_base 2: mod_base = OTHER; note = 2'-O-methylguanosine-3'-phosphorothioate
  modified_base 3: mod_base = OTHER; note = 2'-O-methyladenosine-3'-phosphate
  modified_base 4: mod_base = OTHER; note = 2'-O-methyladenosine-3'-phosphate
  modified_base 5: mod_base = OTHER; note = 2'-O-methylcytidine-3'-phosphate
  modified_base 6: mod_base = OTHER; note = 2'-O-methylcytidine-3'-phosphate
  modified_base 7: mod_base = OTHER; note = 2'-fluoroadenosine-3'-phosphate
  modified_base 8: mod_base = OTHER; note = 2'-O-methyluridine-3'-phosphate
  modified_base 9: mod_base = OTHER; note = 2'-fluoroguanosine-3'-phosphate
  modified_base 10: mod_base = OTHER; note = 2'-fluoroadenosine-3'-phosphate
  modified_base 11: mod_base = OTHER; note = 2'-fluoroguanosine-3'-phosphate
  modified_base 12: mod_base = OTHER; note = 2'-O-methylguanosine-3'-phosphate
  modified_base 13: mod_base = OTHER; note = 2'-O-methyluridine-3'-phosphate
  modified_base 14: mod_base = OTHER; note = 2'-O-methylcytidine-3'-phosphate
  modified_base 15: mod_base = OTHER; note = 2'-O-methylguanosine-3'-phosphate
  modified_base 16: mod_base = OTHER; note = 2'-O-methyladenosine-3'-phosphate
  modified_base 17: mod_base = OTHER; note = 2'-O-methyluridine-3'-phosphate
  modified_base 18: mod_base = OTHER; note = 2'-O-methyladenosine-3'-phosphate
  modified_base 19: mod_base = OTHER; note = 2'-O-methyladenosine-3'-phosphate
  modified_base 20: mod_base = OTHER; note = 2'-O-methyluridine-3'-phosphate
  modified_base 21: mod_base = OTHER; note = 2'-O-methyluridine-3'-phosphate N-[tris(GalNAc-alkyl)-amidodecanoyl)]-4-hydroxyprolinol (Hyp-(GalNAc-alkyl)3)
tgaaccatgaggtcgataatt

SEQ ID NO: 5237 - RNA, 21 nt, synthetic construct
  source 1..21: mol_type = other RNA
  modified_base 1: mod_base = OTHER; note = 2'-O-methyluridine-3'-phosphorothioate
  modified_base 2: mod_base = OTHER; note = 2'-O-methylguanosine-3'-phosphorothioate
  modified_base 3: mod_base = OTHER; note = 2'-O-methyluridine-3'-phosphate
  modified_base 4: mod_base = OTHER; note = 2'-O-methylcytidine-3'-phosphate
  modified_base 5: mod_base = OTHER; note = 2'-O-methyluridine-3'-phosphate
  modified_base 6: mod_base = OTHER; note = 2'-O-methylguanosine-3'-phosphate
  modified_base 7: mod_base = OTHER; note = 2'-fluorocytidine-3'-phosphate
  modified_base 8: mod_base = OTHER; note = 2'-O-methyladenosine-3'-phosphate
  modified_base 9: mod_base = OTHER; note = 2'-fluoroguanosine-3'-phosphate
  modified_base 10: mod_base = OTHER; note = 2'-fluorocytidine-3'-phosphate
  modified_base 11: mod_base = OTHER; note = 2'-fluorocytidine-3'-phosphate
  modified_base 12: mod_base = OTHER; note = 2'-O-methylcytidine-3'-phosphate
  modified_base 13: mod_base = OTHER; note = 2'-O-methyladenosine-3'-phosphate
  modified_base 14: mod_base = OTHER; note = 2'-O-methyladenosine-3'-phosphate
  modified_base 15: mod_base = OTHER; note = 2'-O-methylguanosine-3'-phosphate
  modified_base 16: mod_base = OTHER; note = 2'-O-methylguanosine-3'-phosphate
  modified_base 17: mod_base = OTHER; note = 2'-O-methylcytidine-3'-phosphate
  modified_base 18: mod_base = OTHER; note = 2'-O-methylcytidine-3'-phosphate
  modified_base 19: mod_base = OTHER; note = 2'-O-methylguanosine-3'-phosphate
  modified_base 20: mod_base = OTHER; note = 2'-O-methyladenosine-3'-phosphate
  modified_base 21: mod_base = OTHER; note = 2'-O-methyluridine-3'-phosphate N-[tris(GalNAc-alkyl)-amidodecanoyl)]-4-hydroxyprolinol (Hyp-(GalNAc-alkyl)3)
tgtctgcagcccaaggccgat

SEQ ID NO: 5238 - RNA, 21 nt, synthetic construct
  source 1..21: mol_type = other RNA
  modified_base 1: mod_base = OTHER; note = 2'-O-methylcytidine-3'-phosphorothioate
  modified_base 2: mod_base = OTHER; note = 2'-O-methylguanosine-3'-phosphorothioate
  modified_base 3: mod_base = OTHER; note = 2'-O-methyladenosine-3'-phosphate
  modified_base 4: mod_base = OTHER; note = 2'-O-methylguanosine-3'-phosphate
  modified_base 5: mod_base = OTHER; note = 2'-O-methyluridine-3'-phosphate
  modified_base 6: mod_base = OTHER; note = 2'-O-methyluridine-3'-phosphate
  modified_base 7: mod_base = OTHER; note = 2'-fluorouridine-3'-phosphate
  modified_base 8: mod_base = OTHER; note = 2'-O-methylguanosine-3'-phosphate
  modified_base 9: mod_base = OTHER; note = 2'-fluorocytidine-3'-phosphate
  modified_base 10: mod_base = OTHER; note = 2'-fluoroguanosine-3'-phosphate
  modified_base 11: mod_base = OTHER; note = 2'-fluorocytidine-3'-phosphate
  modified_base 12: mod_base = OTHER; note = 2'-O-methyladenosine-3'-phosphate
  modified_base 13: mod_base = OTHER; note = 2'-O-methyladenosine-3'-phosphate
  modified_base 14: mod_base = OTHER; note = 2'-O-methyladenosine-3'-phosphate
  modified_base 15: mod_base = OTHER; note = 2'-O-methyladenosine-3'-phosphate
  modified_base 16: mod_base = OTHER; note = 2'-O-methylcytidine-3'-phosphate
  modified_base 17: mod_base = OTHER; note = 2'-O-methylcytidine-3'-phosphate
  modified_base 18: mod_base = OTHER; note = 2'-O-methylcytidine-3'-phosphate
  modified_base 19: mod_base = OTHER; note = 2'-O-methyladenosine-3'-phosphate
  modified_base 20: mod_base = OTHER; note = 2'-O-methyluridine-3'-phosphate
  modified_base 21: mod_base = OTHER; note = 2'-O-methyluridine-3'-phosphate N-[tris(GalNAc-alkyl)-amidodecanoyl)]-4-hydroxyprolinol (Hyp-(GalNAc-alkyl)3)
cgagtttgcgcaaaacccatt

SEQ ID NO: 5239 - RNA, 21 nt, synthetic construct
  source 1..21: mol_type = other RNA
  modified_base 1: mod_base = OTHER; note = 2'-O-methylcytidine-3'-phosphorothioate
  modified_base 2: mod_base = OTHER; note = 2'-O-methylcytidine-3'-phosphorothioate
  modified_base 3: mod_base = OTHER; note = 2'-O-methyladenosine-3'-phosphate
  modified_base 4: mod_base = OTHER; note = 2'-O-methyluridine-3'-phosphate
  modified_base 5: mod_base = OTHER; note = 2'-O-methylguanosine-3'-phosphate
  modified_base 6: mod_base = OTHER; note = 2'-O-methyluridine-3'-phosphate
  modified_base 7: mod_base = OTHER; note = 2'-fluoroguanosine-3'-phosphate
  modified_base 8: mod_base = OTHER; note = 2'-O-methyluridine-3'-phosphate
  modified_base 9: mod_base = OTHER; note = 2'-fluorouridine-3'-phosphate
  modified_base 10: mod_base = OTHER; note = 2'-fluorocytidine-3'-phosphate
  modified_base 11: mod_base = OTHER; note = 2'-fluorouridine-3'-phosphate
  modified_base 12: mod_base = OTHER; note = 2'-O-methyluridine-3'-phosphate
  modified_base 13: mod_base = OTHER; note = 2'-O-methyluridine-3'-phosphate
  modified_base 14: mod_base = OTHER; note = 2'-O-methylguanosine-3'-phosphate
  modified_base 15: mod_base = OTHER; note = 2'-O-methylguanosine-3'-phosphate
  modified_base 16: mod_base = OTHER; note = 2'-O-methyluridine-3'-phosphate
  modified_base 17: mod_base = OTHER; note = 2'-O-methyladenosine-3'-phosphate
  modified_base 18: mod_base = OTHER; note = 2'-O-methyladenosine-3'-phosphate
  modified_base 19: mod_base = OTHER; note = 2'-O-methyladenosine-3'-phosphate
  modified_base 20: mod_base = OTHER; note = 2'-O-methylcytidine-3'-phosphate
  modified_base 21: mod_base = OTHER; note = 2'-O-methyluridine-3'-phosphate N-[tris(GalNAc-alkyl)-amidodecanoyl)]-4-hydroxyprolinol (Hyp-(GalNAc-alkyl)3)
ccatgtgttctttggtaaact

SEQ ID NO: 5240 - RNA, 21 nt, synthetic construct
  source 1..21: mol_type = other RNA
  modified_base 1: mod_base = OTHER; note = 2'-O-methylcytidine-3'-phosphorothioate
  modified_base 2: mod_base = OTHER; note = 2'-O-methylguanosine-3'-phosphorothioate
  modified_base 3: mod_base = OTHER; note = 2'-O-methyluridine-3'-phosphate
  modified_base 4: mod_base = OTHER; note = 2'-O-methylguanosine-3'-phosphate
  modified_base 5: mod_base = OTHER; note = 2'-O-methyladenosine-3'-phosphate
  modified_base 6: mod_base = OTHER; note = 2'-O-methyluridine-3'-phosphate
  modified_base 7: mod_base = OTHER; note = 2'-fluoroguanosine-3'-phosphate
  modified_base 8: mod_base = OTHER; note = 2'-O-methyluridine-3'-phosphate
  modified_base 9: mod_base = OTHER; note = 2'-fluorocytidine-3'-phosphate
  modified_base 10: mod_base = OTHER; note = 2'-fluorouridine-3'-phosphate
  modified_base 11: mod_base = OTHER; note = 2'-fluoroguanosine-3'-phosphate
  modified_base 12: mod_base = OTHER; note = 2'-O-methyluridine-3'-phosphate
  modified_base 13: mod_base = OTHER; note = 2'-O-methylguanosine-3'-phosphate
  modified_base 14: mod_base = OTHER; note = 2'-O-methyluridine-3'-phosphate
  modified_base 15: mod_base = OTHER; note = 2'-O-methyluridine-3'-phosphate
  modified_base 16: mod_base = OTHER; note = 2'-O-methyluridine-3'-phosphate
  modified_base 17: mod_base = OTHER; note = 2'-O-methylguanosine-3'-phosphate
  modified_base 18: mod_base = OTHER; note = 2'-O-methylcytidine-3'-phosphate
  modified_base 19: mod_base = OTHER; note = 2'-O-methyluridine-3'-phosphate
  modified_base 20: mod_base = OTHER; note = 2'-O-methylcytidine-3'-phosphate
  modified_base 21: mod_base = OTHER; note = 2'-O-methyluridine-3'-phosphate N-[tris(GalNAc-alkyl)-amidodecanoyl)]-4-hydroxyprolinol (Hyp-(GalNAc-alkyl)3)
cgtgatgtctgtgtttgctct

SEQ ID NO: 5241 - RNA, 21 nt, synthetic construct
  source 1..21: mol_type = other RNA
  modified_base 1: mod_base = OTHER; note = 2'-O-methylcytidine-3'-phosphorothioate
  modified_base 2: mod_base = OTHER; note = 2'-O-methyluridine-3'-phosphorothioate
  modified_base 3: mod_base = OTHER; note = 2'-O-methylcytidine-3'-phosphate
  modified_base 4: mod_base = OTHER; note = 2'-O-methylcytidine-3'-phosphate
  modified_base 5: mod_base = OTHER; note = 2'-O-methyluridine-3'-phosphate
  modified_base 6: mod_base = OTHER; note = 2'-O-methyladenosine-3'-phosphate
  modified_base 7: mod_base = OTHER; note = 2'-fluorouridine-3'-phosphate
  modified_base 8: mod_base = OTHER; note = 2'-O-methylguanosine-3'-phosphate
  modified_base 9: mod_base = OTHER; note = 2'-fluoroadenosine-3'-phosphate
  modified_base 10: mod_base = OTHER; note = 2'-fluoroguanosine-3'-phosphate
  modified_base 11: mod_base = OTHER; note = 2'-fluoroguanosine-3'-phosphate
  modified_base 12: mod_base = OTHER; note = 2'-O-methylguanosine-3'-phosphate
  modified_base 13: mod_base = OTHER; note = 2'-O-methyluridine-3'-phosphate
  modified_base 14: mod_base = OTHER; note = 2'-O-methyladenosine-3'-phosphate
  modified_base 15: mod_base = OTHER; note = 2'-O-methyladenosine-3'-phosphate
  modified_base 16: mod_base = OTHER; note = 2'-O-methylguanosine-3'-phosphate
  modified_base 17: mod_base = OTHER; note = 2'-O-methyladenosine-3'-phosphate
  modified_base 18: mod_base = OTHER; note = 2'-O-methylguanosine-3'-phosphate
  modified_base 19: mod_base = OTHER; note = 2'-O-methylguanosine-3'-phosphate
  modified_base 20: mod_base = OTHER; note = 2'-O-methyluridine-3'-phosphate
  modified_base 21: mod_base = OTHER; note = 2'-O-methyluridine-3'-phosphate N-[tris(GalNAc-alkyl)-amidodecanoyl)]-4-hydroxyprolinol (Hyp-(GalNAc-alkyl)3)
ctcctatgagggtaagaggtt

SEQ ID NO: 5242 - RNA, 21 nt, synthetic construct
  source 1..21: mol_type = other RNA
  modified_base 1: mod_base = OTHER; note = 2'-O-methylcytidine-3'-phosphorothioate
  modified_base 2: mod_base = OTHER; note = 2'-O-methylcytidine-3'-phosphorothioate
  modified_base 3: mod_base = OTHER; note = 2'-O-methylcytidine-3'-phosphate
  modified_base 4: mod_base = OTHER; note = 2'-O-methyluridine-3'-phosphate
  modified_base 5: mod_base = OTHER; note = 2'-O-methylguanosine-3'-phosphate
  modified_base 6: mod_base = OTHER; note = 2'-O-methyladenosine-3'-phosphate
  modified_base 7: mod_base = OTHER; note = 2'-fluoroadenosine-3'-phosphate
  modified_base 8: mod_base = OTHER; note = 2'-O-methyladenosine-3'-phosphate
  modified_base 9: mod_base = OTHER; note = 2'-fluorouridine-3'-phosphate
  modified_base 10: mod_base = OTHER; note = 2'-fluoroadenosine-3'-phosphate
  modified_base 11: mod_base = OTHER; note = 2'-fluoroguanosine-3'-phosphate
  modified_base 12: mod_base = OTHER; note = 2'-O-methylguanosine-3'-phosphate
  modified_base 13: mod_base = OTHER; note = 2'-O-methyladenosine-3'-phosphate
  modified_base 14: mod_base = OTHER; note = 2'-O-methyladenosine-3'-phosphate
  modified_base 15: mod_base = OTHER; note = 2'-O-methylcytidine-3'-phosphate
  modified_base 16: mod_base = OTHER; note = 2'-O-methylcytidine-3'-phosphate
  modified_base 17: mod_base = OTHER; note = 2'-O-methylcytidine-3'-phosphate
  modified_base 18: mod_base = OTHER; note = 2'-O-methyluridine-3'-phosphate
  modified_base 19: mod_base = OTHER; note = 2'-O-methyladenosine-3'-phosphate
  modified_base 20: mod_base = OTHER; note = 2'-O-methylguanosine-3'-phosphate
  modified_base 21: mod_base = OTHER; note = 2'-O-methyluridine-3'-phosphate N-[tris(GalNAc-alkyl)-amidodecanoyl)]-4-hydroxyprolinol (Hyp-(GalNAc-alkyl)3)
ccctgaaataggaaccctagt

SEQ ID NO: 5243 - RNA, 21 nt, synthetic construct
  source 1..21: mol_type = other RNA
  modified_base 1: mod_base = OTHER; note = 2'-O-methylcytidine-3'-phosphorothioate
  modified_base 2: mod_base = OTHER; note = 2'-O-methyluridine-3'-phosphorothioate
  modified_base 3: mod_base = OTHER; note = 2'-O-methyladenosine-3'-phosphate
  modified_base 4: mod_base = OTHER; note = 2'-O-methylguanosine-3'-phosphate
  modified_base 5: mod_base = OTHER; note = 2'-O-methyladenosine-3'-phosphate
  modified_base 6: mod_base = OTHER; note = 2'-O-methylguanosine-3'-phosphate
  modified_base 7: mod_base = OTHER; note = 2'-fluoroguanosine-3'-phosphate
  modified_base 8: mod_base = OTHER; note = 2'-O-methyladenosine-3'-phosphate
  modified_base 9: mod_base = OTHER; note = 2'-fluoroguanosine-3'-phosphate
  modified_base 10: mod_base = OTHER; note = 2'-fluoroadenosine-3'-phosphate
  modified_base 11: mod_base = OTHER; note = 2'-fluoroadenosine-3'-phosphate
  modified_base 12: mod_base = OTHER; note = 2'-O-methyladenosine-3'-phosphate
  modified_base 13: mod_base = OTHER; note = 2'-O-methylguanosine-3'-phosphate
  modified_base 14: mod_base = OTHER; note = 2'-O-methyluridine-3'-phosphate
  modified_base 15: mod_base = OTHER; note = 2'-O-methylcytidine-3'-phosphate
  modified_base 16: mod_base = OTHER; note = 2'-O-methyluridine-3'-phosphate
  modified_base 17: mod_base = OTHER; note = 2'-O-methylguanosine-3'-phosphate
  modified_base 18: mod_base = OTHER; note = 2'-O-methyladenosine-3'-phosphate
  modified_base 19: mod_base = OTHER; note = 2'-O-methyladenosine-3'-phosphate
  modified_base 20: mod_base = OTHER; note = 2'-O-methyladenosine-3'-phosphate
  modified_base 21: mod_base = OTHER; note = 2'-O-methyluridine-3'-phosphate N-[tris(GalNAc-alkyl)-amidodecanoyl)]-4-hydroxyprolinol (Hyp-(GalNAc-alkyl)3)
ctagaggagaaagtctgaaat

SEQ ID NO: 5244 - RNA, 21 nt, synthetic construct
  source 1..21: mol_type = other RNA
  modified_base 1: mod_base = OTHER; note = 2'-O-methylguanosine-3'-phosphorothioate
  modified_base 2: mod_base = OTHER; note = 2'-O-methyladenosine-3'-phosphorothioate
  modified_base 3: mod_base = OTHER; note = 2'-O-methylcytidine-3'-phosphate
  modified_base 4: mod_base = OTHER; note = 2'-O-methyluridine-3'-phosphate
  modified_base 5: mod_base = OTHER; note = 2'-O-methylguanosine-3'-phosphate
  modified_base 6: mod_base = OTHER; note = 2'-O-methyluridine-3'-phosphate
  modified_base 7: mod_base = OTHER; note = 2'-fluoroadenosine-3'-phosphate
  modified_base 8: mod_base = OTHER; note = 2'-O-methyladenosine-3'-phosphate
  modified_base 9: mod_base = OTHER; note = 2'-fluoroadenosine-3'-phosphate
  modified_base 10: mod_base = OTHER; note = 2'-fluorouridine-3'-phosphate
  modified_base 11: mod_base = OTHER; note = 2'-fluorocytidine-3'-phosphate
  modified_base 12: mod_base = OTHER; note = 2'-O-methyluridine-3'-phosphate
  modified_base 13: mod_base = OTHER; note = 2'-O-methylguanosine-3'-phosphate
  modified_base 14: mod_base = OTHER; note = 2'-O-methyladenosine-3'-phosphate
  modified_base 15: mod_base = OTHER; note = 2'-O-methylguanosine-3'-phosphate
  modified_base 16: mod_base = OTHER; note = 2'-O-methylcytidine-3'-phosphate
  modified_base 17: mod_base = OTHER; note = 2'-O-methyluridine-3'-phosphate
  modified_base 18: mod_base = OTHER; note = 2'-O-methyluridine-3'-phosphate
  modified_base 19: mod_base = OTHER; note = 2'-O-methylguanosine-3'-phosphate
  modified_base 20: mod_base = OTHER; note = 2'-O-methyladenosine-3'-phosphate
  modified_base 21: mod_base = OTHER; note = 2'-O-methyluridine-3'-phosphate N-[tris(GalNAc-alkyl)-amidodecanoyl)]-4-hydroxyprolinol (Hyp-(GalNAc-alkyl)3)
gactgtaaatctgagcttgat

SEQ ID NO: 5245 - RNA, 21 nt, synthetic construct
  source 1..21: mol_type = other RNA
  modified_base 1: mod_base = OTHER; note = 2'-O-methylguanosine-3'-phosphorothioate
  modified_base 2: mod_base = OTHER; note = 2'-O-methyladenosine-3'-phosphorothioate
  modified_base 3: mod_base = OTHER; note = 2'-O-methylguanosine-3'-phosphate
  modified_base 4: mod_base = OTHER; note = 2'-O-methylcytidine-3'-phosphate
  modified_base 5: mod_base = OTHER; note = 2'-O-methyladenosine-3'-phosphate
  modified_base 6: mod_base = OTHER; note = 2'-O-methyladenosine-3'-phosphate
  modified_base 7: mod_base = OTHER; note = 2'-fluorocytidine-3'-phosphate
  modified_base 8: mod_base = OTHER; note = 2'-O-methylcytidine-3'-phosphate
  modified_base 9: mod_base = OTHER; note = 2'-fluorocytidine-3'-phosphate
  modified_base 10: mod_base = OTHER; note = 2'-fluoroadenosine-3'-phosphate
  modified_base 11: mod_base = OTHER; note = 2'-fluorouridine-3'-phosphate
  modified_base 12: mod_base = OTHER; note = 2'-O-methylguanosine-3'-phosphate
  modified_base 13: mod_base = OTHER; note = 2'-O-methylguanosine-3'-phosphate
  modified_base 14: mod_base = OTHER; note = 2'-O-methyladenosine-3'-phosphate
  modified_base 15: mod_base = OTHER; note = 2'-O-methyladenosine-3'-phosphate
  modified_base 16: mod_base = OTHER; note = 2'-O-methylguanosine-3'-phosphate
  modified_base 17: mod_base = OTHER; note = 2'-O-methyluridine-3'-phosphate
  modified_base 18: mod_base = OTHER; note = 2'-O-methyluridine-3'-phosphate
  modified_base 19: mod_base = OTHER; note = 2'-O-methyladenosine-3'-phosphate
  modified_base 20: mod_base = OTHER; note = 2'-O-methyluridine-3'-phosphate
  modified_base 21: mod_base = OTHER; note = 2'-O-methyluridine-3'-phosphate N-[tris(GalNAc-alkyl)-amidodecanoyl)]-4-hydroxyprolinol (Hyp-(GalNAc-alkyl)3)
gagcaacccatggaagttatt

SEQ ID NO: 5246 - RNA, 21 nt, synthetic construct
  source 1..21: mol_type = other RNA
  modified_base 1: mod_base = OTHER; note = 2'-O-methylcytidine-3'-phosphorothioate
  modified_base 2: mod_base = OTHER; note = 2'-O-methylcytidine-3'-phosphorothioate
  modified_base 3: mod_base = OTHER; note = 2'-O-methyladenosine-3'-phosphate
  modified_base 4: mod_base = OTHER; note = 2'-O-methylcytidine-3'-phosphate
  modified_base 5: mod_base = OTHER; note = 2'-O-methylcytidine-3'-phosphate
  modified_base 6: mod_base = OTHER; note = 2'-O-methyluridine-3'-phosphate
  modified_base 7: mod_base = OTHER; note = 2'-fluorouridine-3'-phosphate
  modified_base 8: mod_base = OTHER; note = 2'-O-methyluridine-3'-phosphate
  modified_base 9: mod_base = OTHER; note = 2'-fluoroguanosine-3'-phosphate
  modified_base 10: mod_base = OTHER; note = 2'-fluoroadenosine-3'-phosphate
  modified_base 11: mod_base = OTHER; note = 2'-fluorocytidine-3'-phosphate
  modified_base 12: mod_base = OTHER; note = 2'-O-methyluridine-3'-phosphate
  modified_base 13: mod_base = OTHER; note = 2'-O-methyluridine-3'-phosphate
  modified_base 14: mod_base = OTHER; note = 2'-O-methylguanosine-3'-phosphate
  modified_base 15: mod_base = OTHER; note = 2'-O-methyladenosine-3'-phosphate
  modified_base 16: mod_base = OTHER; note = 2'-O-methylguanosine-3'-phosphate
  modified_base 17: mod_base = OTHER; note = 2'-O-methylguanosine-3'-phosphate
  modified_base 18: mod_base = OTHER; note = 2'-O-methyladenosine-3'-phosphate
  modified_base 19: mod_base = OTHER; note = 2'-O-methylguanosine-3'-phosphate
  modified_base 20: mod_base = OTHER; note = 2'-O-methyladenosine-3'-phosphate
  modified_base 21: mod_base = OTHER; note = 2'-O-methyluridine-3'-phosphate N-[tris(GalNAc-alkyl)-amidodecanoyl)]-4-hydroxyprolinol (Hyp-(GalNAc-alkyl)3)
ccacctttgacttgaggagat

SEQ ID NO: 5247 - RNA, 21 nt, synthetic construct
  source 1..21: mol_type = other RNA
  modified_base 1: mod_base = OTHER; note = 2'-O-methylcytidine-3'-phosphorothioate
  modified_base 2: mod_base = OTHER; note = 2'-O-methylcytidine-3'-phosphorothioate
  modified_base 3: mod_base = OTHER; note = 2'-O-methyluridine-3'-phosphate
  modified_base 4: mod_base = OTHER; note = 2'-O-methyluridine-3'-phosphate
  modified_base 5: mod_base = OTHER; note = 2'-O-methylcytidine-3'-phosphate
  modified_base 6: mod_base = OTHER; note = 2'-O-methyladenosine-3'-phosphate
  modified_base 7: mod_base = OTHER; note = 2'-fluorouridine-3'-phosphate
  modified_base 8: mod_base = OTHER; note = 2'-O-methylcytidine-3'-phosphate
  modified_base 9: mod_base = OTHER; note = 2'-fluorouridine-3'-phosphate
  modified_base 10: mod_base = OTHER; note = 2'-fluoroadenosine-3'-phosphate
  modified_base 11: mod_base = OTHER; note = 2'-fluoroadenosine-3'-phosphate
  modified_base 12: mod_base = OTHER; note = 2'-O-methylguanosine-3'-phosphate
  modified_base 13: mod_base = OTHER; note = 2'-O-methylguanosine-3'-phosphate
  modified_base 14: mod_base = OTHER; note = 2'-O-methyladenosine-3'-phosphate
  modified_base 15: mod_base = OTHER; note = 2'-O-methylguanosine-3'-phosphate
  modified_base 16: mod_base = OTHER; note = 2'-O-methyladenosine-3'-phosphate
  modified_base 17: mod_base = OTHER; note = 2'-O-methyladenosine-3'-phosphate
  modified_base 18: mod_base = OTHER; note = 2'-O-methyluridine-3'-phosphate
  modified_base 19: mod_base = OTHER; note = 2'-O-methylcytidine-3'-phosphate
  modified_base 20: mod_base = OTHER; note = 2'-O-methyluridine-3'-phosphate
  modified_base 21: mod_base = OTHER; note = 2'-O-methyluridine-3'-phosphate N-[tris(GalNAc-alkyl)-amidodecanoyl)]-4-hydroxyprolinol (Hyp-(GalNAc-alkyl)3)
ccttcatctaaggagaatctt

SEQ ID NO: 5248 - RNA, 21 nt, synthetic construct
  source 1..21: mol_type = other RNA
  modified_base 1: mod_base = OTHER; note = 2'-O-methylguanosine-3'-phosphorothioate
  modified_base 2: mod_base = OTHER; note = 2'-O-methylguanosine-3'-phosphorothioate
  modified_base 3: mod_base = OTHER; note = 2'-O-methyladenosine-3'-phosphate
  modified_base 4: mod_base = OTHER; note = 2'-O-methylguanosine-3'-phosphate
  modified_base 5: mod_base = OTHER; note = 2'-O-methylguanosine-3'-phosphate
  modified_base 6: mod_base = OTHER; note = 2'-O-methylcytidine-3'-phosphate
  modified_base 7: mod_base = OTHER; note = 2'-fluorocytidine-3'-phosphate
  modified_base 8: mod_base = OTHER; note = 2'-O-methyluridine-3'-phosphate
  modified_base 9: mod_base = OTHER; note = 2'-fluorouridine-3'-phosphate
  modified_base 10: mod_base = OTHER; note = 2'-fluorocytidine-3'-phosphate
  modified_base 11: mod_base = OTHER; note = 2'-fluorouridine-3'-phosphate
  modified_base 12: mod_base = OTHER; note = 2'-O-methylguanosine-3'-phosphate
  modified_base 13: mod_base = OTHER; note = 2'-O-methylguanosine-3'-phosphate
  modified_base 14: mod_base = OTHER; note = 2'-O-methyluridine-3'-phosphate
  modified_base 15: mod_base = OTHER; note = 2'-O-methylguanosine-3'-phosphate
  modified_base 16: mod_base = OTHER; note = 2'-O-methyluridine-3'-phosphate
  modified_base 17: mod_base = OTHER; note = 2'-O-methylcytidine-3'-phosphate
  modified_base 18: mod_base = OTHER; note = 2'-O-methyluridine-3'-phosphate
  modified_base 19: mod_base = OTHER; note = 2'-O-methylcytidine-3'-phosphate
  modified_base 20: mod_base = OTHER; note = 2'-O-methylcytidine-3'-phosphate
  modified_base 21: mod_base = OTHER; note = 2'-O-methyluridine-3'-phosphate N-[tris(GalNAc-alkyl)-amidodecanoyl)]-4-hydroxyprolinol (Hyp-(GalNAc-alkyl)3)
ggaggccttctggtgtctcct

SEQ ID NO: 5249 - RNA, 21 nt, synthetic construct
  source 1..21: mol_type = other RNA
  modified_base 1: mod_base = OTHER; note = 2'-O-methyluridine-3'-phosphorothioate
  modified_base 2: mod_base = OTHER; note = 2'-O-methylcytidine-3'-phosphorothioate
  modified_base 3: mod_base = OTHER; note = 2'-O-methylcytidine-3'-phosphate
  modified_base 4: mod_base = OTHER; note = 2'-O-methylcytidine-3'-phosphate
  modified_base 5: mod_base = OTHER; note = 2'-O-methyladenosine-3'-phosphate
  modified_base 6: mod_base = OTHER; note = 2'-O-methyladenosine-3'-phosphate
  modified_base 7: mod_base = OTHER; note = 2'-fluorouridine-3'-phosphate
  modified_base 8: mod_base = OTHER; note = 2'-O-methyluridine-3'-phosphate
  modified_base 9: mod_base = OTHER; note = 2'-fluoroadenosine-3'-phosphate
  modified_base 10: mod_base = OTHER; note = 2'-fluorocytidine-3'-phosphate
  modified_base 11: mod_base = OTHER; note = 2'-fluoroadenosine-3'-phosphate
  modified_base 12: mod_base = OTHER; note = 2'-O-methylguanosine-3'-phosphate
  modified_base 13: mod_base = OTHER; note = 2'-O-methylcytidine-3'-phosphate
  modified_base 14: mod_base = OTHER; note = 2'-O-methyluridine-3'-phosphate
  modified_base 15: mod_base = OTHER; note = 2'-O-methyluridine-3'-phosphate
  modified_base 16: mod_base = OTHER; note = 2'-O-methyladenosine-3'-phosphate
  modified_base 17: mod_base = OTHER; note = 2'-O-methylguanosine-3'-phosphate
  modified_base 18: mod_base = OTHER; note = 2'-O-methyluridine-3'-phosphate
  modified_base 19: mod_base = OTHER; note = 2'-O-methylcytidine-3'-phosphate
  modified_base 20: mod_base = OTHER; note = 2'-O-methyluridine-3'-phosphate
  modified_base 21: mod_base = OTHER; note = 2'-O-methyluridine-3'-phosphate N-[tris(GalNAc-alkyl)-amidodecanoyl)]-4-hydroxyprolinol (Hyp-(GalNAc-alkyl)3)
tcccaattacagcttagtctt

SEQ ID NO: 5250 - RNA, 21 nt, synthetic construct
  source 1..21: mol_type = other RNA
  modified_base 1: mod_base = OTHER; note = 2'-O-methylguanosine-3'-phosphorothioate
  modified_base 2: mod_base = OTHER; note = 2'-O-methyluridine-3'-phosphorothioate
  modified_base 3: mod_base = OTHER; note = 2'-O-methylcytidine-3'-phosphate
  modified_base 4: mod_base = OTHER; note = 2'-O-methyluridine-3'-phosphate
  modified_base 5: mod_base = OTHER; note = 2'-O-methylcytidine-3'-phosphate
  modified_base 6: mod_base = OTHER; note = 2'-O-methylcytidine-3'-phosphate
  modified_base 7: mod_base = OTHER; note = 2'-fluoroadenosine-3'-phosphate
  modified_base 8: mod_base = OTHER; note = 2'-O-methylguanosine-3'-phosphate
  modified_base 9: mod_base = OTHER; note = 2'-fluoroguanosine-3'-phosphate
  modified_base 10: mod_base = OTHER; note = 2'-fluoroguanosine-3'-phosphate
  modified_base 11: mod_base = OTHER; note = 2'-fluorocytidine-3'-phosphate
  modified_base 12: mod_base = OTHER; note = 2'-O-methyluridine-3'-phosphate
  modified_base 13: mod_base = OTHER; note = 2'-O-methyladenosine-3'-phosphate
  modified_base 14: mod_base = OTHER; note = 2'-O-methylguanosine-3'-phosphate
  modified_base 15: mod_base = OTHER; note = 2'-O-methylguanosine-3'-phosphate
  modified_base 16: mod_base = OTHER; note = 2'-O-methyladenosine-3'-phosphate
  modified_base 17: mod_base = OTHER; note = 2'-O-methylcytidine-3'-phosphate
  modified_base 18: mod_base = OTHER; note = 2'-O-methyluridine-3'-phosphate
  modified_base 19: mod_base = OTHER; note = 2'-O-methylguanosine-3'-phosphate
  modified_base 20: mod_base = OTHER; note = 2'-O-methylguanosine-3'-phosphate
  modified_base 21: mod_base = OTHER; note = 2'-O-methyluridine-3'-phosphate N-[tris(GalNAc-alkyl)-amidodecanoyl)]-4-hydroxyprolinol (Hyp-(GalNAc-alkyl)3)
gtctccagggctaggactggt

SEQ ID NO: 5251 - RNA, 21 nt, synthetic construct
  source 1..21: mol_type = other RNA
  modified_base 1: mod_base = OTHER; note = 2'-O-methyladenosine-3'-phosphorothioate
  modified_base 2: mod_base = OTHER; note = 2'-O-methyladenosine-3'-phosphorothioate
  modified_base 3: mod_base = OTHER; note = 2'-O-methylguanosine-3'-phosphate
  modified_base 4: mod_base = OTHER; note = 2'-O-methylcytidine-3'-phosphate
  modified_base 5: mod_base = OTHER; note = 2'-O-methyladenosine-3'-phosphate
  modified_base 6: mod_base = OTHER; note = 2'-O-methyladenosine-3'-phosphate
  modified_base 7: mod_base = OTHER; note = 2'-fluoroadenosine-3'-phosphate
  modified_base 8: mod_base = OTHER; note = 2'-O-methylguanosine-3'-phosphate
  modified_base 9: mod_base = OTHER; note = 2'-fluorouridine-3'-phosphate
  modified_base 10: mod_base = OTHER; note = 2'-fluoroguanosine-3'-phosphate
  modified_base 11: mod_base = OTHER; note = 2'-fluoroadenosine-3'-phosphate
  modified_base 12: mod_base = OTHER; note = 2'-O-methylguanosine-3'-phosphate
  modified_base 13: mod_base = OTHER; note = 2'-O-methyluridine-3'-phosphate
  modified_base 14: mod_base = OTHER; note = 2'-O-methylcytidine-3'-phosphate
  modified_base 15: mod_base = OTHER; note = 2'-O-methyladenosine-3'-phosphate
  modified_base 16: mod_base = OTHER; note = 2'-O-methyluridine-3'-phosphate
  modified_base 17: mod_base = OTHER; note = 2'-O-methyluridine-3'-phosphate
  modified_base 18: mod_base = OTHER; note = 2'-O-methylcytidine-3'-phosphate
  modified_base 19: mod_base = OTHER; note = 2'-O-methyladenosine-3'-phosphate
  modified_base 20: mod_base = OTHER; note = 2'-O-methylcytidine-3'-phosphate
  modified_base 21: mod_base = OTHER; note = 2'-O-methyluridine-3'-phosphate N-[tris(GalNAc-alkyl)-amidodecanoyl)]-4-hydroxyprolinol (Hyp-(GalNAc-alkyl)3)
aagcaaagtgagtcattcact

SEQ ID NO: 5252 - RNA, 21 nt, synthetic construct
  source 1..21: mol_type = other RNA
  modified_base 1: mod_base = OTHER; note = 2'-O-methylguanosine-3'-phosphorothioate
  modified_base 2: mod_base = OTHER; note = 2'-O-methyluridine-3'-phosphorothioate
  modified_base 3: mod_base = OTHER; note = 2'-O-methylguanosine-3'-phosphate
  modified_base 4: mod_base = OTHER; note = 2'-O-methylguanosine-3'-phosphate
  modified_base 5: mod_base = OTHER; note = 2'-O-methyluridine-3'-phosphate
  modified_base 6: mod_base = OTHER; note = 2'-O-methylguanosine-3'-phosphate
  modified_base 7: mod_base = OTHER; note = 2'-fluoroadenosine-3'-phosphate
  modified_base 8: mod_base = OTHER; note = 2'-O-methyladenosine-3'-phosphate
  modified_base 9: mod_base = OTHER; note = 2'-fluorocytidine-3'-phosphate
  modified_base 10: mod_base = OTHER; note = 2'-fluoroadenosine-3'-phosphate
  modified_base 11: mod_base = OTHER; note = 2'-fluoroadenosine-3'-phosphate
  modified_base 12: mod_base = OTHER; note = 2'-O-methyluridine-3'-phosphate
  modified_base 13: mod_base = OTHER; note = 2'-O-methyluridine-3'-phosphate
  modified_base 14: mod_base = OTHER; note = 2'-O-methyluridine-3'-phosphate
  modified_base 15: mod_base = OTHER; note = 2'-O-methyladenosine-3'-phosphate
  modified_base 16: mod_base = OTHER; note = 2'-O-methyluridine-3'-phosphate
  modified_base 17: mod_base = OTHER; note = 2'-O-methyluridine-3'-phosphate
  modified_base 18: mod_base = OTHER; note = 2'-O-methyladenosine-3'-phosphate
  modified_base 19: mod_base = OTHER; note = 2'-O-methyladenosine-3'-phosphate
  modified_base 20: mod_base = OTHER; note = 2'-O-methyluridine-3'-phosphate
  modified_base 21: mod_base = OTHER; note = 2'-O-methyluridine-3'-phosphate N-[tris(GalNAc-alkyl)-amidodecanoyl)]-4-hydroxyprolinol (Hyp-(GalNAc-alkyl)3)
gtggtgaacaatttattaatt

SEQ ID NO: 5253 - RNA, 21 nt, synthetic construct
  source 1..21: mol_type = other RNA
  modified_base 1: mod_base = OTHER; note = 2'-O-methyluridine-3'-phosphorothioate
  modified_base 2: mod_base = OTHER; note = 2'-O-methyladenosine-3'-phosphorothioate
  modified_base 3: mod_base = OTHER; note = 2'-O-methylguanosine-3'-phosphate
  modified_base 4: mod_base = OTHER; note = 2'-O-methylguanosine-3'-phosphate
  modified_base 5: mod_base = OTHER; note = 2'-O-methyladenosine-3'-phosphate
  modified_base 6: mod_base = OTHER; note = 2'-O-methylcytidine-3'-phosphate
  modified_base 7: mod_base = OTHER; note = 2'-fluorouridine-3'-phosphate
  modified_base 8: mod_base = OTHER; note = 2'-O-methyluridine-3'-phosphate
  modified_base 9: mod_base = OTHER; note = 2'-fluorouridine-3'-phosphate
  modified_base 10: mod_base = OTHER; note = 2'-fluoroadenosine-3'-phosphate
  modified_base 11: mod_base = OTHER; note = 2'-fluoroadenosine-3'-phosphate
  modified_base 12: mod_base = OTHER; note = 2'-O-methyluridine-3'-phosphate
  modified_base 13: mod_base = OTHER; note = 2'-O-methylguanosine-3'-phosphate
  modified_base 14: mod_base = OTHER; note = 2'-O-methylcytidine-3'-phosphate
  modified_base 15: mod_base = OTHER; note = 2'-O-methyladenosine-3'-phosphate
  modified_base 16: mod_base = OTHER; note = 2'-O-methyladenosine-3'-phosphate
  modified_base 17: mod_base = OTHER; note = 2'-O-methyluridine-3'-phosphate
  modified_base 18: mod_base = OTHER; note = 2'-O-methyladenosine-3'-phosphate
  modified_base 19: mod_base = OTHER; note = 2'-O-methyluridine-3'-phosphate
  modified_base 20: mod_base = OTHER; note = 2'-O-methyluridine-3'-phosphate
  modified_base 21: mod_base = OTHER; note = 2'-O-methyluridine-3'-phosphate N-[tris(GalNAc-alkyl)-amidodecanoyl)]-4-hydroxyprolinol (Hyp-(GalNAc-alkyl)3)
taggactttaatgcaatattt

SEQ ID NO: 5254 - RNA, 21 nt, synthetic construct
  source 1..21: mol_type = other RNA
  modified_base 1: mod_base = OTHER; note = 2'-O-methylguanosine-3'-phosphorothioate
  modified_base 2: mod_base = OTHER; note = 2'-O-methyladenosine-3'-phosphorothioate
  modified_base 3: mod_base = OTHER; note = 2'-O-methyladenosine-3'-phosphate
  modified_base 4: mod_base = OTHER; note = 2'-O-methylcytidine-3'-phosphate
  modified_base 5: mod_base = OTHER; note = 2'-O-methyladenosine-3'-phosphate
  modified_base 6: mod_base = OTHER; note = 2'-O-methyladenosine-3'-phosphate
  modified_base 7: mod_base = OTHER; note = 2'-fluoroadenosine-3'-phosphate
  modified_base 8: mod_base = OTHER; note = 2'-O-methyladenosine-3'-phosphate
  modified_base 9: mod_base = OTHER; note = 2'-fluorouridine-3'-phosphate
  modified_base 10: mod_base = OTHER; note = 2'-fluoroadenosine-3'-phosphate
  modified_base 11: mod_base = OTHER; note = 2'-fluoroguanosine-3'-phosphate
  modified_base 12: mod_base = OTHER; note = 2'-O-methylcytidine-3'-phosphate
  modified_base 13: mod_base = OTHER; note = 2'-O-methylcytidine-3'-phosphate
  modified_base 14: mod_base = OTHER; note = 2'-O-methyluridine-3'-phosphate
  modified_base 15: mod_base = OTHER; note = 2'-O-methyladenosine-3'-phosphate
  modified_base 16: mod_base = OTHER; note = 2'-O-methylcytidine-3'-phosphate
  modified_base 17: mod_base = OTHER; note = 2'-O-methyluridine-3'-phosphate
  modified_base 18: mod_base = OTHER; note = 2'-O-methyluridine-3'-phosphate
  modified_base 19: mod_base = OTHER; note = 2'-O-methyluridine-3'-phosphate
  modified_base 20: mod_base = OTHER; note = 2'-O-methyluridine-3'-phosphate
  modified_base 21: mod_base = OTHER; note = 2'-O-methyluridine-3'-phosphate N-[tris(GalNAc-alkyl)-amidodecanoyl)]-4-hydroxyprolinol (Hyp-(GalNAc-alkyl)3)
gaacaaaatagcctacttttt

SEQ ID NO: 5255 - RNA, 23 nt, synthetic construct
  source 1..23: mol_type = other RNA
  modified_base 1: mod_base = OTHER; note = 2'-O-methyladenosine-3'-phosphorothioate
  modified_base 2: mod_base = OTHER; note = 2'-fluorocytidine-3'-phosphorothioate
  modified_base 3: mod_base = OTHER; note = 2'-O-methyluridine-3'-phosphate
  modified_base 4: mod_base = OTHER; note = 2'-O-methylguanosine-3'-phosphate
  modified_base 5: mod_base = OTHER; note = 2'-O-methylcytidine-3'-phosphate
  modified_base 6: mod_base = OTHER; note = 2'-fluorocytidine-3'-phosphate
  modified_base 7: mod_base = OTHER; note = 2'-O-methyladenosine-3'-phosphate
  modified_base 8: mod_base = OTHER; note = 2'-fluoroguanosine-3'-phosphate
  modified_base 9: mod_base = OTHER; note = 2'-fluoroadenosine-3'-phosphate
  modified_base 10: mod_base = OTHER; note = 2'-O-methylguanosine-3'-phosphate
  modified_base 11: mod_base = OTHER; note = 2'-O-methylguanosine-3'-phosphate
  modified_base 12: mod_base = OTHER; note = 2'-O-methylcytidine-3'-phosphate
  modified_base 13: mod_base = OTHER; note = 2'-O-methylcytidine-3'-phosphate
  modified_base 14: mod_base = OTHER; note = 2'-fluorocytidine-3'-phosphate
  modified_base 15: mod_base = OTHER; note = 2'-O-methyluridine-3'-phosphate
  modified_base 16: mod_base = OTHER; note = 2'-fluoroguanosine-3'-phosphate
  modified_base 17: mod_base = OTHER; note = 2'-O-methylguanosine-3'-phosphate
  modified_base 18: mod_base = OTHER; note = 2'-O-methyladenosine-3'-phosphate
  modified_base 19: mod_base = OTHER; note = 2'-O-methyladenosine-3'-phosphate
  modified_base 20: mod_base = OTHER; note = 2'-O-methylguanosine-3'-phosphate
  modified_base 21: mod_base = OTHER; note = 2'-O-methyladenosine-3'-phosphorothioate
  modified_base 22: mod_base = OTHER; note = 2'-O-methyladenosine-3'-phosphorothioate
  modified_base 23: mod_base = OTHER; note = 2'-O-methylguanosine-3'-phosphate
actgccagaggccctggaagaag

SEQ ID NO: 5256 - RNA, 23 nt, synthetic construct
  source 1..23: mol_type = other RNA
  modified_base 1: mod_base = OTHER; note = 2'-O-methyladenosine-3'-phosphorothioate
  modified_base 2: mod_base = OTHER; note = 2'-fluoroguanosine-3'-phosphorothioate
  modified_base 3: mod_base = OTHER; note = 2'-O-methyluridine-3'-phosphate
  modified_base 4: mod_base = OTHER; note = 2'-O-methylguanosine-3'-phosphate
  modified_base 5: mod_base = OTHER; note = 2'-O-methylguanosine-3'-phosphate
  modified_base 6: mod_base = OTHER; note = 2'-fluorouridine-3'-phosphate
  modified_base 7: mod_base = OTHER; note = 2'-O-methylcytidine-3'-phosphate
  modified_base 8: mod_base = OTHER; note = 2'-fluorouridine-3'-phosphate
  modified_base 9: mod_base = OTHER; note = 2'-fluorocytidine-3'-phosphate
  modified_base 10: mod_base = OTHER; note = 2'-O-methyladenosine-3'-phosphate
  modified_base 11: mod_base = OTHER; note = 2'-O-methyladenosine-3'-phosphate
  modified_base 12: mod_base = OTHER; note = 2'-O-methylcytidine-3'-phosphate
  modified_base 13: mod_base = OTHER; note = 2'-O-methyluridine-3'-phosphate
  modified_base 14: mod_base = OTHER; note = 2'-fluorocytidine-3'-phosphate
  modified_base 15: mod_base = OTHER; note = 2'-O-methyluridine-3'-phosphate
  modified_base 16: mod_base = OTHER; note = 2'-fluoroguanosine-3'-phosphate
  modified_base 17: mod_base = OTHER; note = 2'-O-methyluridine-3'-phosphate
  modified_base 18: mod_base = OTHER; note = 2'-O-methylcytidine-3'-phosphate
  modified_base 19: mod_base = OTHER; note = 2'-O-methylcytidine-3'-phosphate
  modified_base 20: mod_base = OTHER; note = 2'-O-methyluridine-3'-phosphate
  modified_base 21: mod_base = OTHER; note = 2'-O-methylguanosine-3'-phosphorothioate
  modified_base 22: mod_base = OTHER; note = 2'-O-methylguanosine-3'-phosphorothioate
  modified_base 23: mod_base = OTHER; note = 2'-O-methylcytidine-3'-phosphate
agtggtctcaactctgtcctggc

SEQ ID NO: 5257 - RNA, 23 nt, synthetic construct
  source 1..23: mol_type = other RNA
  modified_base 1: mod_base = OTHER; note = 2'-O-methyladenosine-3'-phosphorothioate
  modified_base 2: mod_base = OTHER; note = 2'-fluorouridine -3'-phosphorothioate
  modified_base 3: mod_base = OTHER; note = 2'-O-methylcytidine-3'-phosphate
  modified_base 4: mod_base = OTHER; note = 2'-O-methyladenosine-3'-phosphate
  modified_base 5: mod_base = OTHER; note = 2'-O-methylguanosine-3'-phosphate
  modified_base 6: mod_base = OTHER; note = 2'-fluoroguanosine-3'-phosphate
  modified_base 7: mod_base = OTHER; note = 2'-O-methylguanosine-3'-phosphate
  modified_base 8: mod_base = OTHER; note = 2'-fluorouridine-3'-phosphate
  modified_base 9: mod_base = OTHER; note = 2'-fluorocytidine-3'-phosphate
  modified_base 10: mod_base = OTHER; note = 2'-O-methyluridine-3'-phosphate
  modified_base 11: mod_base = OTHER; note = 2'-O-methylcytidine-3'-phosphate
  modified_base 12: mod_base = OTHER; note = 2'-O-methyladenosine-3'-phosphate
  modified_base 13: mod_base = OTHER; note = 2'-O-methyladenosine-3'-phosphate
  modified_base 14: mod_base = OTHER; note = 2'-fluorocytidine-3'-phosphate
  modified_base 15: mod_base = OTHER; note = 2'-O-methyladenosine-3'-phosphate
  modified_base 16: mod_base = OTHER; note = 2'-fluoroguanosine-3'-phosphate
  modified_base 17: mod_base = OTHER; note = 2'-O-methylcytidine-3'-phosphate
  modified_base 18: mod_base = OTHER; note = 2'-O-methyluridine-3'-phosphate
  modified_base 19: mod_base = OTHER; note = 2'-O-methylguanosine-3'-phosphate
  modified_base 20: mod_base = OTHER; note = 2'-O-methyluridine-3'-phosphate
  modified_base 21: mod_base = OTHER; note = 2'-O-methylguanosine-3'-phosphorothioate
  modified_base 22: mod_base = OTHER; note = 2'-O-methylguanosine-3'-phosphorothioate
  modified_base 23: mod_base = OTHER; note = 2'-O-methyluridine-3'-phosphate
atcagggtctcaacagctgtggt

SEQ ID NO: 5258 - RNA, 23 nt, synthetic construct
  source 1..23: mol_type = other RNA
  modified_base 1: mod_base = OTHER; note = 2'-O-methyladenosine-3'-phosphorothioate
  modified_base 2: mod_base = OTHER; note = 2'-fluorouridine -3'-phosphorothioate
  modified_base 3: mod_base = OTHER; note = 2'-O-methyluridine-3'-phosphate
  modified_base 4: mod_base = OTHER; note = 2'-O-methylcytidine-3'-phosphate
  modified_base 5: mod_base = OTHER; note = 2'-O-methyluridine-3'-phosphate
  modified_base 6: mod_base = OTHER; note = 2'-fluorouridine-3'-phosphate
  modified_base 7: mod_base = OTHER; note = 2'-O-methylguanosine-3'-phosphate
  modified_base 8: mod_base = OTHER; note = 2'-fluoroadenosine-3'-phosphate
  modified_base 9: mod_base = OTHER; note = 2'-fluoroguanosine-3'-phosphate
  modified_base 10: mod_base = OTHER; note = 2'-O-methylcytidine-3'-phosphate
  modified_base 11: mod_base = OTHER; note = 2'-O-methyladenosine-3'-phosphate
  modified_base 12: mod_base = OTHER; note = 2'-O-methyladenosine-3'-phosphate
  modified_base 13: mod_base = OTHER; note = 2'-O-methyluridine-3'-phosphate
  modified_base 14: mod_base = OTHER; note = 2'-fluoroadenosine-3'-phosphate
  modified_base 15: mod_base = OTHER; note = 2'-O-methylcytidine-3'-phosphate
  modified_base 16: mod_base = OTHER; note = 2'-fluoroadenosine-3'-phosphate
  modified_base 17: mod_base = OTHER; note = 2'-O-methylguanosine-3'-phosphate
  modified_base 18: mod_base = OTHER; note = 2'-O-methyladenosine-3'-phosphate
  modified_base 19: mod_base = OTHER; note = 2'-O-methylcytidine-3'-phosphate
  modified_base 20: mod_base = OTHER; note = 2'-O-methyluridine-3'-phosphate
  modified_base 21: mod_base = OTHER; note = 2'-O-methylcytidine-3'-phosphorothioate
  modified_base 22: mod_base = OTHER; note = 2'-O-methyladenosine-3'-phosphorothioate
  modified_base 23: mod_base = OTHER; note = 2'-O-methylguanosine-3'-phosphate
attcttgagcaatacagactcag

SEQ ID NO: 5259 - RNA, 23 nt, synthetic construct
  source 1..23: mol_type = other RNA
  modified_base 1: mod_base = OTHER; note = 2'-O-methyladenosine-3'-phosphorothioate
  modified_base 2: mod_base = OTHER; note = 2'-fluorocytidine-3'-phosphorothioate
  modified_base 3: mod_base = OTHER; note = 2'-O-methyladenosine-3'-phosphate
  modified_base 4: mod_base = OTHER; note = 2'-O-methylguanosine-3'-phosphate
  modified_base 5: mod_base = OTHER; note = 2'-O-methyladenosine-3'-phosphate
  modified_base 6: mod_base = OTHER; note = 2'-fluoroadenosine-3'-phosphate
  modified_base 7: mod_base = OTHER; note = 2'-O-methylguanosine-3'-phosphate
  modified_base 8: mod_base = OTHER; note = 2'-fluorocytidine-3'-phosphate
  modified_base 9: mod_base = OTHER; note = 2'-fluoroadenosine-3'-phosphate
  modified_base 10: mod_base = OTHER; note = 2'-O-methyladenosine-3'-phosphate
  modified_base 11: mod_base = OTHER; note = 2'-O-methyluridine-3'-phosphate
  modified_base 12: mod_base = OTHER; note = 2'-O-methylguanosine-3'-phosphate
  modified_base 13: mod_base = OTHER; note = 2'-O-methyladenosine-3'-phosphate
  modified_base 14: mod_base = OTHER; note = 2'-fluoroguanosine-3'-phosphate
  modified_base 15: mod_base = OTHER; note = 2'-O-methylguanosine-3'-phosphate
  modified_base 16: mod_base = OTHER; note = 2'-fluoroadenosine-3'-phosphate
  modified_base 17: mod_base = OTHER; note = 2'-O-methylguanosine-3'-phosphate
  modified_base 18: mod_base = OTHER; note = 2'-O-methylguanosine-3'-phosphate
  modified_base 19: mod_base = OTHER; note = 2'-O-methyluridine-3'-phosphate
  modified_base 20: mod_base = OTHER; note = 2'-O-methylcytidine-3'-phosphate
  modified_base 21: mod_base = OTHER; note = 2'-O-methyladenosine-3'-phosphorothioate
  modified_base 22: mod_base = OTHER; note = 2'-O-methyluridine-3'-phosphorothioate
  modified_base 23: mod_base = OTHER; note = 2'-O-methyluridine-3'-phosphate
acagaagcaatgaggaggtcatt

SEQ ID NO: 5260 - RNA, 23 nt, synthetic construct
  source 1..23: mol_type = other RNA
  modified_base 1: mod_base = OTHER; note = 2'-O-methyladenosine-3'-phosphorothioate
  modified_base 2: mod_base = OTHER; note = 2'-fluoroadenosine-3'-phosphorothioate
  modified_base 3: mod_base = OTHER; note = 2'-O-methylguanosine-3'-phosphate
  modified_base 4: mod_base = OTHER; note = 2'-O-methylcytidine-3'-phosphate
  modified_base 5: mod_base = OTHER; note = 2'-O-methylcytidine-3'-phosphate
  modified_base 6: mod_base = OTHER; note = 2'-fluoroadenosine-3'-phosphate
  modified_base 7: mod_base = OTHER; note = 2'-O-methylguanosine-3'-phosphate
  modified_base 8: mod_base = OTHER; note = 2'-fluoroguanosine-3'-phosphate
  modified_base 9: mod_base = OTHER; note = 2'-fluoroadenosine-3'-phosphate
  modified_base 10: mod_base = OTHER; note = 2'-O-methylguanosine-3'-phosphate
  modified_base 11: mod_base = OTHER; note = 2'-O-methylguanosine-3'-phosphate
  modified_base 12: mod_base = OTHER; note = 2'-O-methyladenosine-3'-phosphate
  modified_base 13: mod_base = OTHER; note = 2'-O-methylguanosine-3'-phosphate
  modified_base 14: mod_base = OTHER; note = 2'-fluoroadenosine-3'-phosphate
  modified_base 15: mod_base = OTHER; note = 2'-O-methyladenosine-3'-phosphate
  modified_base 16: mod_base = OTHER; note = 2'-fluoroadenosine-3'-phosphate
  modified_base 17: mod_base = OTHER; note = 2'-O-methylguanosine-3'-phosphate
  modified_base 18: mod_base = OTHER; note = 2'-O-methylguanosine-3'-phosphate
  modified_base 19: mod_base = OTHER; note = 2'-O-methylcytidine-3'-phosphate
  modified_base 20: mod_base = OTHER; note = 2'-O-methylcytidine-3'-phosphate
  modified_base 21: mod_base = OTHER; note = 2'-O-methyladenosine-3'-phosphorothioate
  modified_base 22: mod_base = OTHER; note = 2'-O-methylguanosine-3'-phosphorothioate
  modified_base 23: mod_base = OTHER; note = 2'-O-methyladenosine-3'-phosphate
aagccaggaggagaaaggccaga

SEQ ID NO: 5261 - RNA, 23 nt, synthetic construct
  source 1..23: mol_type = other RNA
  modified_base 1: mod_base = OTHER; note = 2'-O-methyladenosine-3'-phosphorothioate
  modified_base 2: mod_base = OTHER; note = 2'-fluoroadenosine-3'-phosphorothioate
  modified_base 3: mod_base = OTHER; note = 2'-O-methylguanosine-3'-phosphate
  modified_base 4: mod_base = OTHER; note = 2'-O-methyluridine-3'-phosphate
  modified_base 5: mod_base = OTHER; note = 2'-O-methylguanosine-3'-phosphate
  modified_base 6: mod_base = OTHER; note = 2'-fluoroguanosine-3'-phosphate
  modified_base 7: mod_base = OTHER; note = 2'-O-methylcytidine-3'-phosphate
  modified_base 8: mod_base = OTHER; note = 2'-fluorocytidine-3'-phosphate
  modified_base 9: mod_base = OTHER; note = 2'-fluoroadenosine-3'-phosphate
  modified_base 10: mod_base = OTHER; note = 2'-O-methylcytidine-3'-phosphate
  modified_base 11: mod_base = OTHER; note = 2'-O-methyluridine-3'-phosphate
  modified_base 12: mod_base = OTHER; note = 2'-O-methylguanosine-3'-phosphate
  modified_base 13: mod_base = OTHER; note = 2'-O-methyluridine-3'-phosphate
  modified_base 14: mod_base = OTHER; note = 2'-fluoroguanosine-3'-phosphate
  modified_base 15: mod_base = OTHER; note = 2'-O-methylguanosine-3'-phosphate
  modified_base 16: mod_base = OTHER; note = 2'-fluorouridine-3'-phosphate
  modified_base 17: mod_base = OTHER; note = 2'-O-methyluridine-3'-phosphate
  modified_base 18: mod_base = OTHER; note = 2'-O-methylguanosine-3'-phosphate
  modified_base 19: mod_base = OTHER; note = 2'-O-methylguanosine-3'-phosphate
  modified_base 20: mod_base = OTHER; note = 2'-O-methyladenosine-3'-phosphate
  modified_base 21: mod_base = OTHER; note = 2'-O-methylguanosine-3'-phosphorothioate
  modified_base 22: mod_base = OTHER; note = 2'-O-methylcytidine-3'-phosphorothioate
  modified_base 23: mod_base = OTHER; note = 2'-O-methylcytidine-3'-phosphate
aagtggccactgtggttggagcc

SEQ ID NO: 5262 - RNA, 23 nt, synthetic construct
  source 1..23: mol_type = other RNA
  modified_base 1: mod_base = OTHER; note = 2'-O-methyladenosine-3'-phosphorothioate
  modified_base 2: mod_base = OTHER; note = 2'-fluoroadenosine-3'-phosphorothioate
  modified_base 3: mod_base = OTHER; note = 2'-O-methylcytidine-3'-phosphate
  modified_base 4: mod_base = OTHER; note = 2'-O-methyladenosine-3'-phosphate
  modified_base 5: mod_base = OTHER; note = 2'-O-methyluridine-3'-phosphate
  modified_base 6: mod_base = OTHER; note = 2'-fluoroguanosine-3'-phosphate
  modified_base 7: mod_base = OTHER; note = 2'-O-methylcytidine-3'-phosphate
  modified_base 8: mod_base = OTHER; note = 2'-fluorouridine-3'-phosphate
  modified_base 9: mod_base = OTHER; note = 2'-fluoroguanosine-3'-phosphate
  modified_base 10: mod_base = OTHER; note = 2'-O-methylguanosine-3'-phosphate
  modified_base 11: mod_base = OTHER; note = 2'-O-methyladenosine-3'-phosphate
  modified_base 12: mod_base = OTHER; note = 2'-O-methylcytidine-3'-phosphate
  modified_base 13: mod_base = OTHER; note = 2'-O-methyladenosine-3'-phosphate
  modified_base 14: mod_base = OTHER; note = 2'-fluorocytidine-3'-phosphate
  modified_base 15: mod_base = OTHER; note = 2'-O-methyluridine-3'-phosphate
  modified_base 16: mod_base = OTHER; note = 2'-fluoroguanosine-3'-phosphate
  modified_base 17: mod_base = OTHER; note = 2'-O-methyladenosine-3'-phosphate
  modified_base 18: mod_base = OTHER; note = 2'-O-methylcytidine-3'-phosphate
  modified_base 19: mod_base = OTHER; note = 2'-O-methylcytidine-3'-phosphate
  modified_base 20: mod_base = OTHER; note = 2'-O-methylguanosine-3'-phosphate
  modified_base 21: mod_base = OTHER; note = 2'-O-methylcytidine-3'-phosphorothioate
  modified_base 22: mod_base = OTHER; note = 2'-O-methylcytidine-3'-phosphorothioate
  modified_base 23: mod_base = OTHER; note = 2'-O-methyladenosine-3'-phosphate
aacatgctggacactgaccgcca

SEQ ID NO: 5263 - RNA, 23 nt, synthetic construct
  source 1..23: mol_type = other RNA
  modified_base 1: mod_base = OTHER; note = 2'-O-methyladenosine-3'-phosphorothioate
  modified_base 2: mod_base = OTHER; note = 2'-fluorouridine -3'-phosphorothioate
  modified_base 3: mod_base = OTHER; note = 2'-O-methylguanosine-3'-phosphate
  modified_base 4: mod_base = OTHER; note = 2'-O-methylguanosine-3'-phosphate
  modified_base 5: mod_base = OTHER; note = 2'-O-methylcytidine-3'-phosphate
  modified_base 6: mod_base = OTHER; note = 2'-fluorouridine-3'-phosphate
  modified_base 7: mod_base = OTHER; note = 2'-O-methylcytidine-3'-phosphate
  modified_base 8: mod_base = OTHER; note = 2'-fluorouridine-3'-phosphate
  modified_base 9: mod_base = OTHER; note = 2'-fluorocytidine-3'-phosphate
  modified_base 10: mod_base = OTHER; note = 2'-O-methylcytidine-3'-phosphate
  modified_base 11: mod_base = OTHER; note = 2'-O-methyladenosine-3'-phosphate
  modified_base 12: mod_base = OTHER; note = 2'-O-methylguanosine-3'-phosphate
  modified_base 13: mod_base = OTHER; note = 2'-O-methyluridine-3'-phosphate
  modified_base 14: mod_base = OTHER; note = 2'-fluorouridine-3'-phosphate
  modified_base 15: mod_base = OTHER; note = 2'-O-methylcytidine-3'-phosphate
  modified_base 16: mod_base = OTHER; note = 2'-fluorocytidine-3'-phosphate
  modified_base 17: mod_base = OTHER; note = 2'-O-methyladenosine-3'-phosphate
  modified_base 18: mod_base = OTHER; note = 2'-O-methyladenosine-3'-phosphate
  modified_base 19: mod_base = OTHER; note = 2'-O-methylguanosine-3'-phosphate
  modified_base 20: mod_base = OTHER; note = 2'-O-methylguanosine-3'-phosphate
  modified_base 21: mod_base = OTHER; note = 2'-O-methyluridine-3'-phosphorothioate
  modified_base 22: mod_base = OTHER; note = 2'-O-methylguanosine-3'-phosphorothioate
  modified_base 23: mod_base = OTHER; note = 2'-O-methylguanosine-3'-phosphate
atggctctccagttccaaggtgg

SEQ ID NO: 5264 - RNA, 23 nt, synthetic construct
  source 1..23: mol_type = other RNA
  modified_base 1: mod_base = OTHER; note = 2'-O-methyladenosine-3'-phosphorothioate
  modified_base 2: mod_base = OTHER; note = 2'-fluoroguanosine-3'-phosphorothioate
  modified_base 3: mod_base = OTHER; note = 2'-O-methylcytidine-3'-phosphate
  modified_base 4: mod_base = OTHER; note = 2'-O-methylcytidine-3'-phosphate
  modified_base 5: mod_base = OTHER; note = 2'-O-methyladenosine-3'-phosphate
  modified_base 6: mod_base = OTHER; note = 2'-fluoroguanosine-3'-phosphate
  modified_base 7: mod_base = OTHER; note = 2'-O-methyladenosine-3'-phosphate
  modified_base 8: mod_base = OTHER; note = 2'-fluorouridine-3'-phosphate
  modified_base 9: mod_base = OTHER; note = 2'-fluorocytidine-3'-phosphate
  modified_base 10: mod_base = OTHER; note = 2'-O-methyladenosine-3'-phosphate
  modified_base 11: mod_base = OTHER; note = 2'-O-methyladenosine-3'-phosphate
  modified_base 12: mod_base = OTHER; note = 2'-O-methylguanosine-3'-phosphate
  modified_base 13: mod_base = OTHER; note = 2'-O-methyladenosine-3'-phosphate
  modified_base 14: mod_base = OTHER; note = 2'-fluoroadenosine-3'-phosphate
  modified_base 15: mod_base = OTHER; note = 2'-O-methylguanosine-3'-phosphate
  modified_base 16: mod_base = OTHER; note = 2'-fluorocytidine-3'-phosphate
  modified_base 17: mod_base = OTHER; note = 2'-O-methyladenosine-3'-phosphate
  modified_base 18: mod_base = OTHER; note = 2'-O-methylguanosine-3'-phosphate
  modified_base 19: mod_base = OTHER; note = 2'-O-methylcytidine-3'-phosphate
  modified_base 20: mod_base = OTHER; note = 2'-O-methyluridine-3'-phosphate
  modified_base 21: mod_base = OTHER; note = 2'-O-methylcytidine-3'-phosphorothioate
  modified_base 22: mod_base = OTHER; note = 2'-O-methylcytidine-3'-phosphorothioate
  modified_base 23: mod_base = OTHER; note = 2'-O-methylcytidine-3'-phosphate
agccagatcaagaagcagctccc

SEQ ID NO: 5265 - RNA, 23 nt, synthetic construct
  source 1..23: mol_type = other RNA
  modified_base 1: mod_base = OTHER; note = 2'-O-methyladenosine-3'-phosphorothioate
  modified_base 2: mod_base = OTHER; note = 2'-fluoroadenosine-3'-phosphorothioate
  modified_base 3: mod_base = OTHER; note = 2'-O-methylguanosine-3'-phosphate
  modified_base 4: mod_base = OTHER; note = 2'-O-methylcytidine-3'-phosphate
  modified_base 5: mod_base = OTHER; note = 2'-O-methyluridine-3'-phosphate
  modified_base 6: mod_base = OTHER; note = 2'-fluorouridine-3'-phosphate
  modified_base 7: mod_base = OTHER; note = 2'-O-methylguanosine-3'-phosphate
  modified_base 8: mod_base = OTHER; note = 2'-fluorouridine-3'-phosphate
  modified_base 9: mod_base = OTHER; note = 2'-fluorocytidine-3'-phosphate
  modified_base 10: mod_base = OTHER; note = 2'-O-methylcytidine-3'-phosphate
  modified_base 11: mod_base = OTHER; note = 2'-O-methyladenosine-3'-phosphate
  modified_base 12: mod_base = OTHER; note = 2'-O-methyladenosine-3'-phosphate
  modified_base 13: mod_base = OTHER; note = 2'-O-methylguanosine-3'-phosphate
  modified_base 14: mod_base = OTHER; note = 2'-fluoroadenosine-3'-phosphate
  modified_base 15: mod_base = OTHER; note = 2'-O-methyluridine-3'-phosphate
  modified_base 16: mod_base = OTHER; note = 2'-fluoroguanosine-3'-phosphate
  modified_base 17: mod_base = OTHER; note = 2'-O-methylcytidine-3'-phosphate
  modified_base 18: mod_base = OTHER; note = 2'-O-methyluridine-3'-phosphate
  modified_base 19: mod_base = OTHER; note = 2'-O-methyluridine-3'-phosphate
  modified_base 20: mod_base = OTHER; note = 2'-O-methylcytidine-3'-phosphate
  modified_base 21: mod_base = OTHER; note = 2'-O-methyluridine-3'-phosphorothioate
  modified_base 22: mod_base = OTHER; note = 2'-O-methylcytidine-3'-phosphorothioate
  modified_base 23: mod_base = OTHER; note = 2'-O-methyluridine-3'-phosphate
aagcttgtccaagatgcttctct

SEQ ID NO: 5266 - RNA, 23 nt, synthetic construct
  source 1..23: mol_type = other RNA
  modified_base 1: mod_base = OTHER; note = 2'-O-methyladenosine-3'-phosphorothioate
  modified_base 2: mod_base = OTHER; note = 2'-fluoroadenosine-3'-phosphorothioate
  modified_base 3: mod_base = OTHER; note = 2'-O-methylcytidine-3'-phosphate
  modified_base 4: mod_base = OTHER; note = 2'-O-methyladenosine-3'-phosphate
  modified_base 5: mod_base = OTHER; note = 2'-O-methylguanosine-3'-phosphate
  modified_base 6: mod_base = OTHER; note = 2'-fluoroguanosine-3'-phosphate
  modified_base 7: mod_base = OTHER; note = 2'-O-methylguanosine-3'-phosphate
  modified_base 8: mod_base = OTHER; note = 2'-fluorocytidine-3'-phosphate
  modified_base 9: mod_base = OTHER; note = 2'-fluoroguanosine-3'-phosphate
  modified_base 10: mod_base = OTHER; note = 2'-O-methylguanosine-3'-phosphate
  modified_base 11: mod_base = OTHER; note = 2'-O-methyluridine-3'-phosphate
  modified_base 12: mod_base = OTHER; note = 2'-O-methyluridine-3'-phosphate
  modified_base 13: mod_base = OTHER; note = 2'-O-methylcytidine-3'-phosphate
  modified_base 14: mod_base = OTHER; note = 2'-fluoroadenosine-3'-phosphate
  modified_base 15: mod_base = OTHER; note = 2'-O-methylguanosine-3'-phosphate
  modified_base 16: mod_base = OTHER; note = 2'-fluorouridine-3'-phosphate
  modified_base 17: mod_base = OTHER; note = 2'-O-methylguanosine-3'-phosphate
  modified_base 18: mod_base = OTHER; note = 2'-O-methyluridine-3'-phosphate
  modified_base 19: mod_base = OTHER; note = 2'-O-methyluridine-3'-phosphate
  modified_base 20: mod_base = OTHER; note = 2'-O-methylguanosine-3'-phosphate
  modified_base 21: mod_base = OTHER; note = 2'-O-methylguanosine-3'-phosphorothioate
  modified_base 22: mod_base = OTHER; note = 2'-O-methylguanosine-3'-phosphorothioate
  modified_base 23: mod_base = OTHER; note = 2'-O-methylcytidine-3'-phosphate
aacagggcggttcagtgttgggc

SEQ ID NO: 5267 - RNA, 23 nt, synthetic construct
  source 1..23: mol_type = other RNA
  modified_base 1: mod_base = OTHER; note = 2'-O-methyladenosine-3'-phosphorothioate
  modified_base 2: mod_base = OTHER; note = 2'-fluorocytidine-3'-phosphorothioate
  modified_base 3: mod_base = OTHER; note = 2'-O-methyladenosine-3'-phosphate
  modified_base 4: mod_base = OTHER; note = 2'-O-methylguanosine-3'-phosphate
  modified_base 5: mod_base = OTHER; note = 2'-O-methyluridine-3'-phosphate
  modified_base 6: mod_base = OTHER; note = 2'-fluorocytidine-3'-phosphate
  modified_base 7: mod_base = OTHER; note = 2'-O-methylcytidine-3'-phosphate
  modified_base 8: mod_base = OTHER; note = 2'-fluorouridine-3'-phosphate
  modified_base 9: mod_base = OTHER; note = 2'-fluorocytidine-3'-phosphate
  modified_base 10: mod_base = OTHER; note = 2'-O-methyladenosine-3'-phosphate
  modified_base 11: mod_base = OTHER; note = 2'-O-methyladenosine-3'-phosphate
  modified_base 12: mod_base = OTHER; note = 2'-O-methyladenosine-3'-phosphate
  modified_base 13: mod_base = OTHER; note = 2'-O-methylguanosine-3'-phosphate
  modified_base 14: mod_base = OTHER; note = 2'-fluorocytidine-3'-phosphate
  modified_base 15: mod_base = OTHER; note = 2'-O-methyladenosine-3'-phosphate
  modified_base 16: mod_base = OTHER; note = 2'-fluoroguanosine-3'-phosphate
  modified_base 17: mod_base = OTHER; note = 2'-O-methylcytidine-3'-phosphate
  modified_base 18: mod_base = OTHER; note = 2'-O-methyluridine-3'-phosphate
  modified_base 19: mod_base = OTHER; note = 2'-O-methylcytidine-3'-phosphate
  modified_base 20: mod_base = OTHER; note = 2'-O-methyluridine-3'-phosphate
  modified_base 21: mod_base = OTHER; note = 2'-O-methylguanosine-3'-phosphorothioate
  modified_base 22: mod_base = OTHER; note = 2'-O-methylguanosine-3'-phosphorothioate
  modified_base 23: mod_base = OTHER; note = 2'-O-methyladenosine-3'-phosphate
acagtcctcaaagcagctctgga

SEQ ID NO: 5268 - RNA, 23 nt, synthetic construct
  source 1..23: mol_type = other RNA
  modified_base 1: mod_base = OTHER; note = 2'-O-methyladenosine-3'-phosphorothioate
  modified_base 2: mod_base = OTHER; note = 2'-fluorouridine -3'-phosphorothioate
  modified_base 3: mod_base = OTHER; note = 2'-O-methylguanosine-3'-phosphate
  modified_base 4: mod_base = OTHER; note = 2'-O-methylguanosine-3'-phosphate
  modified_base 5: mod_base = OTHER; note = 2'-O-methyladenosine-3'-phosphate
  modified_base 6: mod_base = OTHER; note = 2'-fluoroguanosine-3'-phosphate
  modified_base 7: mod_base = OTHER; note = 2'-O-methylguanosine-3'-phosphate
  modified_base 8: mod_base = OTHER; note = 2'-fluorouridine-3'-phosphate
  modified_base 9: mod_base = OTHER; note = 2'-fluoroguanosine-3'-phosphate
  modified_base 10: mod_base = OTHER; note = 2'-O-methylcytidine-3'-phosphate
  modified_base 11: mod_base = OTHER; note = 2'-O-methyluridine-3'-phosphate
  modified_base 12: mod_base = OTHER; note = 2'-O-methylguanosine-3'-phosphate
  modified_base 13: mod_base = OTHER; note = 2'-O-methylcytidine-3'-phosphate
  modified_base 14: mod_base = OTHER; note = 2'-fluoroadenosine-3'-phosphate
  modified_base 15: mod_base = OTHER; note = 2'-O-methylguanosine-3'-phosphate
  modified_base 16: mod_base = OTHER; note = 2'-fluorouridine-3'-phosphate
  modified_base 17: mod_base = OTHER; note = 2'-O-methylguanosine-3'-phosphate
  modified_base 18: mod_base = OTHER; note = 2'-O-methylcytidine-3'-phosphate
  modified_base 19: mod_base = OTHER; note = 2'-O-methyladenosine-3'-phosphate
  modified_base 20: mod_base = OTHER; note = 2'-O-methylguanosine-3'-phosphate
  modified_base 21: mod_base = OTHER; note = 2'-O-methyluridine-3'-phosphorothioate
  modified_base 22: mod_base = OTHER; note = 2'-O-methylcytidine-3'-phosphorothioate
  modified_base 23: mod_base = OTHER; note = 2'-O-methylcytidine-3'-phosphate
atggaggtgctgcagtgcagtcc

SEQ ID NO: 5269 - RNA, 23 nt, synthetic construct
  source 1..23: mol_type = other RNA
  modified_base 1: mod_base = OTHER; note = 2'-O-methyladenosine-3'-phosphorothioate
  modified_base 2: mod_base = OTHER; note = 2'-fluorocytidine-3'-phosphorothioate
  modified_base 3: mod_base = OTHER; note = 2'-O-methyluridine-3'-phosphate
  modified_base 4: mod_base = OTHER; note = 2'-O-methylguanosine-3'-phosphate
  modified_base 5: mod_base = OTHER; note = 2'-O-methyluridine-3'-phosphate
  modified_base 6: mod_base = OTHER; note = 2'-fluorouridine-3'-phosphate
  modified_base 7: mod_base = OTHER; note = 2'-O-methylguanosine-3'-phosphate
  modified_base 8: mod_base = OTHER; note = 2'-fluorouridine-3'-phosphate
  modified_base 9: mod_base = OTHER; note = 2'-fluorocytidine-3'-phosphate
  modified_base 10: mod_base = OTHER; note = 2'-O-methylcytidine-3'-phosphate
  modified_base 11: mod_base = OTHER; note = 2'-O-methyluridine-3'-phosphate
  modified_base 12: mod_base = OTHER; note = 2'-O-methylcytidine-3'-phosphate
  modified_base 13: mod_base = OTHER; note = 2'-O-methyluridine-3'-phosphate
  modified_base 14: mod_base = OTHER; note = 2'-fluoroadenosine-3'-phosphate
  modified_base 15: mod_base = OTHER; note = 2'-O-methylguanosine-3'-phosphate
  modified_base 16: mod_base = OTHER; note = 2'-fluoroadenosine-3'-phosphate
  modified_base 17: mod_base = OTHER; note = 2'-O-methyladenosine-3'-phosphate
  modified_base 18: mod_base = OTHER; note = 2'-O-methylguanosine-3'-phosphate
  modified_base 19: mod_base = OTHER; note = 2'-O-methyluridine-3'-phosphate
  modified_base 20: mod_base = OTHER; note = 2'-O-methylguanosine-3'-phosphate
  modified_base 21: mod_base = OTHER; note = 2'-O-methylcytidine-3'-phosphorothioate
  modified_base 22: mod_base = OTHER; note = 2'-O-methylcytidine-3'-phosphorothioate
  modified_base 23: mod_base = OTHER; note = 2'-O-methylcytidine-3'-phosphate
actgttgtcctctagaagtgccc

SEQ ID NO: 5270 - RNA, 23 nt, synthetic construct
  source 1..23: mol_type = other RNA
  modified_base 1: mod_base = OTHER; note = 2'-O-methyladenosine-3'-phosphorothioate
  modified_base 2: mod_base = OTHER; note = 2'-fluoroadenosine-3'-phosphorothioate
  modified_base 3: mod_base = OTHER; note = 2'-O-methyluridine-3'-phosphate
  modified_base 4: mod_base = OTHER; note = 2'-O-methylguanosine-3'-phosphate
  modified_base 5: mod_base = OTHER; note = 2'-O-methyladenosine-3'-phosphate
  modified_base 6: mod_base = OTHER; note = 2'-fluorouridine-3'-phosphate
  modified_base 7: mod_base = OTHER; note = 2'-O-methyluridine-3'-phosphate
  modified_base 8: mod_base = OTHER; note = 2'-fluorouridine-3'-phosphate
  modified_base 9: mod_base = OTHER; note = 2'-fluorocytidine-3'-phosphate
  modified_base 10: mod_base = OTHER; note = 2'-O-methyladenosine-3'-phosphate
  modified_base 11: mod_base = OTHER; note = 2'-O-methylcytidine-3'-phosphate
  modified_base 12: mod_base = OTHER; note = 2'-O-methyladenosine-3'-phosphate
  modified_base 13: mod_base = OTHER; note = 2'-O-methyluridine-3'-phosphate
  modified_base 14: mod_base = OTHER; note = 2'-fluorouridine-3'-phosphate
  modified_base 15: mod_base = OTHER; note = 2'-O-methylcytidine-3'-phosphate
  modified_base 16: mod_base = OTHER; note = 2'-fluorocytidine-3'-phosphate
  modified_base 17: mod_base = OTHER; note = 2'-O-methyluridine-3'-phosphate
  modified_base 18: mod_base = OTHER; note = 2'-O-methylguanosine-3'-phosphate
  modified_base 19: mod_base = OTHER; note = 2'-O-methyluridine-3'-phosphate
  modified_base 20: mod_base = OTHER; note = 2'-O-methyluridine-3'-phosphate
  modified_base 21: mod_base = OTHER; note = 2'-O-methylcytidine-3'-phosphorothioate
  modified_base 22: mod_base = OTHER; note = 2'-O-methylcytidine-3'-phosphorothioate
  modified_base 23: mod_base = OTHER; note = 2'-O-methylcytidine-3'-phosphate
aatgatttcacattcctgttccc

SEQ ID NO: 5271 - RNA, 23 nt, synthetic construct
  source 1..23: mol_type = other RNA
  modified_base 1: mod_base = OTHER; note = 2'-O-methyladenosine-3'-phosphorothioate
  modified_base 2: mod_base = OTHER; note = 2'-fluorocytidine-3'-phosphorothioate
  modified_base 3: mod_base = OTHER; note = 2'-O-methyluridine-3'-phosphate
  modified_base 4: mod_base = OTHER; note = 2'-O-methylguanosine-3'-phosphate
  modified_base 5: mod_base = OTHER; note = 2'-O-methyluridine-3'-phosphate
  modified_base 6: mod_base = OTHER; note = 2'-fluorocytidine-3'-phosphate
  modified_base 7: mod_base = OTHER; note = 2'-O-methyluridine-3'-phosphate
  modified_base 8: mod_base = OTHER; note = 2'-fluorocytidine-3'-phosphate
  modified_base 9: mod_base = OTHER; note = 2'-fluoroadenosine-3'-phosphate
  modified_base 10: mod_base = OTHER; note = 2'-O-methylguanosine-3'-phosphate
  modified_base 11: mod_base = OTHER; note = 2'-O-methylcytidine-3'-phosphate
  modified_base 12: mod_base = OTHER; note = 2'-O-methyladenosine-3'-phosphate
  modified_base 13: mod_base = OTHER; note = 2'-O-methyladenosine-3'-phosphate
  modified_base 14: mod_base = OTHER; note = 2'-fluoroadenosine-3'-phosphate
  modified_base 15: mod_base = OTHER; note = 2'-O-methylguanosine-3'-phosphate
  modified_base 16: mod_base = OTHER; note = 2'-fluorocytidine-3'-phosphate
  modified_base 17: mod_base = OTHER; note = 2'-O-methyluridine-3'-phosphate
  modified_base 18: mod_base = OTHER; note = 2'-O-methylguanosine-3'-phosphate
  modified_base 19: mod_base = OTHER; note = 2'-O-methyladenosine-3'-phosphate
  modified_base 20: mod_base = OTHER; note = 2'-O-methyluridine-3'-phosphate
  modified_base 21: mod_base = OTHER; note = 2'-O-methylguanosine-3'-phosphorothioate
  modified_base 22: mod_base = OTHER; note = 2'-O-methyladenosine-3'-phosphorothioate
  modified_base 23: mod_base = OTHER; note = 2'-O-methyluridine-3'-phosphate
actgtctcagcaaagctgatgat

SEQ ID NO: 5272 - RNA, 23 nt, synthetic construct
  source 1..23: mol_type = other RNA
  modified_base 1: mod_base = OTHER; note = 2'-O-methyladenosine-3'-phosphorothioate
  modified_base 2: mod_base = OTHER; note = 2'-fluoroguanosine-3'-phosphorothioate
  modified_base 3: mod_base = OTHER; note = 2'-O-methylguanosine-3'-phosphate
  modified_base 4: mod_base = OTHER; note = 2'-O-methyluridine-3'-phosphate
  modified_base 5: mod_base = OTHER; note = 2'-O-methyluridine-3'-phosphate
  modified_base 6: mod_base = OTHER; note = 2'-fluoroguanosine-3'-phosphate
  modified_base 7: mod_base = OTHER; note = 2'-O-methyladenosine-3'-phosphate
  modified_base 8: mod_base = OTHER; note = 2'-fluorouridine-3'-phosphate
  modified_base 9: mod_base = OTHER; note = 2'-fluoroguanosine-3'-phosphate
  modified_base 10: mod_base = OTHER; note = 2'-O-methylguanosine-3'-phosphate
  modified_base 11: mod_base = OTHER; note = 2'-O-methyluridine-3'-phosphate
  modified_base 12: mod_base = OTHER; note = 2'-O-methylguanosine-3'-phosphate
  modified_base 13: mod_base = OTHER; note = 2'-O-methylguanosine-3'-phosphate
  modified_base 14: mod_base = OTHER; note = 2'-fluoroadenosine-3'-phosphate
  modified_base 15: mod_base = OTHER; note = 2'-O-methylguanosine-3'-phosphate
  modified_base 16: mod_base = OTHER; note = 2'-fluoroadenosine-3'-phosphate
  modified_base 17: mod_base = OTHER; note = 2'-O-methylguanosine-3'-phosphate
  modified_base 18: mod_base = OTHER; note = 2'-O-methylguanosine-3'-phosphate
  modified_base 19: mod_base = OTHER; note = 2'-O-methylcytidine-3'-phosphate
  modified_base 20: mod_base = OTHER; note = 2'-O-methylcytidine-3'-phosphate
  modified_base 21: mod_base = OTHER; note = 2'-O-methyluridine-3'-phosphorothioate
  modified_base 22: mod_base = OTHER; note = 2'-O-methylguanosine-3'-phosphorothioate
  modified_base 23: mod_base = OTHER; note = 2'-O-methyluridine-3'-phosphate
aggttgatggtggagaggcctgt

SEQ ID NO: 5273 - RNA, 23 nt, synthetic construct
  source 1..23: mol_type = other RNA
  modified_base 1: mod_base = OTHER; note = 2'-O-methyladenosine-3'-phosphorothioate
  modified_base 2: mod_base = OTHER; note = 2'-fluoroadenosine-3'-phosphorothioate
  modified_base 3: mod_base = OTHER; note = 2'-O-methyladenosine-3'-phosphate
  modified_base 4: mod_base = OTHER; note = 2'-O-methyladenosine-3'-phosphate
  modified_base 5: mod_base = OTHER; note = 2'-O-methyluridine-3'-phosphate
  modified_base 6: mod_base = OTHER; note = 2'-fluorocytidine-3'-phosphate
  modified_base 7: mod_base = OTHER; note = 2'-O-methyladenosine-3'-phosphate
  modified_base 8: mod_base = OTHER; note = 2'-fluoroadenosine-3'-phosphate
  modified_base 9: mod_base = OTHER; note = 2'-fluoroguanosine-3'-phosphate
  modified_base 10: mod_base = OTHER; note = 2'-O-methyladenosine-3'-phosphate
  modified_base 11: mod_base = OTHER; note = 2'-O-methylcytidine-3'-phosphate
  modified_base 12: mod_base = OTHER; note = 2'-O-methylguanosine-3'-phosphate
  modified_base 13: mod_base = OTHER; note = 2'-O-methyladenosine-3'-phosphate
  modified_base 14: mod_base = OTHER; note = 2'-fluoroguanosine-3'-phosphate
  modified_base 15: mod_base = OTHER; note = 2'-O-methyluridine-3'-phosphate
  modified_base 16: mod_base = OTHER; note = 2'-fluorocytidine-3'-phosphate
  modified_base 17: mod_base = OTHER; note = 2'-O-methyluridine-3'-phosphate
  modified_base 18: mod_base = OTHER; note = 2'-O-methylguanosine-3'-phosphate
  modified_base 19: mod_base = OTHER; note = 2'-O-methylguanosine-3'-phosphate
  modified_base 20: mod_base = OTHER; note = 2'-O-methyluridine-3'-phosphate
  modified_base 21: mod_base = OTHER; note = 2'-O-methyluridine-3'-phosphorothioate
  modified_base 22: mod_base = OTHER; note = 2'-O-methylguanosine-3'-phosphorothioate
  modified_base 23: mod_base = OTHER; note = 2'-O-methyladenosine-3'-phosphate
aaaatcaagacgagtctggttga

SEQ ID NO: 5274 - RNA, 23 nt, synthetic construct
  source 1..23: mol_type = other RNA
  modified_base 1: mod_base = OTHER; note = 2'-O-methyladenosine-3'-phosphorothioate
  modified_base 2: mod_base = OTHER; note = 2'-fluoroadenosine-3'-phosphorothioate
  modified_base 3: mod_base = OTHER; note = 2'-O-methyluridine-3'-phosphate
  modified_base 4: mod_base = OTHER; note = 2'-O-methylcytidine-3'-phosphate
  modified_base 5: mod_base = OTHER; note = 2'-O-methyladenosine-3'-phosphate
  modified_base 6: mod_base = OTHER; note = 2'-fluoroguanosine-3'-phosphate
  modified_base 7: mod_base = OTHER; note = 2'-O-methyladenosine-3'-phosphate
  modified_base 8: mod_base = OTHER; note = 2'-fluoroguanosine-3'-phosphate
  modified_base 9: mod_base = OTHER; note = 2'-fluoroguanosine-3'-phosphate
  modified_base 10: mod_base = OTHER; note = 2'-O-methyladenosine-3'-phosphate
  modified_base 11: mod_base = OTHER; note = 2'-O-methylguanosine-3'-phosphate
  modified_base 12: mod_base = OTHER; note = 2'-O-methyladenosine-3'-phosphate
  modified_base 13: mod_base = OTHER; note = 2'-O-methyladenosine-3'-phosphate
  modified_base 14: mod_base = OTHER; note = 2'-fluoroguanosine-3'-phosphate
  modified_base 15: mod_base = OTHER; note = 2'-O-methyluridine-3'-phosphate
  modified_base 16: mod_base = OTHER; note = 2'-fluoroguanosine-3'-phosphate
  modified_base 17: mod_base = OTHER; note = 2'-O-methyladenosine-3'-phosphate
  modified_base 18: mod_base = OTHER; note = 2'-O-methyladenosine-3'-phosphate
  modified_base 19: mod_base = OTHER; note = 2'-O-methyladenosine-3'-phosphate
  modified_base 20: mod_base = OTHER; note = 2'-O-methyladenosine-3'-phosphate
  modified_base 21: mod_base = OTHER; note = 2'-O-methyluridine-3'-phosphorothioate
  modified_base 22: mod_base = OTHER; note = 2'-O-methylcytidine-3'-phosphorothioate
  modified_base 23: mod_base = OTHER; note = 2'-O-methyladenosine-3'-phosphate
aatcagaggagaagtgaaaatca

SEQ ID NO: 5275 - RNA, 23 nt, synthetic construct
  source 1..23: mol_type = other RNA
  modified_base 1: mod_base = OTHER; note = 2'-O-methyladenosine-3'-phosphorothioate
  modified_base 2: mod_base = OTHER; note = 2'-fluorouridine -3'-phosphorothioate
  modified_base 3: mod_base = OTHER; note = 2'-O-methylguanosine-3'-phosphate
  modified_base 4: mod_base = OTHER; note = 2'-O-methyluridine-3'-phosphate
  modified_base 5: mod_base = OTHER; note = 2'-O-methylcytidine-3'-phosphate
  modified_base 6: mod_base = OTHER; note = 2'-fluoroadenosine-3'-phosphate
  modified_base 7: mod_base = OTHER; note = 2'-O-methylcytidine-3'-phosphate
  modified_base 8: mod_base = OTHER; note = 2'-fluorocytidine-3'-phosphate
  modified_base 9: mod_base = OTHER; note = 2'-fluoroadenosine-3'-phosphate
  modified_base 10: mod_base = OTHER; note = 2'-O-methylguanosine-3'-phosphate
  modified_base 11: mod_base = OTHER; note = 2'-O-methylcytidine-3'-phosphate
  modified_base 12: mod_base = OTHER; note = 2'-O-methyladenosine-3'-phosphate
  modified_base 13: mod_base = OTHER; note = 2'-O-methylguanosine-3'-phosphate
  modified_base 14: mod_base = OTHER; note = 2'-fluorouridine-3'-phosphate
  modified_base 15: mod_base = OTHER; note = 2'-O-methyluridine-3'-phosphate
  modified_base 16: mod_base = OTHER; note = 2'-fluorocytidine-3'-phosphate
  modified_base 17: mod_base = OTHER; note = 2'-O-methyluridine-3'-phosphate
  modified_base 18: mod_base = OTHER; note = 2'-O-methyladenosine-3'-phosphate
  modified_base 19: mod_base = OTHER; note = 2'-O-methyluridine-3'-phosphate
  modified_base 20: mod_base = OTHER; note = 2'-O-methylcytidine-3'-phosphate
  modified_base 21: mod_base = OTHER; note = 2'-O-methyladenosine-3'-phosphorothioate
  modified_base 22: mod_base = OTHER; note = 2'-O-methylguanosine-3'-phosphorothioate
  modified_base 23: mod_base = OTHER; note = 2'-O-methyladenosine-3'-phosphate
atgtcaccagcagttctatcaga

SEQ ID NO: 5276 - RNA, 23 nt, synthetic construct
  source 1..23: mol_type = other RNA
  modified_base 1: mod_base = OTHER; note = 2'-O-methyladenosine-3'-phosphorothioate
  modified_base 2: mod_base = OTHER; note = 2'-fluorouridine -3'-phosphorothioate
  modified_base 3: mod_base = OTHER; note = 2'-O-methylguanosine-3'-phosphate
  modified_base 4: mod_base = OTHER; note = 2'-O-methylcytidine-3'-phosphate
  modified_base 5: mod_base = OTHER; note = 2'-O-methyladenosine-3'-phosphate
  modified_base 6: mod_base = OTHER; note = 2'-fluorocytidine-3'-phosphate
  modified_base 7: mod_base = OTHER; note = 2'-O-methyladenosine-3'-phosphate
  modified_base 8: mod_base = OTHER; note = 2'-fluoroadenosine-3'-phosphate
  modified_base 9: mod_base = OTHER; note = 2'-fluoroadenosine-3'-phosphate
  modified_base 10: mod_base = OTHER; note = 2'-O-methylguanosine-3'-phosphate
  modified_base 11: mod_base = OTHER; note = 2'-O-methyladenosine-3'-phosphate
  modified_base 12: mod_base = OTHER; note = 2'-O-methyladenosine-3'-phosphate
  modified_base 13: mod_base = OTHER; note = 2'-O-methylcytidine-3'-phosphate
  modified_base 14: mod_base = OTHER; note = 2'-fluoroadenosine-3'-phosphate
  modified_base 15: mod_base = OTHER; note = 2'-O-methyluridine-3'-phosphate
  modified_base 16: mod_base = OTHER; note = 2'-fluoroguanosine-3'-phosphate
  modified_base 17: mod_base = OTHER; note = 2'-O-methyladenosine-3'-phosphate
  modified_base 18: mod_base = OTHER; note = 2'-O-methylguanosine-3'-phosphate
  modified_base 19: mod_base = OTHER; note = 2'-O-methyladenosine-3'-phosphate
  modified_base 20: mod_base = OTHER; note = 2'-O-methylcytidine-3'-phosphate
  modified_base 21: mod_base = OTHER; note = 2'-O-methyluridine-3'-phosphorothioate
  modified_base 22: mod_base = OTHER; note = 2'-O-methylguanosine-3'-phosphorothioate
  modified_base 23: mod_base = OTHER; note = 2'-O-methylguanosine-3'-phosphate
atgcacaaagaacatgagactgg

SEQ ID NO: 5277 - RNA, 23 nt, synthetic construct
  source 1..23: mol_type = other RNA
  modified_base 1: mod_base = OTHER; note = 2'-O-methyladenosine-3'-phosphorothioate
  modified_base 2: mod_base = OTHER; note = 2'-fluoroguanosine-3'-phosphorothioate
  modified_base 3: mod_base = OTHER; note = 2'-O-methylguanosine-3'-phosphate
  modified_base 4: mod_base = OTHER; note = 2'-O-methyluridine-3'-phosphate
  modified_base 5: mod_base = OTHER; note = 2'-O-methyladenosine-3'-phosphate
  modified_base 6: mod_base = OTHER; note = 2'-fluorouridine-3'-phosphate
  modified_base 7: mod_base = OTHER; note = 2'-O-methyluridine-3'-phosphate
  modified_base 8: mod_base = OTHER; note = 2'-fluoroguanosine-3'-phosphate
  modified_base 9: mod_base = OTHER; note = 2'-fluoroguanosine-3'-phosphate
  modified_base 10: mod_base = OTHER; note = 2'-O-methyladenosine-3'-phosphate
  modified_base 11: mod_base = OTHER; note = 2'-O-methyladenosine-3'-phosphate
  modified_base 12: mod_base = OTHER; note = 2'-O-methylguanosine-3'-phosphate
  modified_base 13: mod_base = OTHER; note = 2'-O-methylguanosine-3'-phosphate
  modified_base 14: mod_base = OTHER; note = 2'-fluoroguanosine-3'-phosphate
  modified_base 15: mod_base = OTHER; note = 2'-O-methyladenosine-3'-phosphate
  modified_base 16: mod_base = OTHER; note = 2'-fluoroguanosine-3'-phosphate
  modified_base 17: mod_base = OTHER; note = 2'-O-methylcytidine-3'-phosphate
  modified_base 18: mod_base = OTHER; note = 2'-O-methyluridine-3'-phosphate
  modified_base 19: mod_base = OTHER; note = 2'-O-methylguanosine-3'-phosphate
  modified_base 20: mod_base = OTHER; note = 2'-O-methylcytidine-3'-phosphate
  modified_base 21: mod_base = OTHER; note = 2'-O-methyladenosine-3'-phosphorothioate
  modified_base 22: mod_base = OTHER; note = 2'-O-methylcytidine-3'-phosphorothioate
  modified_base 23: mod_base = OTHER; note = 2'-O-methyladenosine-3'-phosphate
aggtattggaagggagctgcaca

SEQ ID NO: 5278 - RNA, 23 nt, synthetic construct
  source 1..23: mol_type = other RNA
  modified_base 1: mod_base = OTHER; note = 2'-O-methyladenosine-3'-phosphorothioate
  modified_base 2: mod_base = OTHER; note = 2'-fluorocytidine-3'-phosphorothioate
  modified_base 3: mod_base = OTHER; note = 2'-O-methyluridine-3'-phosphate
  modified_base 4: mod_base = OTHER; note = 2'-O-methyluridine-3'-phosphate
  modified_base 5: mod_base = OTHER; note = 2'-O-methyluridine-3'-phosphate
  modified_base 6: mod_base = OTHER; note = 2'-fluorocytidine-3'-phosphate
  modified_base 7: mod_base = OTHER; note = 2'-O-methyladenosine-3'-phosphate
  modified_base 8: mod_base = OTHER; note = 2'-fluoroadenosine-3'-phosphate
  modified_base 9: mod_base = OTHER; note = 2'-fluoroguanosine-3'-phosphate
  modified_base 10: mod_base = OTHER; note = 2'-O-methylguanosine-3'-phosphate
  modified_base 11: mod_base = OTHER; note = 2'-O-methyluridine-3'-phosphate
  modified_base 12: mod_base = OTHER; note = 2'-O-methylcytidine-3'-phosphate
  modified_base 13: mod_base = OTHER; note = 2'-O-methylcytidine-3'-phosphate
  modified_base 14: mod_base = OTHER; note = 2'-fluoroadenosine-3'-phosphate
  modified_base 15: mod_base = OTHER; note = 2'-O-methyladenosine-3'-phosphate
  modified_base 16: mod_base = OTHER; note = 2'-fluoroguanosine-3'-phosphate
  modified_base 17: mod_base = OTHER; note = 2'-O-methyluridine-3'-phosphate
  modified_base 18: mod_base = OTHER; note = 2'-O-methylguanosine-3'-phosphate
  modified_base 19: mod_base = OTHER; note = 2'-O-methylguanosine-3'-phosphate
  modified_base 20: mod_base = OTHER; note = 2'-O-methyluridine-3'-phosphate
  modified_base 21: mod_base = OTHER; note = 2'-O-methyladenosine-3'-phosphorothioate
  modified_base 22: mod_base = OTHER; note = 2'-O-methyluridine-3'-phosphorothioate
  modified_base 23: mod_base = OTHER; note = 2'-O-methyluridine-3'-phosphate
actttcaaggtccaagtggtatt

SEQ ID NO: 5279 - RNA, 23 nt, synthetic construct
  source 1..23: mol_type = other RNA
  modified_base 1: mod_base = OTHER; note = 2'-O-methyladenosine-3'-phosphorothioate
  modified_base 2: mod_base = OTHER; note = 2'-fluoroadenosine-3'-phosphorothioate
  modified_base 3: mod_base = OTHER; note = 2'-O-methylguanosine-3'-phosphate
  modified_base 4: mod_base = OTHER; note = 2'-O-methylcytidine-3'-phosphate
  modified_base 5: mod_base = OTHER; note = 2'-O-methyladenosine-3'-phosphate
  modified_base 6: mod_base = OTHER; note = 2'-fluorocytidine-3'-phosphate
  modified_base 7: mod_base = OTHER; note = 2'-O-methyladenosine-3'-phosphate
  modified_base 8: mod_base = OTHER; note = 2'-fluoroadenosine-3'-phosphate
  modified_base 9: mod_base = OTHER; note = 2'-fluoroguanosine-3'-phosphate
  modified_base 10: mod_base = OTHER; note = 2'-O-methylguanosine-3'-phosphate
  modified_base 11: mod_base = OTHER; note = 2'-O-methyladenosine-3'-phosphate
  modified_base 12: mod_base = OTHER; note = 2'-O-methylcytidine-3'-phosphate
  modified_base 13: mod_base = OTHER; note = 2'-O-methyluridine-3'-phosphate
  modified_base 14: mod_base = OTHER; note = 2'-fluorocytidine-3'-phosphate
  modified_base 15: mod_base = OTHER; note = 2'-O-methyluridine-3'-phosphate
  modified_base 16: mod_base = OTHER; note = 2'-fluorocytidine-3'-phosphate
  modified_base 17: mod_base = OTHER; note = 2'-O-methyladenosine-3'-phosphate
  modified_base 18: mod_base = OTHER; note = 2'-O-methylcytidine-3'-phosphate
  modified_base 19: mod_base = OTHER; note = 2'-O-methyluridine-3'-phosphate
  modified_base 20: mod_base = OTHER; note = 2'-O-methyluridine-3'-phosphate
  modified_base 21: mod_base = OTHER; note = 2'-O-methyluridine-3'-phosphorothioate
  modified_base 22: mod_base = OTHER; note = 2'-O-methylcytidine-3'-phosphorothioate
  modified_base 23: mod_base = OTHER; note = 2'-O-methyladenosine-3'-phosphate
aagcacaaggactctcactttca

SEQ ID NO: 5280 - RNA, 23 nt, synthetic construct
  source 1..23: mol_type = other RNA
  modified_base 1: mod_base = OTHER; note = 2'-O-methyladenosine-3'-phosphorothioate
  modified_base 2: mod_base = OTHER; note = 2'-fluoroguanosine-3'-phosphorothioate
  modified_base 3: mod_base = OTHER; note = 2'-O-methyluridine-3'-phosphate
  modified_base 4: mod_base = OTHER; note = 2'-O-methylguanosine-3'-phosphate
  modified_base 5: mod_base = OTHER; note = 2'-O-methyladenosine-3'-phosphate
  modified_base 6: mod_base = OTHER; note = 2'-fluoroguanosine-3'-phosphate
  modified_base 7: mod_base = OTHER; note = 2'-O-methylguanosine-3'-phosphate
  modified_base 8: mod_base = OTHER; note = 2'-fluorouridine-3'-phosphate
  modified_base 9: mod_base = OTHER; note = 2'-fluorouridine-3'-phosphate
  modified_base 10: mod_base = OTHER; note = 2'-O-methylguanosine-3'-phosphate
  modified_base 11: mod_base = OTHER; note = 2'-O-methylguanosine-3'-phosphate
  modified_base 12: mod_base = OTHER; note = 2'-O-methyluridine-3'-phosphate
  modified_base 13: mod_base = OTHER; note = 2'-O-methyladenosine-3'-phosphate
  modified_base 14: mod_base = OTHER; note = 2'-fluorouridine-3'-phosphate
  modified_base 15: mod_base = OTHER; note = 2'-O-methyluridine-3'-phosphate
  modified_base 16: mod_base = OTHER; note = 2'-fluoroadenosine-3'-phosphate
  modified_base 17: mod_base = OTHER; note = 2'-O-methyluridine-3'-phosphate
  modified_base 18: mod_base = OTHER; note = 2'-O-methylguanosine-3'-phosphate
  modified_base 19: mod_base = OTHER; note = 2'-O-methyluridine-3'-phosphate
  modified_base 20: mod_base = OTHER; note = 2'-O-methylguanosine-3'-phosphate
  modified_base 21: mod_base = OTHER; note = 2'-O-methylguanosine-3'-phosphorothioate
  modified_base 22: mod_base = OTHER; note = 2'-O-methyladenosine-3'-phosphorothioate
  modified_base 23: mod_base = OTHER; note = 2'-O-methylcytidine-3'-phosphate
agtgaggttggtattatgtggac

SEQ ID NO: 5281 - RNA, 23 nt, synthetic construct
  source 1..23: mol_type = other RNA
  modified_base 1: mod_base = OTHER; note = 2'-O-methyladenosine-3'-phosphorothioate
  modified_base 2: mod_base = OTHER; note = 2'-fluoroadenosine-3'-phosphorothioate
  modified_base 3: mod_base = OTHER; note = 2'-O-methylguanosine-3'-phosphate
  modified_base 4: mod_base = OTHER; note = 2'-O-methylcytidine-3'-phosphate
  modified_base 5: mod_base = OTHER; note = 2'-O-methyladenosine-3'-phosphate
  modified_base 6: mod_base = OTHER; note = 2'-fluoroguanosine-3'-phosphate
  modified_base 7: mod_base = OTHER; note = 2'-O-methylguanosine-3'-phosphate
  modified_base 8: mod_base = OTHER; note = 2'-fluorouridine-3'-phosphate
  modified_base 9: mod_base = OTHER; note = 2'-fluoroadenosine-3'-phosphate
  modified_base 10: mod_base = OTHER; note = 2'-O-methylcytidine-3'-phosphate
  modified_base 11: mod_base = OTHER; note = 2'-O-methyluridine-3'-phosphate
  modified_base 12: mod_base = OTHER; note = 2'-O-methylguanosine-3'-phosphate
  modified_base 13: mod_base = OTHER; note = 2'-O-methyladenosine-3'-phosphate
  modified_base 14: mod_base = OTHER; note = 2'-fluoroguanosine-3'-phosphate
  modified_base 15: mod_base = OTHER; note = 2'-O-methyluridine-3'-phosphate
  modified_base 16: mod_base = OTHER; note = 2'-fluoroadenosine-3'-phosphate
  modified_base 17: mod_base = OTHER; note = 2'-O-methylguanosine-3'-phosphate
  modified_base 18: mod_base = OTHER; note = 2'-O-methylcytidine-3'-phosphate
  modified_base 19: mod_base = OTHER; note = 2'-O-methylcytidine-3'-phosphate
  modified_base 20: mod_base = OTHER; note = 2'-O-methyladenosine-3'-phosphate
  modified_base 21: mod_base = OTHER; note = 2'-O-methyladenosine-3'-phosphorothioate
  modified_base 22: mod_base = OTHER; note = 2'-O-methylguanosine-3'-phosphorothioate
  modified_base 23: mod_base = OTHER; note = 2'-O-methylguanosine-3'-phosphate
aagcaggtactgagtagccaagg

SEQ ID NO: 5282 - RNA, 23 nt, synthetic construct
  source 1..23: mol_type = other RNA
  modified_base 1: mod_base = OTHER; note = 2'-O-methyladenosine-3'-phosphorothioate
  modified_base 2: mod_base = OTHER; note = 2'-fluoroadenosine-3'-phosphorothioate
  modified_base 3: mod_base = OTHER; note = 2'-O-methylcytidine-3'-phosphate
  modified_base 4: mod_base = OTHER; note = 2'-O-methyluridine-3'-phosphate
  modified_base 5: mod_base = OTHER; note = 2'-O-methylguanosine-3'-phosphate
  modified_base 6: mod_base = OTHER; note = 2'-fluoroguanosine-3'-phosphate
  modified_base 7: mod_base = OTHER; note = 2'-O-methylcytidine-3'-phosphate
  modified_base 8: mod_base = OTHER; note = 2'-fluoroadenosine-3'-phosphate
  modified_base 9: mod_base = OTHER; note = 2'-fluorouridine-3'-phosphate
  modified_base 10: mod_base = OTHER; note = 2'-O-methylcytidine-3'-phosphate
  modified_base 11: mod_base = OTHER; note = 2'-O-methylcytidine-3'-phosphate
  modified_base 12: mod_base = OTHER; note = 2'-O-methyladenosine-3'-phosphate
  modified_base 13: mod_base = OTHER; note = 2'-O-methylcytidine-3'-phosphate
  modified_base 14: mod_base = OTHER; note = 2'-fluorocytidine-3'-phosphate
  modified_base 15: mod_base = OTHER; note = 2'-O-methyluridine-3'-phosphate
  modified_base 16: mod_base = OTHER; note = 2'-fluorocytidine-3'-phosphate
  modified_base 17: mod_base = OTHER; note = 2'-O-methylcytidine-3'-phosphate
  modified_base 18: mod_base = OTHER; note = 2'-O-methyladenosine-3'-phosphate
  modified_base 19: mod_base = OTHER; note = 2'-O-methylguanosine-3'-phosphate
  modified_base 20: mod_base = OTHER; note = 2'-O-methylcytidine-3'-phosphate
  modified_base 21: mod_base = OTHER; note = 2'-O-methyladenosine-3'-phosphorothioate
  modified_base 22: mod_base = OTHER; note = 2'-O-methylguanosine-3'-phosphorothioate
  modified_base 23: mod_base = OTHER; note = 2'-O-methylguanosine-3'-phosphate
aactggcatccacctccagcagg

SEQ ID NO: 5283 - RNA, 23 nt, synthetic construct
  source 1..23: mol_type = other RNA
  modified_base 1: mod_base = OTHER; note = 2'-O-methyladenosine-3'-phosphorothioate
  modified_base 2: mod_base = OTHER; note = 2'-fluoroguanosine-3'-phosphorothioate
  modified_base 3: mod_base = OTHER; note = 2'-O-methylguanosine-3'-phosphate
  modified_base 4: mod_base = OTHER; note = 2'-O-methyladenosine-3'-phosphate
  modified_base 5: mod_base = OTHER; note = 2'-O-methylguanosine-3'-phosphate
  modified_base 6: mod_base = OTHER; note = 2'-fluorouridine-3'-phosphate
  modified_base 7: mod_base = OTHER; note = 2'-O-methyluridine-3'-phosphate
  modified_base 8: mod_base = OTHER; note = 2'-fluoroguanosine-3'-phosphate
  modified_base 9: mod_base = OTHER; note = 2'-fluoroadenosine-3'-phosphate
  modified_base 10: mod_base = OTHER; note = 2'-O-methyluridine-3'-phosphate
  modified_base 11: mod_base = OTHER; note = 2'-O-methylguanosine-3'-phosphate
  modified_base 12: mod_base = OTHER; note = 2'-O-methylcytidine-3'-phosphate
  modified_base 13: mod_base = OTHER; note = 2'-O-methylcytidine-3'-phosphate
  modified_base 14: mod_base = OTHER; note = 2'-fluoroadenosine-3'-phosphate
  modified_base 15: mod_base = OTHER; note = 2'-O-methylguanosine-3'-phosphate
  modified_base 16: mod_base = OTHER; note = 2'-fluorocytidine-3'-phosphate
  modified_base 17: mod_base = OTHER; note = 2'-O-methylcytidine-3'-phosphate
  modified_base 18: mod_base = OTHER; note = 2'-O-methyladenosine-3'-phosphate
  modified_base 19: mod_base = OTHER; note = 2'-O-methylcytidine-3'-phosphate
  modified_base 20: mod_base = OTHER; note = 2'-O-methyluridine-3'-phosphate
  modified_base 21: mod_base = OTHER; note = 2'-O-methylguanosine-3'-phosphorothioate
  modified_base 22: mod_base = OTHER; note = 2'-O-methylguanosine-3'-phosphorothioate
  modified_base 23: mod_base = OTHER; note = 2'-O-methylcytidine-3'-phosphate
aggagttgatgccagccactggc

SEQ ID NO: 5284 - RNA, 23 nt, synthetic construct
  source 1..23: mol_type = other RNA
  modified_base 1: mod_base = OTHER; note = 2'-O-methyladenosine-3'-phosphorothioate
  modified_base 2: mod_base = OTHER; note = 2'-fluorocytidine-3'-phosphorothioate
  modified_base 3: mod_base = OTHER; note = 2'-O-methyladenosine-3'-phosphate
  modified_base 4: mod_base = OTHER; note = 2'-O-methylguanosine-3'-phosphate
  modified_base 5: mod_base = OTHER; note = 2'-O-methylguanosine-3'-phosphate
  modified_base 6: mod_base = OTHER; note = 2'-fluorocytidine-3'-phosphate
  modified_base 7: mod_base = OTHER; note = 2'-O-methyladenosine-3'-phosphate
  modified_base 8: mod_base = OTHER; note = 2'-fluoroguanosine-3'-phosphate
  modified_base 9: mod_base = OTHER; note = 2'-fluorocytidine-3'-phosphate
  modified_base 10: mod_base = OTHER; note = 2'-O-methyluridine-3'-phosphate
  modified_base 11: mod_base = OTHER; note = 2'-O-methyluridine-3'-phosphate
  modified_base 12: mod_base = OTHER; note = 2'-O-methylguanosine-3'-phosphate
  modified_base 13: mod_base = OTHER; note = 2'-O-methyladenosine-3'-phosphate
  modified_base 14: mod_base = OTHER; note = 2'-fluoroguanosine-3'-phosphate
  modified_base 15: mod_base = OTHER; note = 2'-O-methylcytidine-3'-phosphate
  modified_base 16: mod_base = OTHER; note = 2'-fluorouridine-3'-phosphate
  modified_base 17: mod_base = OTHER; note = 2'-O-methyluridine-3'-phosphate
  modified_base 18: mod_base = OTHER; note = 2'-O-methylcytidine-3'-phosphate
  modified_base 19: mod_base = OTHER; note = 2'-O-methyladenosine-3'-phosphate
  modified_base 20: mod_base = OTHER; note = 2'-O-methylguanosine-3'-phosphate
  modified_base 21: mod_base = OTHER; note = 2'-O-methylguanosine-3'-phosphorothioate
  modified_base 22: mod_base = OTHER; note = 2'-O-methylcytidine-3'-phosphorothioate
  modified_base 23: mod_base = OTHER; note = 2'-O-methylcytidine-3'-phosphate
acaggcagcttgagcttcaggcc

SEQ ID NO: 5285 - RNA, 23 nt, synthetic construct
  source 1..23: mol_type = other RNA
  modified_base 1: mod_base = OTHER; note = 2'-O-methyladenosine-3'-phosphorothioate
  modified_base 2: mod_base = OTHER; note = 2'-fluorouridine -3'-phosphorothioate
  modified_base 3: mod_base = OTHER; note = 2'-O-methylguanosine-3'-phosphate
  modified_base 4: mod_base = OTHER; note = 2'-O-methylguanosine-3'-phosphate
  modified_base 5: mod_base = OTHER; note = 2'-O-methylcytidine-3'-phosphate
  modified_base 6: mod_base = OTHER; note = 2'-fluorocytidine-3'-phosphate
  modified_base 7: mod_base = OTHER; note = 2'-O-methyluridine-3'-phosphate
  modified_base 8: mod_base = OTHER; note = 2'-fluorouridine-3'-phosphate
  modified_base 9: mod_base = OTHER; note = 2'-fluorocytidine-3'-phosphate
  modified_base 10: mod_base = OTHER; note = 2'-O-methyladenosine-3'-phosphate
  modified_base 11: mod_base = OTHER; note = 2'-O-methyladenosine-3'-phosphate
  modified_base 12: mod_base = OTHER; note = 2'-O-methylguanosine-3'-phosphate
  modified_base 13: mod_base = OTHER; note = 2'-O-methyluridine-3'-phosphate
  modified_base 14: mod_base = OTHER; note = 2'-fluoroadenosine-3'-phosphate
  modified_base 15: mod_base = OTHER; note = 2'-O-methylcytidine-3'-phosphate
  modified_base 16: mod_base = OTHER; note = 2'-fluorocytidine-3'-phosphate
  modified_base 17: mod_base = OTHER; note = 2'-O-methyladenosine-3'-phosphate
  modified_base 18: mod_base = OTHER; note = 2'-O-methylguanosine-3'-phosphate
  modified_base 19: mod_base = OTHER; note = 2'-O-methylcytidine-3'-phosphate
  modified_base 20: mod_base = OTHER; note = 2'-O-methyluridine-3'-phosphate
  modified_base 21: mod_base = OTHER; note = 2'-O-methylcytidine-3'-phosphorothioate
  modified_base 22: mod_base = OTHER; note = 2'-O-methylcytidine-3'-phosphorothioate
  modified_base 23: mod_base = OTHER; note = 2'-O-methyladenosine-3'-phosphate
atggccttcaagtaccagctcca

SEQ ID NO: 5286 - RNA, 23 nt, synthetic construct
  source 1..23: mol_type = other RNA
  modified_base 1: mod_base = OTHER; note = 2'-O-methyladenosine-3'-phosphorothioate
  modified_base 2: mod_base = OTHER; note = 2'-fluoroadenosine-3'-phosphorothioate
  modified_base 3: mod_base = OTHER; note = 2'-O-methylguanosine-3'-phosphate
  modified_base 4: mod_base = OTHER; note = 2'-O-methylguanosine-3'-phosphate
  modified_base 5: mod_base = OTHER; note = 2'-O-methyladenosine-3'-phosphate
  modified_base 6: mod_base = OTHER; note = 2'-fluorouridine-3'-phosphate
  modified_base 7: mod_base = OTHER; note = 2'-O-methylguanosine-3'-phosphate
  modified_base 8: mod_base = OTHER; note = 2'-fluoroadenosine-3'-phosphate
  modified_base 9: mod_base = OTHER; note = 2'-fluorocytidine-3'-phosphate
  modified_base 10: mod_base = OTHER; note = 2'-O-methyluridine-3'-phosphate
  modified_base 11: mod_base = OTHER; note = 2'-O-methylguanosine-3'-phosphate
  modified_base 12: mod_base = OTHER; note = 2'-O-methyladenosine-3'-phosphate
  modified_base 13: mod_base = OTHER; note = 2'-O-methylguanosine-3'-phosphate
  modified_base 14: mod_base = OTHER; note = 2'-fluorocytidine-3'-phosphate
  modified_base 15: mod_base = OTHER; note = 2'-O-methyluridine-3'-phosphate
  modified_base 16: mod_base = OTHER; note = 2'-fluorocytidine-3'-phosphate
  modified_base 17: mod_base = OTHER; note = 2'-O-methyluridine-3'-phosphate
  modified_base 18: mod_base = OTHER; note = 2'-O-methylguanosine-3'-phosphate
  modified_base 19: mod_base = OTHER; note = 2'-O-methylguanosine-3'-phosphate
  modified_base 20: mod_base = OTHER; note = 2'-O-methylguanosine-3'-phosphate
  modified_base 21: mod_base = OTHER; note = 2'-O-methylcytidine-3'-phosphorothioate
  modified_base 22: mod_base = OTHER; note = 2'-O-methyluridine-3'-phosphorothioate
  modified_base 23: mod_base = OTHER; note = 2'-O-methyladenosine-3'-phosphate
aaggatgactgagctctgggcta

SEQ ID NO: 5287 - RNA, 23 nt, synthetic construct
  source 1..23: mol_type = other RNA
  modified_base 1: mod_base = OTHER; note = 2'-O-methyladenosine-3'-phosphorothioate
  modified_base 2: mod_base = OTHER; note = 2'-fluorocytidine-3'-phosphorothioate
  modified_base 3: mod_base = OTHER; note = 2'-O-methylcytidine-3'-phosphate
  modified_base 4: mod_base = OTHER; note = 2'-O-methyladenosine-3'-phosphate
  modified_base 5: mod_base = OTHER; note = 2'-O-methylcytidine-3'-phosphate
  modified_base 6: mod_base = OTHER; note = 2'-fluoroadenosine-3'-phosphate
  modified_base 7: mod_base = OTHER; note = 2'-O-methyladenosine-3'-phosphate
  modified_base 8: mod_base = OTHER; note = 2'-fluoroadenosine-3'-phosphate
  modified_base 9: mod_base = OTHER; note = 2'-fluoroadenosine-3'-phosphate
  modified_base 10: mod_base = OTHER; note = 2'-O-methylguanosine-3'-phosphate
  modified_base 11: mod_base = OTHER; note = 2'-O-methylguanosine-3'-phosphate
  modified_base 12: mod_base = OTHER; note = 2'-O-methylcytidine-3'-phosphate
  modified_base 13: mod_base = OTHER; note = 2'-O-methylcytidine-3'-phosphate
  modified_base 14: mod_base = OTHER; note = 2'-fluorouridine-3'-phosphate
  modified_base 15: mod_base = OTHER; note = 2'-O-methyladenosine-3'-phosphate
  modified_base 16: mod_base = OTHER; note = 2'-fluorouridine-3'-phosphate
  modified_base 17: mod_base = OTHER; note = 2'-O-methylguanosine-3'-phosphate
  modified_base 18: mod_base = OTHER; note = 2'-O-methylguanosine-3'-phosphate
  modified_base 19: mod_base = OTHER; note = 2'-O-methylguanosine-3'-phosphate
  modified_base 20: mod_base = OTHER; note = 2'-O-methylcytidine-3'-phosphate
  modified_base 21: mod_base = OTHER; note = 2'-O-methyladenosine-3'-phosphorothioate
  modified_base 22: mod_base = OTHER; note = 2'-O-methylguanosine-3'-phosphorothioate
  modified_base 23: mod_base = OTHER; note = 2'-O-methylcytidine-3'-phosphate
accacaaaaggcctatgggcagc

SEQ ID NO: 5288 - RNA, 23 nt, synthetic construct
  source 1..23: mol_type = other RNA
  modified_base 1: mod_base = OTHER; note = 2'-O-methyladenosine-3'-phosphorothioate
  modified_base 2: mod_base = OTHER; note = 2'-fluoroadenosine-3'-phosphorothioate
  modified_base 3: mod_base = OTHER; note = 2'-O-methyladenosine-3'-phosphate
  modified_base 4: mod_base = OTHER; note = 2'-O-methylcytidine-3'-phosphate
  modified_base 5: mod_base = OTHER; note = 2'-O-methyluridine-3'-phosphate
  modified_base 6: mod_base = OTHER; note = 2'-fluorocytidine-3'-phosphate
  modified_base 7: mod_base = OTHER; note = 2'-O-methyluridine-3'-phosphate
  modified_base 8: mod_base = OTHER; note = 2'-fluorocytidine-3'-phosphate
  modified_base 9: mod_base = OTHER; note = 2'-fluoroadenosine-3'-phosphate
  modified_base 10: mod_base = OTHER; note = 2'-O-methylcytidine-3'-phosphate
  modified_base 11: mod_base = OTHER; note = 2'-O-methylcytidine-3'-phosphate
  modified_base 12: mod_base = OTHER; note = 2'-O-methylcytidine-3'-phosphate
  modified_base 13: mod_base = OTHER; note = 2'-O-methylguanosine-3'-phosphate
  modified_base 14: mod_base = OTHER; note = 2'-fluoroguanosine-3'-phosphate
  modified_base 15: mod_base = OTHER; note = 2'-O-methylguanosine-3'-phosphate
  modified_base 16: mod_base = OTHER; note = 2'-fluorocytidine-3'-phosphate
  modified_base 17: mod_base = OTHER; note = 2'-O-methyluridine-3'-phosphate
  modified_base 18: mod_base = OTHER; note = 2'-O-methylguanosine-3'-phosphate
  modified_base 19: mod_base = OTHER; note = 2'-O-methylcytidine-3'-phosphate
  modified_base 20: mod_base = OTHER; note = 2'-O-methylcytidine-3'-phosphate
  modified_base 21: mod_base = OTHER; note = 2'-O-methyladenosine-3'-phosphorothioate
  modified_base 22: mod_base = OTHER; note = 2'-O-methylcytidine-3'-phosphorothioate
  modified_base 23: mod_base = OTHER; note = 2'-O-methyladenosine-3'-phosphate
aaactctcacccgggctgccaca

SEQ ID NO: 5289 - RNA, 23 nt, synthetic construct
  source 1..23: mol_type = other RNA
  modified_base 1: mod_base = OTHER; note = 2'-O-methyladenosine-3'-phosphorothioate
  modified_base 2: mod_base = OTHER; note = 2'-fluorouridine -3'-phosphorothioate
  modified_base 3: mod_base = OTHER; note = 2'-O-methylcytidine-3'-phosphate
  modified_base 4: mod_base = OTHER; note = 2'-O-methylguanosine-3'-phosphate
  modified_base 5: mod_base = OTHER; note = 2'-O-methylguanosine-3'-phosphate
  modified_base 6: mod_base = OTHER; note = 2'-fluorouridine-3'-phosphate
  modified_base 7: mod_base = OTHER; note = 2'-O-methylguanosine-3'-phosphate
  modified_base 8: mod_base = OTHER; note = 2'-fluoroadenosine-3'-phosphate
  modified_base 9: mod_base = OTHER; note = 2'-fluoroadenosine-3'-phosphate
  modified_base 10: mod_base = OTHER; note = 2'-O-methyluridine-3'-phosphate
  modified_base 11: mod_base = OTHER; note = 2'-O-methylcytidine-3'-phosphate
  modified_base 12: mod_base = OTHER; note = 2'-O-methyluridine-3'-phosphate
  modified_base 13: mod_base = OTHER; note = 2'-O-methylguanosine-3'-phosphate
  modified_base 14: mod_base = OTHER; note = 2'-fluoroguanosine-3'-phosphate
  modified_base 15: mod_base = OTHER; note = 2'-O-methyluridine-3'-phosphate
  modified_base 16: mod_base = OTHER; note = 2'-fluoroguanosine-3'-phosphate
  modified_base 17: mod_base = OTHER; note = 2'-O-methyluridine-3'-phosphate
  modified_base 18: mod_base = OTHER; note = 2'-O-methyluridine-3'-phosphate
  modified_base 19: mod_base = OTHER; note = 2'-O-methyluridine-3'-phosphate
  modified_base 20: mod_base = OTHER; note = 2'-O-methylguanosine-3'-phosphate
  modified_base 21: mod_base = OTHER; note = 2'-O-methylcytidine-3'-phosphorothioate
  modified_base 22: mod_base = OTHER; note = 2'-O-methylcytidine-3'-phosphorothioate
  modified_base 23: mod_base = OTHER; note = 2'-O-methylcytidine-3'-phosphate
atcggtgaatctggtgtttgccc

SEQ ID NO: 5290 - RNA, 23 nt, synthetic construct
  source 1..23: mol_type = other RNA
  modified_base 1: mod_base = OTHER; note = 2'-O-methyladenosine-3'-phosphorothioate
  modified_base 2: mod_base = OTHER; note = 2'-fluorocytidine-3'-phosphorothioate
  modified_base 3: mod_base = OTHER; note = 2'-O-methyluridine-3'-phosphate
  modified_base 4: mod_base = OTHER; note = 2'-O-methyluridine-3'-phosphate
  modified_base 5: mod_base = OTHER; note = 2'-O-methylguanosine-3'-phosphate
  modified_base 6: mod_base = OTHER; note = 2'-fluoroguanosine-3'-phosphate
  modified_base 7: mod_base = OTHER; note = 2'-O-methylcytidine-3'-phosphate
  modified_base 8: mod_base = OTHER; note = 2'-fluoroadenosine-3'-phosphate
  modified_base 9: mod_base = OTHER; note = 2'-fluoroguanosine-3'-phosphate
  modified_base 10: mod_base = OTHER; note = 2'-O-methyluridine-3'-phosphate
  modified_base 11: mod_base = OTHER; note = 2'-O-methylcytidine-3'-phosphate
  modified_base 12: mod_base = OTHER; note = 2'-O-methylguanosine-3'-phosphate
  modified_base 13: mod_base = OTHER; note = 2'-O-methyladenosine-3'-phosphate
  modified_base 14: mod_base = OTHER; note = 2'-fluorouridine-3'-phosphate
  modified_base 15: mod_base = OTHER; note = 2'-O-methylguanosine-3'-phosphate
  modified_base 16: mod_base = OTHER; note = 2'-fluorocytidine-3'-phosphate
  modified_base 17: mod_base = OTHER; note = 2'-O-methylcytidine-3'-phosphate
  modified_base 18: mod_base = OTHER; note = 2'-O-methyluridine-3'-phosphate
  modified_base 19: mod_base = OTHER; note = 2'-O-methylcytidine-3'-phosphate
  modified_base 20: mod_base = OTHER; note = 2'-O-methylguanosine-3'-phosphate
  modified_base 21: mod_base = OTHER; note = 2'-O-methyluridine-3'-phosphorothioate
  modified_base 22: mod_base = OTHER; note = 2'-O-methylcytidine-3'-phosphorothioate
  modified_base 23: mod_base = OTHER; note = 2'-O-methylguanosine-3'-phosphate
acttggcagtcgatgcctcgtcg

SEQ ID NO: 5291 - RNA, 23 nt, synthetic construct
  source 1..23: mol_type = other RNA
  modified_base 1: mod_base = OTHER; note = 2'-O-methyladenosine-3'-phosphorothioate
  modified_base 2: mod_base = OTHER; note = 2'-fluoroguanosine-3'-phosphorothioate
  modified_base 3: mod_base = OTHER; note = 2'-O-methylcytidine-3'-phosphate
  modified_base 4: mod_base = OTHER; note = 2'-O-methyladenosine-3'-phosphate
  modified_base 5: mod_base = OTHER; note = 2'-O-methylcytidine-3'-phosphate
  modified_base 6: mod_base = OTHER; note = 2'-fluoroadenosine-3'-phosphate
  modified_base 7: mod_base = OTHER; note = 2'-O-methyluridine-3'-phosphate
  modified_base 8: mod_base = OTHER; note = 2'-fluorocytidine-3'-phosphate
  modified_base 9: mod_base = OTHER; note = 2'-fluorocytidine-3'-phosphate
  modified_base 10: mod_base = OTHER; note = 2'-O-methyluridine-3'-phosphate
  modified_base 11: mod_base = OTHER; note = 2'-O-methylguanosine-3'-phosphate
  modified_base 12: mod_base = OTHER; note = 2'-O-methylguanosine-3'-phosphate
  modified_base 13: mod_base = OTHER; note = 2'-O-methyladenosine-3'-phosphate
  modified_base 14: mod_base = OTHER; note = 2'-fluorocytidine-3'-phosphate
  modified_base 15: mod_base = OTHER; note = 2'-O-methylcytidine-3'-phosphate
  modified_base 16: mod_base = OTHER; note = 2'-fluorocytidine-3'-phosphate
  modified_base 17: mod_base = OTHER; note = 2'-O-methyluridine-3'-phosphate
  modified_base 18: mod_base = OTHER; note = 2'-O-methylcytidine-3'-phosphate
  modified_base 19: mod_base = OTHER; note = 2'-O-methylcytidine-3'-phosphate
  modified_base 20: mod_base = OTHER; note = 2'-O-methyluridine-3'-phosphate
  modified_base 21: mod_base = OTHER; note = 2'-O-methyluridine-3'-phosphorothioate
  modified_base 22: mod_base = OTHER; note = 2'-O-methylguanosine-3'-phosphorothioate
  modified_base 23: mod_base = OTHER; note = 2'-O-methylguanosine-3'-phosphate
agcacatcctggaccctccttgg

SEQ ID NO: 5292 - RNA, 23 nt, synthetic construct
  source 1..23: mol_type = other RNA
  modified_base 1: mod_base = OTHER; note = 2'-O-methyladenosine-3'-phosphorothioate
  modified_base 2: mod_base = OTHER; note = 2'-fluoroadenosine-3'-phosphorothioate
  modified_base 3: mod_base = OTHER; note = 2'-O-methyladenosine-3'-phosphate
  modified_base 4: mod_base = OTHER; note = 2'-O-methyladenosine-3'-phosphate
  modified_base 5: mod_base = OTHER; note = 2'-O-methyladenosine-3'-phosphate
  modified_base 6: mod_base = OTHER; note = 2'-fluorocytidine-3'-phosphate
  modified_base 7: mod_base = OTHER; note = 2'-O-methyluridine-3'-phosphate
  modified_base 8: mod_base = OTHER; note = 2'-fluorocytidine-3'-phosphate
  modified_base 9: mod_base = OTHER; note = 2'-fluorouridine-3'-phosphate
  modified_base 10: mod_base = OTHER; note = 2'-O-methyluridine-3'-phosphate
  modified_base 11: mod_base = OTHER; note = 2'-O-methylguanosine-3'-phosphate
  modified_base 12: mod_base = OTHER; note = 2'-O-methyluridine-3'-phosphate
  modified_base 13: mod_base = OTHER; note = 2'-O-methylcytidine-3'-phosphate
  modified_base 14: mod_base = OTHER; note = 2'-fluoroguanosine-3'-phosphate
  modified_base 15: mod_base = OTHER; note = 2'-O-methyladenosine-3'-phosphate
  modified_base 16: mod_base = OTHER; note = 2'-fluorocytidine-3'-phosphate
  modified_base 17: mod_base = OTHER; note = 2'-O-methyladenosine-3'-phosphate
  modified_base 18: mod_base = OTHER; note = 2'-O-methylguanosine-3'-phosphate
  modified_base 19: mod_base = OTHER; note = 2'-O-methylcytidine-3'-phosphate
  modified_base 20: mod_base = OTHER; note = 2'-O-methyladenosine-3'-phosphate
  modified_base 21: mod_base = OTHER; note = 2'-O-methylcytidine-3'-phosphorothioate
  modified_base 22: mod_base = OTHER; note = 2'-O-methyladenosine-3'-phosphorothioate
  modified_base 23: mod_base = OTHER; note = 2'-O-methyluridine-3'-phosphate
aaaaactcttgtcgacagcacat

SEQ ID NO: 5293 - RNA, 23 nt, synthetic construct
  source 1..23: mol_type = other RNA
  modified_base 1: mod_base = OTHER; note = 2'-O-methyladenosine-3'-phosphorothioate
  modified_base 2: mod_base = OTHER; note = 2'-fluorouridine -3'-phosphorothioate
  modified_base 3: mod_base = OTHER; note = 2'-O-methylcytidine-3'-phosphate
  modified_base 4: mod_base = OTHER; note = 2'-O-methyladenosine-3'-phosphate
  modified_base 5: mod_base = OTHER; note = 2'-O-methylcytidine-3'-phosphate
  modified_base 6: mod_base = OTHER; note = 2'-fluoroguanosine-3'-phosphate
  modified_base 7: mod_base = OTHER; note = 2'-O-methylguanosine-3'-phosphate
  modified_base 8: mod_base = OTHER; note = 2'-fluoroadenosine-3'-phosphate
  modified_base 9: mod_base = OTHER; note = 2'-fluoroadenosine-3'-phosphate
  modified_base 10: mod_base = OTHER; note = 2'-O-methylguanosine-3'-phosphate
  modified_base 11: mod_base = OTHER; note = 2'-O-methyluridine-3'-phosphate
  modified_base 12: mod_base = OTHER; note = 2'-O-methylcytidine-3'-phosphate
  modified_base 13: mod_base = OTHER; note = 2'-O-methylcytidine-3'-phosphate
  modified_base 14: mod_base = OTHER; note = 2'-fluoroadenosine-3'-phosphate
  modified_base 15: mod_base = OTHER; note = 2'-O-methylcytidine-3'-phosphate
  modified_base 16: mod_base = OTHER; note = 2'-fluoroadenosine-3'-phosphate
  modified_base 17: mod_base = OTHER; note = 2'-O-methyladenosine-3'-phosphate
  modified_base 18: mod_base = OTHER; note = 2'-O-methyladenosine-3'-phosphate
  modified_base 19: mod_base = OTHER; note = 2'-O-methyladenosine-3'-phosphate
  modified_base 20: mod_base = OTHER; note = 2'-O-methyladenosine-3'-phosphate
  modified_base 21: mod_base = OTHER; note = 2'-O-methyladenosine-3'-phosphorothioate
  modified_base 22: mod_base = OTHER; note = 2'-O-methylcytidine-3'-phosphorothioate
  modified_base 23: mod_base = OTHER; note = 2'-O-methyluridine-3'-phosphate
atcacggaagtccacaaaaaact

SEQ ID NO: 5294 - RNA, 23 nt, synthetic construct
  source 1..23: mol_type = other RNA
  modified_base 1: mod_base = OTHER; note = 2'-O-methyladenosine-3'-phosphorothioate
  modified_base 2: mod_base = OTHER; note = 2'-fluoroguanosine-3'-phosphorothioate
  modified_base 3: mod_base = OTHER; note = 2'-O-methylcytidine-3'-phosphate
  modified_base 4: mod_base = OTHER; note = 2'-O-methyluridine-3'-phosphate
  modified_base 5: mod_base = OTHER; note = 2'-O-methylguanosine-3'-phosphate
  modified_base 6: mod_base = OTHER; note = 2'-fluoroguanosine-3'-phosphate
  modified_base 7: mod_base = OTHER; note = 2'-O-methyladenosine-3'-phosphate
  modified_base 8: mod_base = OTHER; note = 2'-fluorouridine-3'-phosphate
  modified_base 9: mod_base = OTHER; note = 2'-fluoroguanosine-3'-phosphate
  modified_base 10: mod_base = OTHER; note = 2'-O-methyladenosine-3'-phosphate
  modified_base 11: mod_base = OTHER; note = 2'-O-methyluridine-3'-phosphate
  modified_base 12: mod_base = OTHER; note = 2'-O-methylcytidine-3'-phosphate
  modified_base 13: mod_base = OTHER; note = 2'-O-methylcytidine-3'-phosphate
  modified_base 14: mod_base = OTHER; note = 2'-fluoroadenosine-3'-phosphate
  modified_base 15: mod_base = OTHER; note = 2'-O-methylguanosine-3'-phosphate
  modified_base 16: mod_base = OTHER; note = 2'-fluorouridine-3'-phosphate
  modified_base 17: mod_base = OTHER; note = 2'-O-methylcytidine-3'-phosphate
  modified_base 18: mod_base = OTHER; note = 2'-O-methylguanosine-3'-phosphate
  modified_base 19: mod_base = OTHER; note = 2'-O-methyluridine-3'-phosphate
  modified_base 20: mod_base = OTHER; note = 2'-O-methylguanosine-3'-phosphate
  modified_base 21: mod_base = OTHER; note = 2'-O-methylcytidine-3'-phosphorothioate
  modified_base 22: mod_base = OTHER; note = 2'-O-methylcytidine-3'-phosphorothioate
  modified_base 23: mod_base = OTHER; note = 2'-O-methyladenosine-3'-phosphate
agctggatgatccagtcgtgcca

SEQ ID NO: 5295 - RNA, 23 nt, synthetic construct
  source 1..23: mol_type = other RNA
  modified_base 1: mod_base = OTHER; note = 2'-O-methyladenosine-3'-phosphorothioate
  modified_base 2: mod_base = OTHER; note = 2'-fluorocytidine-3'-phosphorothioate
  modified_base 3: mod_base = OTHER; note = 2'-O-methyluridine-3'-phosphate
  modified_base 4: mod_base = OTHER; note = 2'-O-methyladenosine-3'-phosphate
  modified_base 5: mod_base = OTHER; note = 2'-O-methyluridine-3'-phosphate
  modified_base 6: mod_base = OTHER; note = 2'-fluoroguanosine-3'-phosphate
  modified_base 7: mod_base = OTHER; note = 2'-O-methylcytidine-3'-phosphate
  modified_base 8: mod_base = OTHER; note = 2'-fluoroadenosine-3'-phosphate
  modified_base 9: mod_base = OTHER; note = 2'-fluoroguanosine-3'-phosphate
  modified_base 10: mod_base = OTHER; note = 2'-O-methyladenosine-3'-phosphate
  modified_base 11: mod_base = OTHER; note = 2'-O-methyladenosine-3'-phosphate
  modified_base 12: mod_base = OTHER; note = 2'-O-methylguanosine-3'-phosphate
  modified_base 13: mod_base = OTHER; note = 2'-O-methyluridine-3'-phosphate
  modified_base 14: mod_base = OTHER; note = 2'-fluorouridine-3'-phosphate
  modified_base 15: mod_base = OTHER; note = 2'-O-methylcytidine-3'-phosphate
  modified_base 16: mod_base = OTHER; note = 2'-fluoroadenosine-3'-phosphate
  modified_base 17: mod_base = OTHER; note = 2'-O-methyluridine-3'-phosphate
  modified_base 18: mod_base = OTHER; note = 2'-O-methylguanosine-3'-phosphate
  modified_base 19: mod_base = OTHER; note = 2'-O-methylguanosine-3'-phosphate
  modified_base 20: mod_base = OTHER; note = 2'-O-methylcytidine-3'-phosphate
  modified_base 21: mod_base = OTHER; note = 2'-O-methylguanosine-3'-phosphorothioate
  modified_base 22: mod_base = OTHER; note = 2'-O-methyluridine-3'-phosphorothioate
  modified_base 23: mod_base = OTHER; note = 2'-O-methyladenosine-3'-phosphate
actatgcagaagttcatggcgta

SEQ ID NO: 5296 - RNA, 23 nt, synthetic construct
  source 1..23: mol_type = other RNA
  modified_base 1: mod_base = OTHER; note = 2'-O-methyladenosine-3'-phosphorothioate
  modified_base 2: mod_base = OTHER; note = 2'-fluorocytidine-3'-phosphorothioate
  modified_base 3: mod_base = OTHER; note = 2'-O-methylcytidine-3'-phosphate
  modified_base 4: mod_base = OTHER; note = 2'-O-methyluridine-3'-phosphate
  modified_base 5: mod_base = OTHER; note = 2'-O-methylguanosine-3'-phosphate
  modified_base 6: mod_base = OTHER; note = 2'-fluorocytidine-3'-phosphate
  modified_base 7: mod_base = OTHER; note = 2'-O-methyluridine-3'-phosphate
  modified_base 8: mod_base = OTHER; note = 2'-fluoroadenosine-3'-phosphate
  modified_base 9: mod_base = OTHER; note = 2'-fluorouridine-3'-phosphate
  modified_base 10: mod_base = OTHER; note = 2'-O-methylguanosine-3'-phosphate
  modified_base 11: mod_base = OTHER; note = 2'-O-methyluridine-3'-phosphate
  modified_base 12: mod_base = OTHER; note = 2'-O-methylguanosine-3'-phosphate
  modified_base 13: mod_base = OTHER; note = 2'-O-methyluridine-3'-phosphate
  modified_base 14: mod_base = OTHER; note = 2'-fluoroadenosine-3'-phosphate
  modified_base 15: mod_base = OTHER; note = 2'-O-methylguanosine-3'-phosphate
  modified_base 16: mod_base = OTHER; note = 2'-fluorouridine-3'-phosphate
  modified_base 17: mod_base = OTHER; note = 2'-O-methylguanosine-3'-phosphate
  modified_base 18: mod_base = OTHER; note = 2'-O-methylguanosine-3'-phosphate
  modified_base 19: mod_base = OTHER; note = 2'-O-methylguanosine-3'-phosphate
  modified_base 20: mod_base = OTHER; note = 2'-O-methylcytidine-3'-phosphate
  modified_base 21: mod_base = OTHER; note = 2'-O-methyladenosine-3'-phosphorothioate
  modified_base 22: mod_base = OTHER; note = 2'-O-methylcytidine-3'-phosphorothioate
  modified_base 23: mod_base = OTHER; note = 2'-O-methyluridine-3'-phosphate
acctgctatgtgtagtgggcact

SEQ ID NO: 5297 - RNA, 23 nt, synthetic construct
  source 1..23: mol_type = other RNA
  modified_base 1: mod_base = OTHER; note = 2'-O-methyladenosine-3'-phosphorothioate
  modified_base 2: mod_base = OTHER; note = 2'-fluoroguanosine-3'-phosphorothioate
  modified_base 3: mod_base = OTHER; note = 2'-O-methylcytidine-3'-phosphate
  modified_base 4: mod_base = OTHER; note = 2'-O-methyladenosine-3'-phosphate
  modified_base 5: mod_base = OTHER; note = 2'-O-methylguanosine-3'-phosphate
  modified_base 6: mod_base = OTHER; note = 2'-fluorocytidine-3'-phosphate
  modified_base 7: mod_base = OTHER; note = 2'-O-methyladenosine-3'-phosphate
  modified_base 8: mod_base = OTHER; note = 2'-fluoroadenosine-3'-phosphate
  modified_base 9: mod_base = OTHER; note = 2'-fluorouridine-3'-phosphate
  modified_base 10: mod_base = OTHER; note = 2'-O-methyladenosine-3'-phosphate
  modified_base 11: mod_base = OTHER; note = 2'-O-methylcytidine-3'-phosphate
  modified_base 12: mod_base = OTHER; note = 2'-O-methylcytidine-3'-phosphate
  modified_base 13: mod_base = OTHER; note = 2'-O-methyladenosine-3'-phosphate
  modified_base 14: mod_base = OTHER; note = 2'-fluoroguanosine-3'-phosphate
  modified_base 15: mod_base = OTHER; note = 2'-O-methylguanosine-3'-phosphate
  modified_base 16: mod_base = OTHER; note = 2'-fluorocytidine-3'-phosphate
  modified_base 17: mod_base = OTHER; note = 2'-O-methyladenosine-3'-phosphate
  modified_base 18: mod_base = OTHER; note = 2'-O-methyluridine-3'-phosphate
  modified_base 19: mod_base = OTHER; note = 2'-O-methylguanosine-3'-phosphate
  modified_base 20: mod_base = OTHER; note = 2'-O-methylcytidine-3'-phosphate
  modified_base 21: mod_base = OTHER; note = 2'-O-methylcytidine-3'-phosphorothioate
  modified_base 22: mod_base = OTHER; note = 2'-O-methyluridine-3'-phosphorothioate
  modified_base 23: mod_base = OTHER; note = 2'-O-methylguanosine-3'-phosphate
agcagcaataccaggcatgcctg

SEQ ID NO: 5298 - RNA, 23 nt, synthetic construct
  source 1..23: mol_type = other RNA
  modified_base 1: mod_base = OTHER; note = 2'-O-methyladenosine-3'-phosphorothioate
  modified_base 2: mod_base = OTHER; note = 2'-fluorouridine -3'-phosphorothioate
  modified_base 3: mod_base = OTHER; note = 2'-O-methylguanosine-3'-phosphate
  modified_base 4: mod_base = OTHER; note = 2'-O-methylcytidine-3'-phosphate
  modified_base 5: mod_base = OTHER; note = 2'-O-methyladenosine-3'-phosphate
  modified_base 6: mod_base = OTHER; note = 2'-fluoroguanosine-3'-phosphate
  modified_base 7: mod_base = OTHER; note = 2'-O-methyluridine-3'-phosphate
  modified_base 8: mod_base = OTHER; note = 2'-fluoroguanosine-3'-phosphate
  modified_base 9: mod_base = OTHER; note = 2'-fluorouridine-3'-phosphate
  modified_base 10: mod_base = OTHER; note = 2'-O-methylguanosine-3'-phosphate
  modified_base 11: mod_base = OTHER; note = 2'-O-methyladenosine-3'-phosphate
  modified_base 12: mod_base = OTHER; note = 2'-O-methyladenosine-3'-phosphate
  modified_base 13: mod_base = OTHER; note = 2'-O-methyladenosine-3'-phosphate
  modified_base 14: mod_base = OTHER; note = 2'-fluoroguanosine-3'-phosphate
  modified_base 15: mod_base = OTHER; note = 2'-O-methylguanosine-3'-phosphate
  modified_base 16: mod_base = OTHER; note = 2'-fluoroadenosine-3'-phosphate
  modified_base 17: mod_base = OTHER; note = 2'-O-methylguanosine-3'-phosphate
  modified_base 18: mod_base = OTHER; note = 2'-O-methylguanosine-3'-phosphate
  modified_base 19: mod_base = OTHER; note = 2'-O-methylcytidine-3'-phosphate
  modified_base 20: mod_base = OTHER; note = 2'-O-methyladenosine-3'-phosphate
  modified_base 21: mod_base = OTHER; note = 2'-O-methylguanosine-3'-phosphorothioate
  modified_base 22: mod_base = OTHER; note = 2'-O-methylcytidine-3'-phosphorothioate
  modified_base 23: mod_base = OTHER; note = 2'-O-methyladenosine-3'-phosphate
atgcagtgtgaaaggaggcagca

SEQ ID NO: 5299 - RNA, 23 nt, synthetic construct
  source 1..23: mol_type = other RNA
  modified_base 1: mod_base = OTHER; note = 2'-O-methyladenosine-3'-phosphorothioate
  modified_base 2: mod_base = OTHER; note = 2'-fluorouridine -3'-phosphorothioate
  modified_base 3: mod_base = OTHER; note = 2'-O-methyluridine-3'-phosphate
  modified_base 4: mod_base = OTHER; note = 2'-O-methylguanosine-3'-phosphate
  modified_base 5: mod_base = OTHER; note = 2'-O-methyladenosine-3'-phosphate
  modified_base 6: mod_base = OTHER; note = 2'-fluoroguanosine-3'-phosphate
  modified_base 7: mod_base = OTHER; note = 2'-O-methyladenosine-3'-phosphate
  modified_base 8: mod_base = OTHER; note = 2'-fluoroadenosine-3'-phosphate
  modified_base 9: mod_base = OTHER; note = 2'-fluoroguanosine-3'-phosphate
  modified_base 10: mod_base = OTHER; note = 2'-O-methyladenosine-3'-phosphate
  modified_base 11: mod_base = OTHER; note = 2'-O-methyluridine-3'-phosphate
  modified_base 12: mod_base = OTHER; note = 2'-O-methyluridine-3'-phosphate
  modified_base 13: mod_base = OTHER; note = 2'-O-methylguanosine-3'-phosphate
  modified_base 14: mod_base = OTHER; note = 2'-fluoroadenosine-3'-phosphate
  modified_base 15: mod_base = OTHER; note = 2'-O-methylguanosine-3'-phosphate
  modified_base 16: mod_base = OTHER; note = 2'-fluorocytidine-3'-phosphate
  modified_base 17: mod_base = OTHER; note = 2'-O-methyladenosine-3'-phosphate
  modified_base 18: mod_base = OTHER; note = 2'-O-methylcytidine-3'-phosphate
  modified_base 19: mod_base = OTHER; note = 2'-O-methyluridine-3'-phosphate
  modified_base 20: mod_base = OTHER; note = 2'-O-methylguanosine-3'-phosphate
  modified_base 21: mod_base = OTHER; note = 2'-O-methylcytidine-3'-phosphorothioate
  modified_base 22: mod_base = OTHER; note = 2'-O-methyladenosine-3'-phosphorothioate
  modified_base 23: mod_base = OTHER; note = 2'-O-methylguanosine-3'-phosphate
attgagaagattgagcactgcag

SEQ ID NO: 5300 - RNA, 23 nt, synthetic construct
  source 1..23: mol_type = other RNA
  modified_base 1: mod_base = OTHER; note = 2'-O-methyladenosine-3'-phosphorothioate
  modified_base 2: mod_base = OTHER; note = 2'-fluorocytidine-3'-phosphorothioate
  modified_base 3: mod_base = OTHER; note = 2'-O-methylcytidine-3'-phosphate
  modified_base 4: mod_base = OTHER; note = 2'-O-methyluridine-3'-phosphate
  modified_base 5: mod_base = OTHER; note = 2'-O-methylguanosine-3'-phosphate
  modified_base 6: mod_base = OTHER; note = 2'-fluorocytidine-3'-phosphate
  modified_base 7: mod_base = OTHER; note = 2'-O-methyladenosine-3'-phosphate
  modified_base 8: mod_base = OTHER; note = 2'-fluoroguanosine-3'-phosphate
  modified_base 9: mod_base = OTHER; note = 2'-fluorocytidine-3'-phosphate
  modified_base 10: mod_base = OTHER; note = 2'-O-methyluridine-3'-phosphate
  modified_base 11: mod_base = OTHER; note = 2'-O-methylguanosine-3'-phosphate
  modified_base 12: mod_base = OTHER; note = 2'-O-methyluridine-3'-phosphate
  modified_base 13: mod_base = OTHER; note = 2'-O-methylguanosine-3'-phosphate
  modified_base 14: mod_base = OTHER; note = 2'-fluorouridine-3'-phosphate
  modified_base 15: mod_base = OTHER; note = 2'-O-methyluridine-3'-phosphate
  modified_base 16: mod_base = OTHER; note = 2'-fluoroguanosine-3'-phosphate
  modified_base 17: mod_base = OTHER; note = 2'-O-methylguanosine-3'-phosphate
  modified_base 18: mod_base = OTHER; note = 2'-O-methylcytidine-3'-phosphate
  modified_base 19: mod_base = OTHER; note = 2'-O-methylcytidine-3'-phosphate
  modified_base 20: mod_base = OTHER; note = 2'-O-methyluridine-3'-phosphate
  modified_base 21: mod_base = OTHER; note = 2'-O-methyluridine-3'-phosphorothioate
  modified_base 22: mod_base = OTHER; note = 2'-O-methylguanosine-3'-phosphorothioate
  modified_base 23: mod_base = OTHER; note = 2'-O-methyladenosine-3'-phosphate
acctgcagctgtgttggccttga

SEQ ID NO: 5301 - RNA, 23 nt, synthetic construct
  source 1..23: mol_type = other RNA
  modified_base 1: mod_base = OTHER; note = 2'-O-methyladenosine-3'-phosphorothioate
  modified_base 2: mod_base = OTHER; note = 2'-fluorocytidine-3'-phosphorothioate
  modified_base 3: mod_base = OTHER; note = 2'-O-methylguanosine-3'-phosphate
  modified_base 4: mod_base = OTHER; note = 2'-O-methyluridine-3'-phosphate
  modified_base 5: mod_base = OTHER; note = 2'-O-methylguanosine-3'-phosphate
  modified_base 6: mod_base = OTHER; note = 2'-fluoroguanosine-3'-phosphate
  modified_base 7: mod_base = OTHER; note = 2'-O-methylguanosine-3'-phosphate
  modified_base 8: mod_base = OTHER; note = 2'-fluorouridine-3'-phosphate
  modified_base 9: mod_base = OTHER; note = 2'-fluoroadenosine-3'-phosphate
  modified_base 10: mod_base = OTHER; note = 2'-O-methylcytidine-3'-phosphate
  modified_base 11: mod_base = OTHER; note = 2'-O-methyladenosine-3'-phosphate
  modified_base 12: mod_base = OTHER; note = 2'-O-methylcytidine-3'-phosphate
  modified_base 13: mod_base = OTHER; note = 2'-O-methyladenosine-3'-phosphate
  modified_base 14: mod_base = OTHER; note = 2'-fluoroguanosine-3'-phosphate
  modified_base 15: mod_base = OTHER; note = 2'-O-methylcytidine-3'-phosphate
  modified_base 16: mod_base = OTHER; note = 2'-fluoroadenosine-3'-phosphate
  modified_base 17: mod_base = OTHER; note = 2'-O-methyluridine-3'-phosphate
  modified_base 18: mod_base = OTHER; note = 2'-O-methylguanosine-3'-phosphate
  modified_base 19: mod_base = OTHER; note = 2'-O-methyladenosine-3'-phosphate
  modified_base 20: mod_base = OTHER; note = 2'-O-methylguanosine-3'-phosphate
  modified_base 21: mod_base = OTHER; note = 2'-O-methylcytidine-3'-phosphorothioate
  modified_base 22: mod_base = OTHER; note = 2'-O-methylcytidine-3'-phosphorothioate
  modified_base 23: mod_base = OTHER; note = 2'-O-methylcytidine-3'-phosphate
acgtgggtacacagcatgagccc

SEQ ID NO: 5302 - RNA, 23 nt, synthetic construct
  source 1..23: mol_type = other RNA
  modified_base 1: mod_base = OTHER; note = 2'-O-methyladenosine-3'-phosphorothioate
  modified_base 2: mod_base = OTHER; note = 2'-fluorouridine -3'-phosphorothioate
  modified_base 3: mod_base = OTHER; note = 2'-O-methylguanosine-3'-phosphate
  modified_base 4: mod_base = OTHER; note = 2'-O-methyluridine-3'-phosphate
  modified_base 5: mod_base = OTHER; note = 2'-O-methylcytidine-3'-phosphate
  modified_base 6: mod_base = OTHER; note = 2'-fluoroadenosine-3'-phosphate
  modified_base 7: mod_base = OTHER; note = 2'-O-methyluridine-3'-phosphate
  modified_base 8: mod_base = OTHER; note = 2'-fluoroadenosine-3'-phosphate
  modified_base 9: mod_base = OTHER; note = 2'-fluoroadenosine-3'-phosphate
  modified_base 10: mod_base = OTHER; note = 2'-O-methyluridine-3'-phosphate
  modified_base 11: mod_base = OTHER; note = 2'-O-methyladenosine-3'-phosphate
  modified_base 12: mod_base = OTHER; note = 2'-O-methylguanosine-3'-phosphate
  modified_base 13: mod_base = OTHER; note = 2'-O-methyladenosine-3'-phosphate
  modified_base 14: mod_base = OTHER; note = 2'-fluoroguanosine-3'-phosphate
  modified_base 15: mod_base = OTHER; note = 2'-O-methylcytidine-3'-phosphate
  modified_base 16: mod_base = OTHER; note = 2'-fluoroadenosine-3'-phosphate
  modified_base 17: mod_base = OTHER; note = 2'-O-methylguanosine-3'-phosphate
  modified_base 18: mod_base = OTHER; note = 2'-O-methyladenosine-3'-phosphate
  modified_base 19: mod_base = OTHER; note = 2'-O-methylguanosine-3'-phosphate
  modified_base 20: mod_base = OTHER; note = 2'-O-methyladenosine-3'-phosphate
  modified_base 21: mod_base = OTHER; note = 2'-O-methylcytidine-3'-phosphorothioate
  modified_base 22: mod_base = OTHER; note = 2'-O-methyladenosine-3'-phosphorothioate
  modified_base 23: mod_base = OTHER; note = 2'-O-methylguanosine-3'-phosphate
atgtcataatagagcagagacag

SEQ ID NO: 5303 - RNA, 23 nt, synthetic construct
  source 1..23: mol_type = other RNA
  modified_base 1: mod_base = OTHER; note = 2'-O-methyladenosine-3'-phosphorothioate
  modified_base 2: mod_base = OTHER; note = 2'-fluoroadenosine-3'-phosphorothioate
  modified_base 3: mod_base = OTHER; note = 2'-O-methylcytidine-3'-phosphate
  modified_base 4: mod_base = OTHER; note = 2'-O-methyladenosine-3'-phosphate
  modified_base 5: mod_base = OTHER; note = 2'-O-methyladenosine-3'-phosphate
  modified_base 6: mod_base = OTHER; note = 2'-fluorouridine-3'-phosphate
  modified_base 7: mod_base = OTHER; note = 2'-O-methylguanosine-3'-phosphate
  modified_base 8: mod_base = OTHER; note = 2'-fluorouridine-3'-phosphate
  modified_base 9: mod_base = OTHER; note = 2'-fluorouridine-3'-phosphate
  modified_base 10: mod_base = OTHER; note = 2'-O-methylguanosine-3'-phosphate
  modified_base 11: mod_base = OTHER; note = 2'-O-methylcytidine-3'-phosphate
  modified_base 12: mod_base = OTHER; note = 2'-O-methyluridine-3'-phosphate
  modified_base 13: mod_base = OTHER; note = 2'-O-methylguanosine-3'-phosphate
  modified_base 14: mod_base = OTHER; note = 2'-fluorouridine-3'-phosphate
  modified_base 15: mod_base = OTHER; note = 2'-O-methylcytidine-3'-phosphate
  modified_base 16: mod_base = OTHER; note = 2'-fluorocytidine-3'-phosphate
  modified_base 17: mod_base = OTHER; note = 2'-O-methylcytidine-3'-phosphate
  modified_base 18: mod_base = OTHER; note = 2'-O-methyluridine-3'-phosphate
  modified_base 19: mod_base = OTHER; note = 2'-O-methylguanosine-3'-phosphate
  modified_base 20: mod_base = OTHER; note = 2'-O-methyluridine-3'-phosphate
  modified_base 21: mod_base = OTHER; note = 2'-O-methylcytidine-3'-phosphorothioate
  modified_base 22: mod_base = OTHER; note = 2'-O-methyladenosine-3'-phosphorothioate
  modified_base 23: mod_base = OTHER; note = 2'-O-methyluridine-3'-phosphate
aacaatgttgctgtccctgtcat

SEQ ID NO: 5304 - RNA, 23 nt, synthetic construct
  source 1..23: mol_type = other RNA
  modified_base 1: mod_base = OTHER; note = 2'-O-methyladenosine-3'-phosphorothioate
  modified_base 2: mod_base = OTHER; note = 2'-fluorocytidine-3'-phosphorothioate
  modified_base 3: mod_base = OTHER; note = 2'-O-methyladenosine-3'-phosphate
  modified_base 4: mod_base = OTHER; note = 2'-O-methylguanosine-3'-phosphate
  modified_base 5: mod_base = OTHER; note = 2'-O-methylguanosine-3'-phosphate
  modified_base 6: mod_base = OTHER; note = 2'-fluorouridine-3'-phosphate
  modified_base 7: mod_base = OTHER; note = 2'-O-methyladenosine-3'-phosphate
  modified_base 8: mod_base = OTHER; note = 2'-fluorouridine-3'-phosphate
  modified_base 9: mod_base = OTHER; note = 2'-fluoroguanosine-3'-phosphate
  modified_base 10: mod_base = OTHER; note = 2'-O-methyluridine-3'-phosphate
  modified_base 11: mod_base = OTHER; note = 2'-O-methylcytidine-3'-phosphate
  modified_base 12: mod_base = OTHER; note = 2'-O-methyladenosine-3'-phosphate
  modified_base 13: mod_base = OTHER; note = 2'-O-methylguanosine-3'-phosphate
  modified_base 14: mod_base = OTHER; note = 2'-fluorouridine-3'-phosphate
  modified_base 15: mod_base = OTHER; note = 2'-O-methylcytidine-3'-phosphate
  modified_base 16: mod_base = OTHER; note = 2'-fluorouridine-3'-phosphate
  modified_base 17: mod_base = OTHER; note = 2'-O-methyluridine-3'-phosphate
  modified_base 18: mod_base = OTHER; note = 2'-O-methylguanosine-3'-phosphate
  modified_base 19: mod_base = OTHER; note = 2'-O-methyladenosine-3'-phosphate
  modified_base 20: mod_base = OTHER; note = 2'-O-methylcytidine-3'-phosphate
  modified_base 21: mod_base = OTHER; note = 2'-O-methyladenosine-3'-phosphorothioate
  modified_base 22: mod_base = OTHER; note = 2'-O-methyladenosine-3'-phosphorothioate
  modified_base 23: mod_base = OTHER; note = 2'-O-methyluridine-3'-phosphate
acaggtatgtcagtcttgacaat

SEQ ID NO: 5305 - RNA, 23 nt, synthetic construct
  source 1..23: mol_type = other RNA
  modified_base 1: mod_base = OTHER; note = 2'-O-methyladenosine-3'-phosphorothioate
  modified_base 2: mod_base = OTHER; note = 2'-fluoroguanosine-3'-phosphorothioate
  modified_base 3: mod_base = OTHER; note = 2'-O-methylcytidine-3'-phosphate
  modified_base 4: mod_base = OTHER; note = 2'-O-methylcytidine-3'-phosphate
  modified_base 5: mod_base = OTHER; note = 2'-O-methyluridine-3'-phosphate
  modified_base 6: mod_base = OTHER; note = 2'-fluorocytidine-3'-phosphate
  modified_base 7: mod_base = OTHER; note = 2'-O-methyluridine-3'-phosphate
  modified_base 8: mod_base = OTHER; note = 2'-fluoroadenosine-3'-phosphate
  modified_base 9: mod_base = OTHER; note = 2'-fluorocytidine-3'-phosphate
  modified_base 10: mod_base = OTHER; note = 2'-O-methyluridine-3'-phosphate
  modified_base 11: mod_base = OTHER; note = 2'-O-methyladenosine-3'-phosphate
  modified_base 12: mod_base = OTHER; note = 2'-O-methylcytidine-3'-phosphate
  modified_base 13: mod_base = OTHER; note = 2'-O-methylcytidine-3'-phosphate
  modified_base 14: mod_base = OTHER; note = 2'-fluoroadenosine-3'-phosphate
  modified_base 15: mod_base = OTHER; note = 2'-O-methyluridine-3'-phosphate
  modified_base 16: mod_base = OTHER; note = 2'-fluoroguanosine-3'-phosphate
  modified_base 17: mod_base = OTHER; note = 2'-O-methyluridine-3'-phosphate
  modified_base 18: mod_base = OTHER; note = 2'-O-methylcytidine-3'-phosphate
  modified_base 19: mod_base = OTHER; note = 2'-O-methyladenosine-3'-phosphate
  modified_base 20: mod_base = OTHER; note = 2'-O-methylguanosine-3'-phosphate
  modified_base 21: mod_base = OTHER; note = 2'-O-methylguanosine-3'-phosphorothioate
  modified_base 22: mod_base = OTHER; note = 2'-O-methyluridine-3'-phosphorothioate
  modified_base 23: mod_base = OTHER; note = 2'-O-methyladenosine-3'-phosphate
agcctctactaccatgtcaggta

SEQ ID NO: 5306 - RNA, 23 nt, synthetic construct
  source 1..23: mol_type = other RNA
  modified_base 1: mod_base = OTHER; note = 2'-O-methyladenosine-3'-phosphorothioate
  modified_base 2: mod_base = OTHER; note = 2'-fluoroadenosine-3'-phosphorothioate
  modified_base 3: mod_base = OTHER; note = 2'-O-methyluridine-3'-phosphate
  modified_base 4: mod_base = OTHER; note = 2'-O-methyladenosine-3'-phosphate
  modified_base 5: mod_base = OTHER; note = 2'-O-methylcytidine-3'-phosphate
  modified_base 6: mod_base = OTHER; note = 2'-fluorocytidine-3'-phosphate
  modified_base 7: mod_base = OTHER; note = 2'-O-methyladenosine-3'-phosphate
  modified_base 8: mod_base = OTHER; note = 2'-fluorocytidine-3'-phosphate
  modified_base 9: mod_base = OTHER; note = 2'-fluoroadenosine-3'-phosphate
  modified_base 10: mod_base = OTHER; note = 2'-O-methylcytidine-3'-phosphate
  modified_base 11: mod_base = OTHER; note = 2'-O-methyladenosine-3'-phosphate
  modified_base 12: mod_base = OTHER; note = 2'-O-methyluridine-3'-phosphate
  modified_base 13: mod_base = OTHER; note = 2'-O-methyladenosine-3'-phosphate
  modified_base 14: mod_base = OTHER; note = 2'-fluoroguanosine-3'-phosphate
  modified_base 15: mod_base = OTHER; note = 2'-O-methyladenosine-3'-phosphate
  modified_base 16: mod_base = OTHER; note = 2'-fluorocytidine-3'-phosphate
  modified_base 17: mod_base = OTHER; note = 2'-O-methyluridine-3'-phosphate
  modified_base 18: mod_base = OTHER; note = 2'-O-methyladenosine-3'-phosphate
  modified_base 19: mod_base = OTHER; note = 2'-O-methyladenosine-3'-phosphate
  modified_base 20: mod_base = OTHER; note = 2'-O-methylcytidine-3'-phosphate
  modified_base 21: mod_base = OTHER; note = 2'-O-methyluridine-3'-phosphorothioate
  modified_base 22: mod_base = OTHER; note = 2'-O-methylguanosine-3'-phosphorothioate
  modified_base 23: mod_base = OTHER; note = 2'-O-methylcytidine-3'-phosphate
aataccacacatagactaactgc

SEQ ID NO: 5307 - RNA, 23 nt, synthetic construct
  source 1..23: mol_type = other RNA
  modified_base 1: mod_base = OTHER; note = 2'-O-methyladenosine-3'-phosphorothioate
  modified_base 2: mod_base = OTHER; note = 2'-fluoroguanosine-3'-phosphorothioate
  modified_base 3: mod_base = OTHER; note = 2'-O-methyluridine-3'-phosphate
  modified_base 4: mod_base = OTHER; note = 2'-O-methyluridine-3'-phosphate
  modified_base 5: mod_base = OTHER; note = 2'-O-methyluridine-3'-phosphate
  modified_base 6: mod_base = OTHER; note = 2'-fluorouridine-3'-phosphate
  modified_base 7: mod_base = OTHER; note = 2'-O-methylcytidine-3'-phosphate
  modified_base 8: mod_base = OTHER; note = 2'-fluorocytidine-3'-phosphate
  modified_base 9: mod_base = OTHER; note = 2'-fluorocytidine-3'-phosphate
  modified_base 10: mod_base = OTHER; note = 2'-O-methyladenosine-3'-phosphate
  modified_base 11: mod_base = OTHER; note = 2'-O-methyluridine-3'-phosphate
  modified_base 12: mod_base = OTHER; note = 2'-O-methylguanosine-3'-phosphate
  modified_base 13: mod_base = OTHER; note = 2'-O-methylcytidine-3'-phosphate
  modified_base 14: mod_base = OTHER; note = 2'-fluoroadenosine-3'-phosphate
  modified_base 15: mod_base = OTHER; note = 2'-O-methyladenosine-3'-phosphate
  modified_base 16: mod_base = OTHER; note = 2'-fluorocytidine-3'-phosphate
  modified_base 17: mod_base = OTHER; note = 2'-O-methylcytidine-3'-phosphate
  modified_base 18: mod_base = OTHER; note = 2'-O-methyluridine-3'-phosphate
  modified_base 19: mod_base = OTHER; note = 2'-O-methyluridine-3'-phosphate
  modified_base 20: mod_base = OTHER; note = 2'-O-methylguanosine-3'-phosphate
  modified_base 21: mod_base = OTHER; note = 2'-O-methylguanosine-3'-phosphorothioate
  modified_base 22: mod_base = OTHER; note = 2'-O-methylguanosine-3'-phosphorothioate
  modified_base 23: mod_base = OTHER; note = 2'-O-methylcytidine-3'-phosphate
agttttcccatgcaaccttgggc

SEQ ID NO: 5308 - RNA, 23 nt, synthetic construct
  source 1..23: mol_type = other RNA
  modified_base 1: mod_base = OTHER; note = 2'-O-methyladenosine-3'-phosphorothioate
  modified_base 2: mod_base = OTHER; note = 2'-fluorouridine -3'-phosphorothioate
  modified_base 3: mod_base = OTHER; note = 2'-O-methylcytidine-3'-phosphate
  modified_base 4: mod_base = OTHER; note = 2'-O-methyladenosine-3'-phosphate
  modified_base 5: mod_base = OTHER; note = 2'-O-methyladenosine-3'-phosphate
  modified_base 6: mod_base = OTHER; note = 2'-fluoroguanosine-3'-phosphate
  modified_base 7: mod_base = OTHER; note = 2'-O-methylguanosine-3'-phosphate
  modified_base 8: mod_base = OTHER; note = 2'-fluoroadenosine-3'-phosphate
  modified_base 9: mod_base = OTHER; note = 2'-fluoroadenosine-3'-phosphate
  modified_base 10: mod_base = OTHER; note = 2'-O-methylguanosine-3'-phosphate
  modified_base 11: mod_base = OTHER; note = 2'-O-methyluridine-3'-phosphate
  modified_base 12: mod_base = OTHER; note = 2'-O-methylguanosine-3'-phosphate
  modified_base 13: mod_base = OTHER; note = 2'-O-methylcytidine-3'-phosphate
  modified_base 14: mod_base = OTHER; note = 2'-fluoroadenosine-3'-phosphate
  modified_base 15: mod_base = OTHER; note = 2'-O-methylcytidine-3'-phosphate
  modified_base 16: mod_base = OTHER; note = 2'-fluorouridine-3'-phosphate
  modified_base 17: mod_base = OTHER; note = 2'-O-methyluridine-3'-phosphate
  modified_base 18: mod_base = OTHER; note = 2'-O-methylcytidine-3'-phosphate
  modified_base 19: mod_base = OTHER; note = 2'-O-methyluridine-3'-phosphate
  modified_base 20: mod_base = OTHER; note = 2'-O-methylguanosine-3'-phosphate
  modified_base 21: mod_base = OTHER; note = 2'-O-methyluridine-3'-phosphorothioate
  modified_base 22: mod_base = OTHER; note = 2'-O-methyladenosine-3'-phosphorothioate
  modified_base 23: mod_base = OTHER; note = 2'-O-methylguanosine-3'-phosphate
atcaaggaagtgcacttctgtag

SEQ ID NO: 5309 - RNA, 23 nt, synthetic construct
  source 1..23: mol_type = other RNA
  modified_base 1: mod_base = OTHER; note = 2'-O-methyladenosine-3'-phosphorothioate
  modified_base 2: mod_base = OTHER; note = 2'-fluoroadenosine-3'-phosphorothioate
  modified_base 3: mod_base = OTHER; note = 2'-O-methyluridine-3'-phosphate
  modified_base 4: mod_base = OTHER; note = 2'-O-methylguanosine-3'-phosphate
  modified_base 5: mod_base = OTHER; note = 2'-O-methyladenosine-3'-phosphate
  modified_base 6: mod_base = OTHER; note = 2'-fluoroguanosine-3'-phosphate
  modified_base 7: mod_base = OTHER; note = 2'-O-methylguanosine-3'-phosphate
  modified_base 8: mod_base = OTHER; note = 2'-fluorouridine-3'-phosphate
  modified_base 9: mod_base = OTHER; note = 2'-fluorocytidine-3'-phosphate
  modified_base 10: mod_base = OTHER; note = 2'-O-methyladenosine-3'-phosphate
  modified_base 11: mod_base = OTHER; note = 2'-O-methyluridine-3'-phosphate
  modified_base 12: mod_base = OTHER; note = 2'-O-methyluridine-3'-phosphate
  modified_base 13: mod_base = OTHER; note = 2'-O-methylcytidine-3'-phosphate
  modified_base 14: mod_base = OTHER; note = 2'-fluorocytidine-3'-phosphate
  modified_base 15: mod_base = OTHER; note = 2'-O-methylcytidine-3'-phosphate
  modified_base 16: mod_base = OTHER; note = 2'-fluorouridine-3'-phosphate
  modified_base 17: mod_base = OTHER; note = 2'-O-methylcytidine-3'-phosphate
  modified_base 18: mod_base = OTHER; note = 2'-O-methylcytidine-3'-phosphate
  modified_base 19: mod_base = OTHER; note = 2'-O-methyluridine-3'-phosphate
  modified_base 20: mod_base = OTHER; note = 2'-O-methylcytidine-3'-phosphate
  modified_base 21: mod_base = OTHER; note = 2'-O-methyluridine-3'-phosphorothioate
  modified_base 22: mod_base = OTHER; note = 2'-O-methylcytidine-3'-phosphorothioate
  modified_base 23: mod_base = OTHER; note = 2'-O-methyladenosine-3'-phosphate
aatgaggtcattccctcctctca

SEQ ID NO: 5310 - RNA, 23 nt, synthetic construct
  source 1..23: mol_type = other RNA
  modified_base 1: mod_base = OTHER; note = 2'-O-methyladenosine-3'-phosphorothioate
  modified_base 2: mod_base = OTHER; note = 2'-fluoroadenosine-3'-phosphorothioate
  modified_base 3: mod_base = OTHER; note = 2'-O-methylcytidine-3'-phosphate
  modified_base 4: mod_base = OTHER; note = 2'-O-methyladenosine-3'-phosphate
  modified_base 5: mod_base = OTHER; note = 2'-O-methyluridine-3'-phosphate
  modified_base 6: mod_base = OTHER; note = 2'-fluorouridine-3'-phosphate
  modified_base 7: mod_base = OTHER; note = 2'-O-methylcytidine-3'-phosphate
  modified_base 8: mod_base = OTHER; note = 2'-fluorouridine-3'-phosphate
  modified_base 9: mod_base = OTHER; note = 2'-fluoroguanosine-3'-phosphate
  modified_base 10: mod_base = OTHER; note = 2'-O-methylguanosine-3'-phosphate
  modified_base 11: mod_base = OTHER; note = 2'-O-methyladenosine-3'-phosphate
  modified_base 12: mod_base = OTHER; note = 2'-O-methylcytidine-3'-phosphate
  modified_base 13: mod_base = OTHER; note = 2'-O-methyladenosine-3'-phosphate
  modified_base 14: mod_base = OTHER; note = 2'-fluoroguanosine-3'-phosphate
  modified_base 15: mod_base = OTHER; note = 2'-O-methyladenosine-3'-phosphate
  modified_base 16: mod_base = OTHER; note = 2'-fluoroguanosine-3'-phosphate
  modified_base 17: mod_base = OTHER; note = 2'-O-methyladenosine-3'-phosphate
  modified_base 18: mod_base = OTHER; note = 2'-O-methyladenosine-3'-phosphate
  modified_base 19: mod_base = OTHER; note = 2'-O-methyluridine-3'-phosphate
  modified_base 20: mod_base = OTHER; note = 2'-O-methylguanosine-3'-phosphate
  modified_base 21: mod_base = OTHER; note = 2'-O-methyladenosine-3'-phosphorothioate
  modified_base 22: mod_base = OTHER; note = 2'-O-methylguanosine-3'-phosphorothioate
  modified_base 23: mod_base = OTHER; note = 2'-O-methylguanosine-3'-phosphate
aacattctggacagagaatgagg

SEQ ID NO: 5311 - RNA, 23 nt, synthetic construct
  source 1..23: mol_type = other RNA
  modified_base 1: mod_base = OTHER; note = 2'-O-methyladenosine-3'-phosphorothioate
  modified_base 2: mod_base = OTHER; note = 2'-fluorocytidine-3'-phosphorothioate
  modified_base 3: mod_base = OTHER; note = 2'-O-methyluridine-3'-phosphate
  modified_base 4: mod_base = OTHER; note = 2'-O-methylcytidine-3'-phosphate
  modified_base 5: mod_base = OTHER; note = 2'-O-methyladenosine-3'-phosphate
  modified_base 6: mod_base = OTHER; note = 2'-fluoroguanosine-3'-phosphate
  modified_base 7: mod_base = OTHER; note = 2'-O-methylguanosine-3'-phosphate
  modified_base 8: mod_base = OTHER; note = 2'-fluoroadenosine-3'-phosphate
  modified_base 9: mod_base = OTHER; note = 2'-fluoroadenosine-3'-phosphate
  modified_base 10: mod_base = OTHER; note = 2'-O-methylguanosine-3'-phosphate
  modified_base 11: mod_base = OTHER; note = 2'-O-methyladenosine-3'-phosphate
  modified_base 12: mod_base = OTHER; note = 2'-O-methylguanosine-3'-phosphate
  modified_base 13: mod_base = OTHER; note = 2'-O-methylguanosine-3'-phosphate
  modified_base 14: mod_base = OTHER; note = 2'-fluoroguanosine-3'-phosphate
  modified_base 15: mod_base = OTHER; note = 2'-O-methyladenosine-3'-phosphate
  modified_base 16: mod_base = OTHER; note = 2'-fluoroguanosine-3'-phosphate
  modified_base 17: mod_base = OTHER; note = 2'-O-methyluridine-3'-phosphate
  modified_base 18: mod_base = OTHER; note = 2'-O-methylcytidine-3'-phosphate
  modified_base 19: mod_base = OTHER; note = 2'-O-methylcytidine-3'-phosphate
  modified_base 20: mod_base = OTHER; note = 2'-O-methyladenosine-3'-phosphate
  modified_base 21: mod_base = OTHER; note = 2'-O-methylcytidine-3'-phosphorothioate
  modified_base 22: mod_base = OTHER; note = 2'-O-methyladenosine-3'-phosphorothioate
  modified_base 23: mod_base = OTHER; note = 2'-O-methyluridine-3'-phosphate
actcaggaagagggagtccacat

SEQ ID NO: 5312 - RNA, 23 nt, synthetic construct
  source 1..23: mol_type = other RNA
  modified_base 1: mod_base = OTHER; note = 2'-O-methyladenosine-3'-phosphorothioate
  modified_base 2: mod_base = OTHER; note = 2'-fluoroguanosine-3'-phosphorothioate
  modified_base 3: mod_base = OTHER; note = 2'-O-methyluridine-3'-phosphate
  modified_base 4: mod_base = OTHER; note = 2'-O-methyladenosine-3'-phosphate
  modified_base 5: mod_base = OTHER; note = 2'-O-methyladenosine-3'-phosphate
  modified_base 6: mod_base = OTHER; note = 2'-fluorouridine-3'-phosphate
  modified_base 7: mod_base = OTHER; note = 2'-O-methyluridine-3'-phosphate
  modified_base 8: mod_base = OTHER; note = 2'-fluorouridine-3'-phosphate
  modified_base 9: mod_base = OTHER; note = 2'-fluorocytidine-3'-phosphate
  modified_base 10: mod_base = OTHER; note = 2'-O-methylcytidine-3'-phosphate
  modified_base 11: mod_base = OTHER; note = 2'-O-methyladenosine-3'-phosphate
  modified_base 12: mod_base = OTHER; note = 2'-O-methyluridine-3'-phosphate
  modified_base 13: mod_base = OTHER; note = 2'-O-methyladenosine-3'-phosphate
  modified_base 14: mod_base = OTHER; note = 2'-fluoroadenosine-3'-phosphate
  modified_base 15: mod_base = OTHER; note = 2'-O-methylguanosine-3'-phosphate
  modified_base 16: mod_base = OTHER; note = 2'-fluoroadenosine-3'-phosphate
  modified_base 17: mod_base = OTHER; note = 2'-O-methyluridine-3'-phosphate
  modified_base 18: mod_base = OTHER; note = 2'-O-methylguanosine-3'-phosphate
  modified_base 19: mod_base = OTHER; note = 2'-O-methylcytidine-3'-phosphate
  modified_base 20: mod_base = OTHER; note = 2'-O-methyluridine-3'-phosphate
  modified_base 21: mod_base = OTHER; note = 2'-O-methylcytidine-3'-phosphorothioate
  modified_base 22: mod_base = OTHER; note = 2'-O-methyladenosine-3'-phosphorothioate
  modified_base 23: mod_base = OTHER; note = 2'-O-methylguanosine-3'-phosphate
agtaatttccataagatgctcag

SEQ ID NO: 5313 - RNA, 23 nt, synthetic construct
  source 1..23: mol_type = other RNA
  modified_base 1: mod_base = OTHER; note = 2'-O-methyladenosine-3'-phosphorothioate
  modified_base 2: mod_base = OTHER; note = 2'-fluoroguanosine-3'-phosphorothioate
  modified_base 3: mod_base = OTHER; note = 2'-O-methyluridine-3'-phosphate
  modified_base 4: mod_base = OTHER; note = 2'-O-methyluridine-3'-phosphate
  modified_base 5: mod_base = OTHER; note = 2'-O-methyluridine-3'-phosphate
  modified_base 6: mod_base = OTHER; note = 2'-fluorocytidine-3'-phosphate
  modified_base 7: mod_base = OTHER; note = 2'-O-methyluridine-3'-phosphate
  modified_base 8: mod_base = OTHER; note = 2'-fluorouridine-3'-phosphate
  modified_base 9: mod_base = OTHER; note = 2'-fluorocytidine-3'-phosphate
  modified_base 10: mod_base = OTHER; note = 2'-O-methyladenosine-3'-phosphate
  modified_base 11: mod_base = OTHER; note = 2'-O-methyladenosine-3'-phosphate
  modified_base 12: mod_base = OTHER; note = 2'-O-methylguanosine-3'-phosphate
  modified_base 13: mod_base = OTHER; note = 2'-O-methyluridine-3'-phosphate
  modified_base 14: mod_base = OTHER; note = 2'-fluorocytidine-3'-phosphate
  modified_base 15: mod_base = OTHER; note = 2'-O-methyladenosine-3'-phosphate
  modified_base 16: mod_base = OTHER; note = 2'-fluoroadenosine-3'-phosphate
  modified_base 17: mod_base = OTHER; note = 2'-O-methyladenosine-3'-phosphate
  modified_base 18: mod_base = OTHER; note = 2'-O-methylguanosine-3'-phosphate
  modified_base 19: mod_base = OTHER; note = 2'-O-methylguanosine-3'-phosphate
  modified_base 20: mod_base = OTHER; note = 2'-O-methyluridine-3'-phosphate
  modified_base 21: mod_base = OTHER; note = 2'-O-methylguanosine-3'-phosphorothioate
  modified_base 22: mod_base = OTHER; note = 2'-O-methylguanosine-3'-phosphorothioate
  modified_base 23: mod_base = OTHER; note = 2'-O-methylguanosine-3'-phosphate
agtttcttcaagtcaaaggtggg

SEQ ID NO: 5314 - RNA, 23 nt, synthetic construct
  source 1..23: mol_type = other RNA
  modified_base 1: mod_base = OTHER; note = 2'-O-methyladenosine-3'-phosphorothioate
  modified_base 2: mod_base = OTHER; note = 2'-fluoroguanosine-3'-phosphorothioate
  modified_base 3: mod_base = OTHER; note = 2'-O-methyluridine-3'-phosphate
  modified_base 4: mod_base = OTHER; note = 2'-O-methylguanosine-3'-phosphate
  modified_base 5: mod_base = OTHER; note = 2'-O-methyladenosine-3'-phosphate
  modified_base 6: mod_base = OTHER; note = 2'-fluorocytidine-3'-phosphate
  modified_base 7: mod_base = OTHER; note = 2'-O-methyluridine-3'-phosphate
  modified_base 8: mod_base = OTHER; note = 2'-fluorouridine-3'-phosphate
  modified_base 9: mod_base = OTHER; note = 2'-fluoroguanosine-3'-phosphate
  modified_base 10: mod_base = OTHER; note = 2'-O-methylcytidine-3'-phosphate
  modified_base 11: mod_base = OTHER; note = 2'-O-methyluridine-3'-phosphate
  modified_base 12: mod_base = OTHER; note = 2'-O-methyluridine-3'-phosphate
  modified_base 13: mod_base = OTHER; note = 2'-O-methyluridine-3'-phosphate
  modified_base 14: mod_base = OTHER; note = 2'-fluoroadenosine-3'-phosphate
  modified_base 15: mod_base = OTHER; note = 2'-O-methylguanosine-3'-phosphate
  modified_base 16: mod_base = OTHER; note = 2'-fluoroadenosine-3'-phosphate
  modified_base 17: mod_base = OTHER; note = 2'-O-methyluridine-3'-phosphate
  modified_base 18: mod_base = OTHER; note = 2'-O-methylguanosine-3'-phosphate
  modified_base 19: mod_base = OTHER; note = 2'-O-methyladenosine-3'-phosphate
  modified_base 20: mod_base = OTHER; note = 2'-O-methyladenosine-3'-phosphate
  modified_base 21: mod_base = OTHER; note = 2'-O-methylguanosine-3'-phosphorothioate
  modified_base 22: mod_base = OTHER; note = 2'-O-methylguanosine-3'-phosphorothioate
  modified_base 23: mod_base = OTHER; note = 2'-O-methyluridine-3'-phosphate
agtgacttgctttagatgaaggt

SEQ ID NO: 5315 - RNA, 23 nt, synthetic construct
  source 1..23: mol_type = other RNA
  modified_base 1: mod_base = OTHER; note = 2'-O-methyladenosine-3'-phosphorothioate
  modified_base 2: mod_base = OTHER; note = 2'-fluorouridine -3'-phosphorothioate
  modified_base 3: mod_base = OTHER; note = 2'-O-methylcytidine-3'-phosphate
  modified_base 4: mod_base = OTHER; note = 2'-O-methyladenosine-3'-phosphate
  modified_base 5: mod_base = OTHER; note = 2'-O-methylguanosine-3'-phosphate
  modified_base 6: mod_base = OTHER; note = 2'-fluoroguanosine-3'-phosphate
  modified_base 7: mod_base = OTHER; note = 2'-O-methyladenosine-3'-phosphate
  modified_base 8: mod_base = OTHER; note = 2'-fluoroadenosine-3'-phosphate
  modified_base 9: mod_base = OTHER; note = 2'-fluoroguanosine-3'-phosphate
  modified_base 10: mod_base = OTHER; note = 2'-O-methyladenosine-3'-phosphate
  modified_base 11: mod_base = OTHER; note = 2'-O-methyluridine-3'-phosphate
  modified_base 12: mod_base = OTHER; note = 2'-O-methylguanosine-3'-phosphate
  modified_base 13: mod_base = OTHER; note = 2'-O-methylguanosine-3'-phosphate
  modified_base 14: mod_base = OTHER; note = 2'-fluorocytidine-3'-phosphate
  modified_base 15: mod_base = OTHER; note = 2'-O-methyladenosine-3'-phosphate
  modified_base 16: mod_base = OTHER; note = 2'-fluorocytidine-3'-phosphate
  modified_base 17: mod_base = OTHER; note = 2'-O-methyladenosine-3'-phosphate
  modified_base 18: mod_base = OTHER; note = 2'-O-methylguanosine-3'-phosphate
  modified_base 19: mod_base = OTHER; note = 2'-O-methyluridine-3'-phosphate
  modified_base 20: mod_base = OTHER; note = 2'-O-methylguanosine-3'-phosphate
  modified_base 21: mod_base = OTHER; note = 2'-O-methyladenosine-3'-phosphorothioate
  modified_base 22: mod_base = OTHER; note = 2'-O-methylcytidine-3'-phosphorothioate
  modified_base 23: mod_base = OTHER; note = 2'-O-methyluridine-3'-phosphate
atcaggaagatggcacagtgact

SEQ ID NO: 5316 - RNA, 23 nt, synthetic construct
  source 1..23: mol_type = other RNA
  modified_base 1: mod_base = OTHER; note = 2'-O-methyladenosine-3'-phosphorothioate
  modified_base 2: mod_base = OTHER; note = 2'-fluorouridine -3'-phosphorothioate
  modified_base 3: mod_base = OTHER; note = 2'-O-methyladenosine-3'-phosphate
  modified_base 4: mod_base = OTHER; note = 2'-O-methylguanosine-3'-phosphate
  modified_base 5: mod_base = OTHER; note = 2'-O-methylguanosine-3'-phosphate
  modified_base 6: mod_base = OTHER; note = 2'-fluoroadenosine-3'-phosphate
  modified_base 7: mod_base = OTHER; note = 2'-O-methyladenosine-3'-phosphate
  modified_base 8: mod_base = OTHER; note = 2'-fluoroadenosine-3'-phosphate
  modified_base 9: mod_base = OTHER; note = 2'-fluoroguanosine-3'-phosphate
  modified_base 10: mod_base = OTHER; note = 2'-O-methyladenosine-3'-phosphate
  modified_base 11: mod_base = OTHER; note = 2'-O-methylguanosine-3'-phosphate
  modified_base 12: mod_base = OTHER; note = 2'-O-methylguanosine-3'-phosphate
  modified_base 13: mod_base = OTHER; note = 2'-O-methylguanosine-3'-phosphate
  modified_base 14: mod_base = OTHER; note = 2'-fluorouridine-3'-phosphate
  modified_base 15: mod_base = OTHER; note = 2'-O-methyladenosine-3'-phosphate
  modified_base 16: mod_base = OTHER; note = 2'-fluoroguanosine-3'-phosphate
  modified_base 17: mod_base = OTHER; note = 2'-O-methyluridine-3'-phosphate
  modified_base 18: mod_base = OTHER; note = 2'-O-methylguanosine-3'-phosphate
  modified_base 19: mod_base = OTHER; note = 2'-O-methylguanosine-3'-phosphate
  modified_base 20: mod_base = OTHER; note = 2'-O-methyluridine-3'-phosphate
  modified_base 21: mod_base = OTHER; note = 2'-O-methylcytidine-3'-phosphorothioate
  modified_base 22: mod_base = OTHER; note = 2'-O-methyladenosine-3'-phosphorothioate
  modified_base 23: mod_base = OTHER; note = 2'-O-methylguanosine-3'-phosphate
ataggaaagagggtagtggtcag

SEQ ID NO: 5317 - RNA, 23 nt, synthetic construct
  source 1..23: mol_type = other RNA
  modified_base 1: mod_base = OTHER; note = 2'-O-methyladenosine-3'-phosphorothioate
  modified_base 2: mod_base = OTHER; note = 2'-fluoroguanosine-3'-phosphorothioate
  modified_base 3: mod_base = OTHER; note = 2'-O-methylguanosine-3'-phosphate
  modified_base 4: mod_base = OTHER; note = 2'-O-methyladenosine-3'-phosphate
  modified_base 5: mod_base = OTHER; note = 2'-O-methyluridine-3'-phosphate
  modified_base 6: mod_base = OTHER; note = 2'-fluoroguanosine-3'-phosphate
  modified_base 7: mod_base = OTHER; note = 2'-O-methylguanosine-3'-phosphate
  modified_base 8: mod_base = OTHER; note = 2'-fluoroadenosine-3'-phosphate
  modified_base 9: mod_base = OTHER; note = 2'-fluorocytidine-3'-phosphate
  modified_base 10: mod_base = OTHER; note = 2'-O-methyluridine-3'-phosphate
  modified_base 11: mod_base = OTHER; note = 2'-O-methyladenosine-3'-phosphate
  modified_base 12: mod_base = OTHER; note = 2'-O-methylguanosine-3'-phosphate
  modified_base 13: mod_base = OTHER; note = 2'-O-methylcytidine-3'-phosphate
  modified_base 14: mod_base = OTHER; note = 2'-fluoroguanosine-3'-phosphate
  modified_base 15: mod_base = OTHER; note = 2'-O-methylguanosine-3'-phosphate
  modified_base 16: mod_base = OTHER; note = 2'-fluoroguanosine-3'-phosphate
  modified_base 17: mod_base = OTHER; note = 2'-O-methyladenosine-3'-phosphate
  modified_base 18: mod_base = OTHER; note = 2'-O-methyluridine-3'-phosphate
  modified_base 19: mod_base = OTHER; note = 2'-O-methylguanosine-3'-phosphate
  modified_base 20: mod_base = OTHER; note = 2'-O-methylguanosine-3'-phosphate
  modified_base 21: mod_base = OTHER; note = 2'-O-methyladenosine-3'-phosphorothioate
  modified_base 22: mod_base = OTHER; note = 2'-O-methylcytidine-3'-phosphorothioate
  modified_base 23: mod_base = OTHER; note = 2'-O-methyluridine-3'-phosphate
aggatggactagcgggatggact

SEQ ID NO: 5318 - RNA, 23 nt, synthetic construct
  source 1..23: mol_type = other RNA
  modified_base 1: mod_base = OTHER; note = 2'-O-methyladenosine-3'-phosphorothioate
  modified_base 2: mod_base = OTHER; note = 2'-fluoroguanosine-3'-phosphorothioate
  modified_base 3: mod_base = OTHER; note = 2'-O-methylcytidine-3'-phosphate
  modified_base 4: mod_base = OTHER; note = 2'-O-methyluridine-3'-phosphate
  modified_base 5: mod_base = OTHER; note = 2'-O-methylcytidine-3'-phosphate
  modified_base 6: mod_base = OTHER; note = 2'-fluoroadenosine-3'-phosphate
  modified_base 7: mod_base = OTHER; note = 2'-O-methyluridine-3'-phosphate
  modified_base 8: mod_base = OTHER; note = 2'-fluoroguanosine-3'-phosphate
  modified_base 9: mod_base = OTHER; note = 2'-fluoroguanosine-3'-phosphate
  modified_base 10: mod_base = OTHER; note = 2'-O-methyluridine-3'-phosphate
  modified_base 11: mod_base = OTHER; note = 2'-O-methyluridine-3'-phosphate
  modified_base 12: mod_base = OTHER; note = 2'-O-methylguanosine-3'-phosphate
  modified_base 13: mod_base = OTHER; note = 2'-O-methylguanosine-3'-phosphate
  modified_base 14: mod_base = OTHER; note = 2'-fluoroadenosine-3'-phosphate
  modified_base 15: mod_base = OTHER; note = 2'-O-methylguanosine-3'-phosphate
  modified_base 16: mod_base = OTHER; note = 2'-fluoroadenosine-3'-phosphate
  modified_base 17: mod_base = OTHER; note = 2'-O-methyluridine-3'-phosphate
  modified_base 18: mod_base = OTHER; note = 2'-O-methylguanosine-3'-phosphate
  modified_base 19: mod_base = OTHER; note = 2'-O-methylguanosine-3'-phosphate
  modified_base 20: mod_base = OTHER; note = 2'-O-methylguanosine-3'-phosphate
  modified_base 21: mod_base = OTHER; note = 2'-O-methyluridine-3'-phosphorothioate
  modified_base 22: mod_base = OTHER; note = 2'-O-methylcytidine-3'-phosphorothioate
  modified_base 23: mod_base = OTHER; note = 2'-O-methyluridine-3'-phosphate
agctcatggttggagatgggtct

SEQ ID NO: 5319 - RNA, 23 nt, synthetic construct
  source 1..23: mol_type = other RNA
  modified_base 1: mod_base = OTHER; note = 2'-O-methyladenosine-3'-phosphorothioate
  modified_base 2: mod_base = OTHER; note = 2'-fluoroguanosine-3'-phosphorothioate
  modified_base 3: mod_base = OTHER; note = 2'-O-methylguanosine-3'-phosphate
  modified_base 4: mod_base = OTHER; note = 2'-O-methyladenosine-3'-phosphate
  modified_base 5: mod_base = OTHER; note = 2'-O-methyladenosine-3'-phosphate
  modified_base 6: mod_base = OTHER; note = 2'-fluorocytidine-3'-phosphate
  modified_base 7: mod_base = OTHER; note = 2'-O-methylcytidine-3'-phosphate
  modified_base 8: mod_base = OTHER; note = 2'-fluoroadenosine-3'-phosphate
  modified_base 9: mod_base = OTHER; note = 2'-fluoroguanosine-3'-phosphate
  modified_base 10: mod_base = OTHER; note = 2'-O-methyladenosine-3'-phosphate
  modified_base 11: mod_base = OTHER; note = 2'-O-methyluridine-3'-phosphate
  modified_base 12: mod_base = OTHER; note = 2'-O-methylguanosine-3'-phosphate
  modified_base 13: mod_base = OTHER; note = 2'-O-methylguanosine-3'-phosphate
  modified_base 14: mod_base = OTHER; note = 2'-fluorocytidine-3'-phosphate
  modified_base 15: mod_base = OTHER; note = 2'-O-methyladenosine-3'-phosphate
  modified_base 16: mod_base = OTHER; note = 2'-fluorouridine-3'-phosphate
  modified_base 17: mod_base = OTHER; note = 2'-O-methyluridine-3'-phosphate
  modified_base 18: mod_base = OTHER; note = 2'-O-methylguanosine-3'-phosphate
  modified_base 19: mod_base = OTHER; note = 2'-O-methylcytidine-3'-phosphate
  modified_base 20: mod_base = OTHER; note = 2'-O-methyluridine-3'-phosphate
  modified_base 21: mod_base = OTHER; note = 2'-O-methylcytidine-3'-phosphorothioate
  modified_base 22: mod_base = OTHER; note = 2'-O-methyladenosine-3'-phosphorothioate
  modified_base 23: mod_base = OTHER; note = 2'-O-methyluridine-3'-phosphate
aggaaccagatggcattgctcat

SEQ ID NO: 5320 - RNA, 23 nt, synthetic construct
  source 1..23: mol_type = other RNA
  modified_base 1: mod_base = OTHER; note = 2'-O-methyladenosine-3'-phosphorothioate
  modified_base 2: mod_base = OTHER; note = 2'-fluoroadenosine-3'-phosphorothioate
  modified_base 3: mod_base = OTHER; note = 2'-O-methyladenosine-3'-phosphate
  modified_base 4: mod_base = OTHER; note = 2'-O-methylguanosine-3'-phosphate
  modified_base 5: mod_base = OTHER; note = 2'-O-methylguanosine-3'-phosphate
  modified_base 6: mod_base = OTHER; note = 2'-fluoroguanosine-3'-phosphate
  modified_base 7: mod_base = OTHER; note = 2'-O-methyluridine-3'-phosphate
  modified_base 8: mod_base = OTHER; note = 2'-fluoroguanosine-3'-phosphate
  modified_base 9: mod_base = OTHER; note = 2'-fluorouridine-3'-phosphate
  modified_base 10: mod_base = OTHER; note = 2'-O-methylcytidine-3'-phosphate
  modified_base 11: mod_base = OTHER; note = 2'-O-methyluridine-3'-phosphate
  modified_base 12: mod_base = OTHER; note = 2'-O-methyluridine-3'-phosphate
  modified_base 13: mod_base = OTHER; note = 2'-O-methyluridine-3'-phosphate
  modified_base 14: mod_base = OTHER; note = 2'-fluoroguanosine-3'-phosphate
  modified_base 15: mod_base = OTHER; note = 2'-O-methylcytidine-3'-phosphate
  modified_base 16: mod_base = OTHER; note = 2'-fluorocytidine-3'-phosphate
  modified_base 17: mod_base = OTHER; note = 2'-O-methyluridine-3'-phosphate
  modified_base 18: mod_base = OTHER; note = 2'-O-methylguanosine-3'-phosphate
  modified_base 19: mod_base = OTHER; note = 2'-O-methylguanosine-3'-phosphate
  modified_base 20: mod_base = OTHER; note = 2'-O-methylguanosine-3'-phosphate
  modified_base 21: mod_base = OTHER; note = 2'-O-methyladenosine-3'-phosphorothioate
  modified_base 22: mod_base = OTHER; note = 2'-O-methyladenosine-3'-phosphorothioate
  modified_base 23: mod_base = OTHER; note = 2'-O-methylcytidine-3'-phosphate
aaagggtgtctttgcctgggaac

SEQ ID NO: 5321 - RNA, 23 nt, synthetic construct
  source 1..23: mol_type = other RNA
  modified_base 1: mod_base = OTHER; note = 2'-O-methyladenosine-3'-phosphorothioate
  modified_base 2: mod_base = OTHER; note = 2'-fluorocytidine-3'-phosphorothioate
  modified_base 3: mod_base = OTHER; note = 2'-O-methyluridine-3'-phosphate
  modified_base 4: mod_base = OTHER; note = 2'-O-methyladenosine-3'-phosphate
  modified_base 5: mod_base = OTHER; note = 2'-O-methyluridine-3'-phosphate
  modified_base 6: mod_base = OTHER; note = 2'-fluorouridine-3'-phosphate
  modified_base 7: mod_base = OTHER; note = 2'-O-methyladenosine-3'-phosphate
  modified_base 8: mod_base = OTHER; note = 2'-fluoroadenosine-3'-phosphate
  modified_base 9: mod_base = OTHER; note = 2'-fluoroadenosine-3'-phosphate
  modified_base 10: mod_base = OTHER; note = 2'-O-methylguanosine-3'-phosphate
  modified_base 11: mod_base = OTHER; note = 2'-O-methylguanosine-3'-phosphate
  modified_base 12: mod_base = OTHER; note = 2'-O-methyluridine-3'-phosphate
  modified_base 13: mod_base = OTHER; note = 2'-O-methylguanosine-3'-phosphate
  modified_base 14: mod_base = OTHER; note = 2'-fluoroadenosine-3'-phosphate
  modified_base 15: mod_base = OTHER; note = 2'-O-methylguanosine-3'-phosphate
  modified_base 16: mod_base = OTHER; note = 2'-fluorocytidine-3'-phosphate
  modified_base 17: mod_base = OTHER; note = 2'-O-methyluridine-3'-phosphate
  modified_base 18: mod_base = OTHER; note = 2'-O-methyladenosine-3'-phosphate
  modified_base 19: mod_base = OTHER; note = 2'-O-methyladenosine-3'-phosphate
  modified_base 20: mod_base = OTHER; note = 2'-O-methylguanosine-3'-phosphate
  modified_base 21: mod_base = OTHER; note = 2'-O-methylguanosine-3'-phosphorothioate
  modified_base 22: mod_base = OTHER; note = 2'-O-methylguanosine-3'-phosphorothioate
  modified_base 23: mod_base = OTHER; note = 2'-O-methyluridine-3'-phosphate
actattaaaggtgagctaagggt

SEQ ID NO: 5322 - RNA, 23 nt, synthetic construct
  source 1..23: mol_type = other RNA
  modified_base 1: mod_base = OTHER; note = 2'-O-methyladenosine-3'-phosphorothioate
  modified_base 2: mod_base = OTHER; note = 2'-fluoroguanosine-3'-phosphorothioate
  modified_base 3: mod_base = OTHER; note = 2'-O-methyladenosine-3'-phosphate
  modified_base 4: mod_base = OTHER; note = 2'-O-methylcytidine-3'-phosphate
  modified_base 5: mod_base = OTHER; note = 2'-O-methyladenosine-3'-phosphate
  modified_base 6: mod_base = OTHER; note = 2'-fluoroguanosine-3'-phosphate
  modified_base 7: mod_base = OTHER; note = 2'-O-methylguanosine-3'-phosphate
  modified_base 8: mod_base = OTHER; note = 2'-fluoroadenosine-3'-phosphate
  modified_base 9: mod_base = OTHER; note = 2'-fluoroadenosine-3'-phosphate
  modified_base 10: mod_base = OTHER; note = 2'-O-methylguanosine-3'-phosphate
  modified_base 11: mod_base = OTHER; note = 2'-O-methylguanosine-3'-phosphate
  modified_base 12: mod_base = OTHER; note = 2'-O-methylcytidine-3'-phosphate
  modified_base 13: mod_base = OTHER; note = 2'-O-methyladenosine-3'-phosphate
  modified_base 14: mod_base = OTHER; note = 2'-fluorouridine-3'-phosphate
  modified_base 15: mod_base = OTHER; note = 2'-O-methyladenosine-3'-phosphate
  modified_base 16: mod_base = OTHER; note = 2'-fluoroguanosine-3'-phosphate
  modified_base 17: mod_base = OTHER; note = 2'-O-methyluridine-3'-phosphate
  modified_base 18: mod_base = OTHER; note = 2'-O-methylguanosine-3'-phosphate
  modified_base 19: mod_base = OTHER; note = 2'-O-methylguanosine-3'-phosphate
  modified_base 20: mod_base = OTHER; note = 2'-O-methylguanosine-3'-phosphate
  modified_base 21: mod_base = OTHER; note = 2'-O-methyluridine-3'-phosphorothioate
  modified_base 22: mod_base = OTHER; note = 2'-O-methyluridine-3'-phosphorothioate
  modified_base 23: mod_base = OTHER; note = 2'-O-methyladenosine-3'-phosphate
agacaggaaggcatagtgggtta

SEQ ID NO: 5323 - RNA, 23 nt, synthetic construct
  source 1..23: mol_type = other RNA
  modified_base 1: mod_base = OTHER; note = 2'-O-methyladenosine-3'-phosphorothioate
  modified_base 2: mod_base = OTHER; note = 2'-fluoroguanosine-3'-phosphorothioate
  modified_base 3: mod_base = OTHER; note = 2'-O-methyladenosine-3'-phosphate
  modified_base 4: mod_base = OTHER; note = 2'-O-methylcytidine-3'-phosphate
  modified_base 5: mod_base = OTHER; note = 2'-O-methylcytidine-3'-phosphate
  modified_base 6: mod_base = OTHER; note = 2'-fluoroadenosine-3'-phosphate
  modified_base 7: mod_base = OTHER; note = 2'-O-methyluridine-3'-phosphate
  modified_base 8: mod_base = OTHER; note = 2'-fluorouridine-3'-phosphate
  modified_base 9: mod_base = OTHER; note = 2'-fluoroguanosine-3'-phosphate
  modified_base 10: mod_base = OTHER; note = 2'-O-methyladenosine-3'-phosphate
  modified_base 11: mod_base = OTHER; note = 2'-O-methylguanosine-3'-phosphate
  modified_base 12: mod_base = OTHER; note = 2'-O-methyluridine-3'-phosphate
  modified_base 13: mod_base = OTHER; note = 2'-O-methyladenosine-3'-phosphate
  modified_base 14: mod_base = OTHER; note = 2'-fluoroguanosine-3'-phosphate
  modified_base 15: mod_base = OTHER; note = 2'-O-methyladenosine-3'-phosphate
  modified_base 16: mod_base = OTHER; note = 2'-fluoroadenosine-3'-phosphate
  modified_base 17: mod_base = OTHER; note = 2'-O-methyladenosine-3'-phosphate
  modified_base 18: mod_base = OTHER; note = 2'-O-methylguanosine-3'-phosphate
  modified_base 19: mod_base = OTHER; note = 2'-O-methylguanosine-3'-phosphate
  modified_base 20: mod_base = OTHER; note = 2'-O-methyladenosine-3'-phosphate
  modified_base 21: mod_base = OTHER; note = 2'-O-methylcytidine-3'-phosphorothioate
  modified_base 22: mod_base = OTHER; note = 2'-O-methyladenosine-3'-phosphorothioate
  modified_base 23: mod_base = OTHER; note = 2'-O-methylguanosine-3'-phosphate
agaccattgagtagaaaggacag

SEQ ID NO: 5324 - RNA, 23 nt, synthetic construct
  source 1..23: mol_type = other RNA
  modified_base 1: mod_base = OTHER; note = 2'-O-methyladenosine-3'-phosphorothioate
  modified_base 2: mod_base = OTHER; note = 2'-fluorouridine -3'-phosphorothioate
  modified_base 3: mod_base = OTHER; note = 2'-O-methyluridine-3'-phosphate
  modified_base 4: mod_base = OTHER; note = 2'-O-methylguanosine-3'-phosphate
  modified_base 5: mod_base = OTHER; note = 2'-O-methyluridine-3'-phosphate
  modified_base 6: mod_base = OTHER; note = 2'-fluoroguanosine-3'-phosphate
  modified_base 7: mod_base = OTHER; note = 2'-O-methyluridine-3'-phosphate
  modified_base 8: mod_base = OTHER; note = 2'-fluorocytidine-3'-phosphate
  modified_base 9: mod_base = OTHER; note = 2'-fluoroadenosine-3'-phosphate
  modified_base 10: mod_base = OTHER; note = 2'-O-methyladenosine-3'-phosphate
  modified_base 11: mod_base = OTHER; note = 2'-O-methylcytidine-3'-phosphate
  modified_base 12: mod_base = OTHER; note = 2'-O-methyluridine-3'-phosphate
  modified_base 13: mod_base = OTHER; note = 2'-O-methylcytidine-3'-phosphate
  modified_base 14: mod_base = OTHER; note = 2'-fluoroadenosine-3'-phosphate
  modified_base 15: mod_base = OTHER; note = 2'-O-methyluridine-3'-phosphate
  modified_base 16: mod_base = OTHER; note = 2'-fluorocytidine-3'-phosphate
  modified_base 17: mod_base = OTHER; note = 2'-O-methyluridine-3'-phosphate
  modified_base 18: mod_base = OTHER; note = 2'-O-methyluridine-3'-phosphate
  modified_base 19: mod_base = OTHER; note = 2'-O-methylguanosine-3'-phosphate
  modified_base 20: mod_base = OTHER; note = 2'-O-methylguanosine-3'-phosphate
  modified_base 21: mod_base = OTHER; note = 2'-O-methyladenosine-3'-phosphorothioate
  modified_base 22: mod_base = OTHER; note = 2'-O-methylguanosine-3'-phosphorothioate
  modified_base 23: mod_base = OTHER; note = 2'-O-methyluridine-3'-phosphate
attgtgtcaactcatcttggagt

SEQ ID NO: 5325 - RNA, 23 nt, synthetic construct
  source 1..23: mol_type = other RNA
  modified_base 1: mod_base = OTHER; note = 2'-O-methyladenosine-3'-phosphorothioate
  modified_base 2: mod_base = OTHER; note = 2'-fluorocytidine-3'-phosphorothioate
  modified_base 3: mod_base = OTHER; note = 2'-O-methyluridine-3'-phosphate
  modified_base 4: mod_base = OTHER; note = 2'-O-methylguanosine-3'-phosphate
  modified_base 5: mod_base = OTHER; note = 2'-O-methylguanosine-3'-phosphate
  modified_base 6: mod_base = OTHER; note = 2'-fluoroadenosine-3'-phosphate
  modified_base 7: mod_base = OTHER; note = 2'-O-methylguanosine-3'-phosphate
  modified_base 8: mod_base = OTHER; note = 2'-fluoroadenosine-3'-phosphate
  modified_base 9: mod_base = OTHER; note = 2'-fluorouridine-3'-phosphate
  modified_base 10: mod_base = OTHER; note = 2'-O-methylcytidine-3'-phosphate
  modified_base 11: mod_base = OTHER; note = 2'-O-methylcytidine-3'-phosphate
  modified_base 12: mod_base = OTHER; note = 2'-O-methyladenosine-3'-phosphate
  modified_base 13: mod_base = OTHER; note = 2'-O-methylcytidine-3'-phosphate
  modified_base 14: mod_base = OTHER; note = 2'-fluoroadenosine-3'-phosphate
  modified_base 15: mod_base = OTHER; note = 2'-O-methyladenosine-3'-phosphate
  modified_base 16: mod_base = OTHER; note = 2'-fluoroadenosine-3'-phosphate
  modified_base 17: mod_base = OTHER; note = 2'-O-methyladenosine-3'-phosphate
  modified_base 18: mod_base = OTHER; note = 2'-O-methyladenosine-3'-phosphate
  modified_base 19: mod_base = OTHER; note = 2'-O-methyluridine-3'-phosphate
  modified_base 20: mod_base = OTHER; note = 2'-O-methyluridine-3'-phosphate
  modified_base 21: mod_base = OTHER; note = 2'-O-methylguanosine-3'-phosphorothioate
  modified_base 22: mod_base = OTHER; note = 2'-O-methylguanosine-3'-phosphorothioate
  modified_base 23: mod_base = OTHER; note = 2'-O-methylguanosine-3'-phosphate
actggagatccacaaaaattggg

SEQ ID NO: 5326 - RNA, 23 nt, synthetic construct
  source 1..23: mol_type = other RNA
  modified_base 1: mod_base = OTHER; note = 2'-O-methyladenosine-3'-phosphorothioate
  modified_base 2: mod_base = OTHER; note = 2'-fluoroadenosine-3'-phosphorothioate
  modified_base 3: mod_base = OTHER; note = 2'-O-methyladenosine-3'-phosphate
  modified_base 4: mod_base = OTHER; note = 2'-O-methylcytidine-3'-phosphate
  modified_base 5: mod_base = OTHER; note = 2'-O-methyluridine-3'-phosphate
  modified_base 6: mod_base = OTHER; note = 2'-fluorouridine-3'-phosphate
  modified_base 7: mod_base = OTHER; note = 2'-O-methyluridine-3'-phosphate
  modified_base 8: mod_base = OTHER; note = 2'-fluoroguanosine-3'-phosphate
  modified_base 9: mod_base = OTHER; note = 2'-fluoroguanosine-3'-phosphate
  modified_base 10: mod_base = OTHER; note = 2'-O-methyluridine-3'-phosphate
  modified_base 11: mod_base = OTHER; note = 2'-O-methylguanosine-3'-phosphate
  modified_base 12: mod_base = OTHER; note = 2'-O-methyladenosine-3'-phosphate
  modified_base 13: mod_base = OTHER; note = 2'-O-methyladenosine-3'-phosphate
  modified_base 14: mod_base = OTHER; note = 2'-fluorouridine-3'-phosphate
  modified_base 15: mod_base = OTHER; note = 2'-O-methylcytidine-3'-phosphate
  modified_base 16: mod_base = OTHER; note = 2'-fluorocytidine-3'-phosphate
  modified_base 17: mod_base = OTHER; note = 2'-O-methyladenosine-3'-phosphate
  modified_base 18: mod_base = OTHER; note = 2'-O-methyladenosine-3'-phosphate
  modified_base 19: mod_base = OTHER; note = 2'-O-methyladenosine-3'-phosphate
  modified_base 20: mod_base = OTHER; note = 2'-O-methylguanosine-3'-phosphate
  modified_base 21: mod_base = OTHER; note = 2'-O-methyladenosine-3'-phosphorothioate
  modified_base 22: mod_base = OTHER; note = 2'-O-methyladenosine-3'-phosphorothioate
  modified_base 23: mod_base = OTHER; note = 2'-O-methylguanosine-3'-phosphate
aaactttggtgaatccaaagaag

SEQ ID NO: 5327 - RNA, 23 nt, synthetic construct
  source 1..23: mol_type = other RNA
  modified_base 1: mod_base = OTHER; note = 2'-O-methyladenosine-3'-phosphorothioate
  modified_base 2: mod_base = OTHER; note = 2'-fluoroguanosine-3'-phosphorothioate
  modified_base 3: mod_base = OTHER; note = 2'-O-methyluridine-3'-phosphate
  modified_base 4: mod_base = OTHER; note = 2'-O-methyladenosine-3'-phosphate
  modified_base 5: mod_base = OTHER; note = 2'-O-methyladenosine-3'-phosphate
  modified_base 6: mod_base = OTHER; note = 2'-fluoroguanosine-3'-phosphate
  modified_base 7: mod_base = OTHER; note = 2'-O-methylcytidine-3'-phosphate
  modified_base 8: mod_base = OTHER; note = 2'-fluorocytidine-3'-phosphate
  modified_base 9: mod_base = OTHER; note = 2'-fluorouridine-3'-phosphate
  modified_base 10: mod_base = OTHER; note = 2'-O-methylcytidine-3'-phosphate
  modified_base 11: mod_base = OTHER; note = 2'-O-methyluridine-3'-phosphate
  modified_base 12: mod_base = OTHER; note = 2'-O-methyladenosine-3'-phosphate
  modified_base 13: mod_base = OTHER; note = 2'-O-methyluridine-3'-phosphate
  modified_base 14: mod_base = OTHER; note = 2'-fluorouridine-3'-phosphate
  modified_base 15: mod_base = OTHER; note = 2'-O-methyluridine-3'-phosphate
  modified_base 16: mod_base = OTHER; note = 2'-fluorouridine-3'-phosphate
  modified_base 17: mod_base = OTHER; note = 2'-O-methylguanosine-3'-phosphate
  modified_base 18: mod_base = OTHER; note = 2'-O-methylguanosine-3'-phosphate
  modified_base 19: mod_base = OTHER; note = 2'-O-methylguanosine-3'-phosphate
  modified_base 20: mod_base = OTHER; note = 2'-O-methylcytidine-3'-phosphate
  modified_base 21: mod_base = OTHER; note = 2'-O-methyladenosine-3'-phosphorothioate
  modified_base 22: mod_base = OTHER; note = 2'-O-methylguanosine-3'-phosphorothioate
  modified_base 23: mod_base = OTHER; note = 2'-O-methylcytidine-3'-phosphate
agtaagcctctattttgggcagc

SEQ ID NO: 5328 - RNA, 23 nt, synthetic construct
  source 1..23: mol_type = other RNA
  modified_base 1: mod_base = OTHER; note = 2'-O-methyladenosine-3'-phosphorothioate
  modified_base 2: mod_base = OTHER; note = 2'-fluorouridine -3'-phosphorothioate
  modified_base 3: mod_base = OTHER; note = 2'-O-methylguanosine-3'-phosphate
  modified_base 4: mod_base = OTHER; note = 2'-O-methylguanosine-3'-phosphate
  modified_base 5: mod_base = OTHER; note = 2'-O-methyladenosine-3'-phosphate
  modified_base 6: mod_base = OTHER; note = 2'-fluorocytidine-3'-phosphate
  modified_base 7: mod_base = OTHER; note = 2'-O-methyladenosine-3'-phosphate
  modified_base 8: mod_base = OTHER; note = 2'-fluoroadenosine-3'-phosphate
  modified_base 9: mod_base = OTHER; note = 2'-fluorocytidine-3'-phosphate
  modified_base 10: mod_base = OTHER; note = 2'-O-methyluridine-3'-phosphate
  modified_base 11: mod_base = OTHER; note = 2'-O-methyladenosine-3'-phosphate
  modified_base 12: mod_base = OTHER; note = 2'-O-methyladenosine-3'-phosphate
  modified_base 13: mod_base = OTHER; note = 2'-O-methylguanosine-3'-phosphate
  modified_base 14: mod_base = OTHER; note = 2'-fluoroadenosine-3'-phosphate
  modified_base 15: mod_base = OTHER; note = 2'-O-methyladenosine-3'-phosphate
  modified_base 16: mod_base = OTHER; note = 2'-fluoroguanosine-3'-phosphate
  modified_base 17: mod_base = OTHER; note = 2'-O-methylguanosine-3'-phosphate
  modified_base 18: mod_base = OTHER; note = 2'-O-methyladenosine-3'-phosphate
  modified_base 19: mod_base = OTHER; note = 2'-O-methylcytidine-3'-phosphate
  modified_base 20: mod_base = OTHER; note = 2'-O-methyladenosine-3'-phosphate
  modified_base 21: mod_base = OTHER; note = 2'-O-methylguanosine-3'-phosphorothioate
  modified_base 22: mod_base = OTHER; note = 2'-O-methylguanosine-3'-phosphorothioate
  modified_base 23: mod_base = OTHER; note = 2'-O-methylguanosine-3'-phosphate
atggacaactaagaaggacaggg

SEQ ID NO: 5329 - RNA, 23 nt, synthetic construct
  source 1..23: mol_type = other RNA
  modified_base 1: mod_base = OTHER; note = 2'-O-methyladenosine-3'-phosphorothioate
  modified_base 2: mod_base = OTHER; note = 2'-fluoroadenosine-3'-phosphorothioate
  modified_base 3: mod_base = OTHER; note = 2'-O-methyladenosine-3'-phosphate
  modified_base 4: mod_base = OTHER; note = 2'-O-methyladenosine-3'-phosphate
  modified_base 5: mod_base = OTHER; note = 2'-O-methylguanosine-3'-phosphate
  modified_base 6: mod_base = OTHER; note = 2'-fluoroadenosine-3'-phosphate
  modified_base 7: mod_base = OTHER; note = 2'-O-methylguanosine-3'-phosphate
  modified_base 8: mod_base = OTHER; note = 2'-fluoroadenosine-3'-phosphate
  modified_base 9: mod_base = OTHER; note = 2'-fluoroguanosine-3'-phosphate
  modified_base 10: mod_base = OTHER; note = 2'-O-methylcytidine-3'-phosphate
  modified_base 11: mod_base = OTHER; note = 2'-O-methyluridine-3'-phosphate
  modified_base 12: mod_base = OTHER; note = 2'-O-methyluridine-3'-phosphate
  modified_base 13: mod_base = OTHER; note = 2'-O-methyluridine-3'-phosphate
  modified_base 14: mod_base = OTHER; note = 2'-fluoroadenosine-3'-phosphate
  modified_base 15: mod_base = OTHER; note = 2'-O-methylguanosine-3'-phosphate
  modified_base 16: mod_base = OTHER; note = 2'-fluorouridine-3'-phosphate
  modified_base 17: mod_base = OTHER; note = 2'-O-methyladenosine-3'-phosphate
  modified_base 18: mod_base = OTHER; note = 2'-O-methylguanosine-3'-phosphate
  modified_base 19: mod_base = OTHER; note = 2'-O-methyluridine-3'-phosphate
  modified_base 20: mod_base = OTHER; note = 2'-O-methyluridine-3'-phosphate
  modified_base 21: mod_base = OTHER; note = 2'-O-methylcytidine-3'-phosphorothioate
  modified_base 22: mod_base = OTHER; note = 2'-O-methyladenosine-3'-phosphorothioate
  modified_base 23: mod_base = OTHER; note = 2'-O-methylcytidine-3'-phosphate
aaaagagagctttagtagttcac

SEQ ID NO: 5330 - RNA, 23 nt, synthetic construct
  source 1..23: mol_type = other RNA
  modified_base 1: mod_base = OTHER; note = 2'-O-methyladenosine-3'-phosphorothioate
  modified_base 2: mod_base = OTHER; note = 2'-fluoroadenosine-3'-phosphorothioate
  modified_base 3: mod_base = OTHER; note = 2'-O-methyluridine-3'-phosphate
  modified_base 4: mod_base = OTHER; note = 2'-O-methylguanosine-3'-phosphate
  modified_base 5: mod_base = OTHER; note = 2'-O-methylguanosine-3'-phosphate
  modified_base 6: mod_base = OTHER; note = 2'-fluoroadenosine-3'-phosphate
  modified_base 7: mod_base = OTHER; note = 2'-O-methyluridine-3'-phosphate
  modified_base 8: mod_base = OTHER; note = 2'-fluoroguanosine-3'-phosphate
  modified_base 9: mod_base = OTHER; note = 2'-fluoroadenosine-3'-phosphate
  modified_base 10: mod_base = OTHER; note = 2'-O-methyladenosine-3'-phosphate
  modified_base 11: mod_base = OTHER; note = 2'-O-methylguanosine-3'-phosphate
  modified_base 12: mod_base = OTHER; note = 2'-O-methylguanosine-3'-phosphate
  modified_base 13: mod_base = OTHER; note = 2'-O-methyluridine-3'-phosphate
  modified_base 14: mod_base = OTHER; note = 2'-fluoroadenosine-3'-phosphate
  modified_base 15: mod_base = OTHER; note = 2'-O-methyluridine-3'-phosphate
  modified_base 16: mod_base = OTHER; note = 2'-fluoroguanosine-3'-phosphate
  modified_base 17: mod_base = OTHER; note = 2'-O-methylcytidine-3'-phosphate
  modified_base 18: mod_base = OTHER; note = 2'-O-methyladenosine-3'-phosphate
  modified_base 19: mod_base = OTHER; note = 2'-O-methyladenosine-3'-phosphate
  modified_base 20: mod_base = OTHER; note = 2'-O-methyladenosine-3'-phosphate
  modified_base 21: mod_base = OTHER; note = 2'-O-methylguanosine-3'-phosphorothioate
  modified_base 22: mod_base = OTHER; note = 2'-O-methyladenosine-3'-phosphorothioate
  modified_base 23: mod_base = OTHER; note = 2'-O-methylguanosine-3'-phosphate
aatggatgaaggtatgcaaagag

SEQ ID NO: 5331 - RNA, 23 nt, synthetic construct
  source 1..23: mol_type = other RNA
  modified_base 1: mod_base = OTHER; note = 2'-O-methyladenosine-3'-phosphorothioate
  modified_base 2: mod_base = OTHER; note = 2'-fluorocytidine-3'-phosphorothioate
  modified_base 3: mod_base = OTHER; note = 2'-O-methyladenosine-3'-phosphate
  modified_base 4: mod_base = OTHER; note = 2'-O-methylguanosine-3'-phosphate
  modified_base 5: mod_base = OTHER; note = 2'-O-methyladenosine-3'-phosphate
  modified_base 6: mod_base = OTHER; note = 2'-fluoroguanosine-3'-phosphate
  modified_base 7: mod_base = OTHER; note = 2'-O-methyladenosine-3'-phosphate
  modified_base 8: mod_base = OTHER; note = 2'-fluoroadenosine-3'-phosphate
  modified_base 9: mod_base = OTHER; note = 2'-fluoroguanosine-3'-phosphate
  modified_base 10: mod_base = OTHER; note = 2'-O-methylguanosine-3'-phosphate
  modified_base 11: mod_base = OTHER; note = 2'-O-methyladenosine-3'-phosphate
  modified_base 12: mod_base = OTHER; note = 2'-O-methylcytidine-3'-phosphate
  modified_base 13: mod_base = OTHER; note = 2'-O-methyladenosine-3'-phosphate
  modified_base 14: mod_base = OTHER; note = 2'-fluoroadenosine-3'-phosphate
  modified_base 15: mod_base = OTHER; note = 2'-O-methyladenosine-3'-phosphate
  modified_base 16: mod_base = OTHER; note = 2'-fluoroadenosine-3'-phosphate
  modified_base 17: mod_base = OTHER; note = 2'-O-methyladenosine-3'-phosphate
  modified_base 18: mod_base = OTHER; note = 2'-O-methyladenosine-3'-phosphate
  modified_base 19: mod_base = OTHER; note = 2'-O-methyluridine-3'-phosphate
  modified_base 20: mod_base = OTHER; note = 2'-O-methylguanosine-3'-phosphate
  modified_base 21: mod_base = OTHER; note = 2'-O-methylguanosine-3'-phosphorothioate
  modified_base 22: mod_base = OTHER; note = 2'-O-methyladenosine-3'-phosphorothioate
  modified_base 23: mod_base = OTHER; note = 2'-O-methyluridine-3'-phosphate
acagagaaggacaaaaaatggat

SEQ ID NO: 5332 - RNA, 23 nt, synthetic construct
  source 1..23: mol_type = other RNA
  modified_base 1: mod_base = OTHER; note = 2'-O-methyladenosine-3'-phosphorothioate
  modified_base 2: mod_base = OTHER; note = 2'-fluorouridine -3'-phosphorothioate
  modified_base 3: mod_base = OTHER; note = 2'-O-methyluridine-3'-phosphate
  modified_base 4: mod_base = OTHER; note = 2'-O-methyladenosine-3'-phosphate
  modified_base 5: mod_base = OTHER; note = 2'-O-methyladenosine-3'-phosphate
  modified_base 6: mod_base = OTHER; note = 2'-fluoroguanosine-3'-phosphate
  modified_base 7: mod_base = OTHER; note = 2'-O-methylguanosine-3'-phosphate
  modified_base 8: mod_base = OTHER; note = 2'-fluoroguanosine-3'-phosphate
  modified_base 9: mod_base = OTHER; note = 2'-fluorocytidine-3'-phosphate
  modified_base 10: mod_base = OTHER; note = 2'-O-methyladenosine-3'-phosphate
  modified_base 11: mod_base = OTHER; note = 2'-O-methyluridine-3'-phosphate
  modified_base 12: mod_base = OTHER; note = 2'-O-methyladenosine-3'-phosphate
  modified_base 13: mod_base = OTHER; note = 2'-O-methylguanosine-3'-phosphate
  modified_base 14: mod_base = OTHER; note = 2'-fluoroadenosine-3'-phosphate
  modified_base 15: mod_base = OTHER; note = 2'-O-methylguanosine-3'-phosphate
  modified_base 16: mod_base = OTHER; note = 2'-fluoroadenosine-3'-phosphate
  modified_base 17: mod_base = OTHER; note = 2'-O-methyladenosine-3'-phosphate
  modified_base 18: mod_base = OTHER; note = 2'-O-methyladenosine-3'-phosphate
  modified_base 19: mod_base = OTHER; note = 2'-O-methylguanosine-3'-phosphate
  modified_base 20: mod_base = OTHER; note = 2'-O-methylguanosine-3'-phosphate
  modified_base 21: mod_base = OTHER; note = 2'-O-methylcytidine-3'-phosphorothioate
  modified_base 22: mod_base = OTHER; note = 2'-O-methyladenosine-3'-phosphorothioate
  modified_base 23: mod_base = OTHER; note = 2'-O-methylguanosine-3'-phosphate
attaagggcatagagaaaggcag

SEQ ID NO: 5333 - RNA, 23 nt, synthetic construct
  source 1..23: mol_type = other RNA
  modified_base 1: mod_base = OTHER; note = 2'-O-methyladenosine-3'-phosphorothioate
  modified_base 2: mod_base = OTHER; note = 2'-fluorouridine -3'-phosphorothioate
  modified_base 3: mod_base = OTHER; note = 2'-O-methylcytidine-3'-phosphate
  modified_base 4: mod_base = OTHER; note = 2'-O-methyladenosine-3'-phosphate
  modified_base 5: mod_base = OTHER; note = 2'-O-methylguanosine-3'-phosphate
  modified_base 6: mod_base = OTHER; note = 2'-fluoroguanosine-3'-phosphate
  modified_base 7: mod_base = OTHER; note = 2'-O-methylcytidine-3'-phosphate
  modified_base 8: mod_base = OTHER; note = 2'-fluoroadenosine-3'-phosphate
  modified_base 9: mod_base = OTHER; note = 2'-fluoroadenosine-3'-phosphate
  modified_base 10: mod_base = OTHER; note = 2'-O-methylguanosine-3'-phosphate
  modified_base 11: mod_base = OTHER; note = 2'-O-methyluridine-3'-phosphate
  modified_base 12: mod_base = OTHER; note = 2'-O-methylcytidine-3'-phosphate
  modified_base 13: mod_base = OTHER; note = 2'-O-methyladenosine-3'-phosphate
  modified_base 14: mod_base = OTHER; note = 2'-fluoroguanosine-3'-phosphate
  modified_base 15: mod_base = OTHER; note = 2'-O-methylcytidine-3'-phosphate
  modified_base 16: mod_base = OTHER; note = 2'-fluorocytidine-3'-phosphate
  modified_base 17: mod_base = OTHER; note = 2'-O-methylcytidine-3'-phosphate
  modified_base 18: mod_base = OTHER; note = 2'-O-methyluridine-3'-phosphate
  modified_base 19: mod_base = OTHER; note = 2'-O-methyluridine-3'-phosphate
  modified_base 20: mod_base = OTHER; note = 2'-O-methyladenosine-3'-phosphate
  modified_base 21: mod_base = OTHER; note = 2'-O-methyladenosine-3'-phosphorothioate
  modified_base 22: mod_base = OTHER; note = 2'-O-methylguanosine-3'-phosphorothioate
  modified_base 23: mod_base = OTHER; note = 2'-O-methylguanosine-3'-phosphate
atcaggcaagtcagcccttaagg

SEQ ID NO: 5334 - RNA, 23 nt, synthetic construct
  source 1..23: mol_type = other RNA
  modified_base 1: mod_base = OTHER; note = 2'-O-methyladenosine-3'-phosphorothioate
  modified_base 2: mod_base = OTHER; note = 2'-fluoroadenosine-3'-phosphorothioate
  modified_base 3: mod_base = OTHER; note = 2'-O-methylguanosine-3'-phosphate
  modified_base 4: mod_base = OTHER; note = 2'-O-methylcytidine-3'-phosphate
  modified_base 5: mod_base = OTHER; note = 2'-O-methyluridine-3'-phosphate
  modified_base 6: mod_base = OTHER; note = 2'-fluorocytidine-3'-phosphate
  modified_base 7: mod_base = OTHER; note = 2'-O-methyladenosine-3'-phosphate
  modified_base 8: mod_base = OTHER; note = 2'-fluoroguanosine-3'-phosphate
  modified_base 9: mod_base = OTHER; note = 2'-fluoroguanosine-3'-phosphate
  modified_base 10: mod_base = OTHER; note = 2'-O-methyluridine-3'-phosphate
  modified_base 11: mod_base = OTHER; note = 2'-O-methylguanosine-3'-phosphate
  modified_base 12: mod_base = OTHER; note = 2'-O-methyladenosine-3'-phosphate
  modified_base 13: mod_base = OTHER; note = 2'-O-methyluridine-3'-phosphate
  modified_base 14: mod_base = OTHER; note = 2'-fluoroadenosine-3'-phosphate
  modified_base 15: mod_base = OTHER; note = 2'-O-methylguanosine-3'-phosphate
  modified_base 16: mod_base = OTHER; note = 2'-fluoroadenosine-3'-phosphate
  modified_base 17: mod_base = OTHER; note = 2'-O-methylguanosine-3'-phosphate
  modified_base 18: mod_base = OTHER; note = 2'-O-methylcytidine-3'-phosphate
  modified_base 19: mod_base = OTHER; note = 2'-O-methyluridine-3'-phosphate
  modified_base 20: mod_base = OTHER; note = 2'-O-methylcytidine-3'-phosphate
  modified_base 21: mod_base = OTHER; note = 2'-O-methyladenosine-3'-phosphorothioate
  modified_base 22: mod_base = OTHER; note = 2'-O-methylguanosine-3'-phosphorothioate
  modified_base 23: mod_base = OTHER; note = 2'-O-methylguanosine-3'-phosphate
aagctcaggtgatagagctcagg

SEQ ID NO: 5335 - RNA, 23 nt, synthetic construct
  source 1..23: mol_type = other RNA
  modified_base 1: mod_base = OTHER; note = 2'-O-methyladenosine-3'-phosphorothioate
  modified_base 2: mod_base = OTHER; note = 2'-fluoroguanosine-3'-phosphorothioate
  modified_base 3: mod_base = OTHER; note = 2'-O-methyladenosine-3'-phosphate
  modified_base 4: mod_base = OTHER; note = 2'-O-methylcytidine-3'-phosphate
  modified_base 5: mod_base = OTHER; note = 2'-O-methylcytidine-3'-phosphate
  modified_base 6: mod_base = OTHER; note = 2'-fluorouridine-3'-phosphate
  modified_base 7: mod_base = OTHER; note = 2'-O-methylcytidine-3'-phosphate
  modified_base 8: mod_base = OTHER; note = 2'-fluoroadenosine-3'-phosphate
  modified_base 9: mod_base = OTHER; note = 2'-fluoroguanosine-3'-phosphate
  modified_base 10: mod_base = OTHER; note = 2'-O-methylcytidine-3'-phosphate
  modified_base 11: mod_base = OTHER; note = 2'-O-methyladenosine-3'-phosphate
  modified_base 12: mod_base = OTHER; note = 2'-O-methylguanosine-3'-phosphate
  modified_base 13: mod_base = OTHER; note = 2'-O-methylguanosine-3'-phosphate
  modified_base 14: mod_base = OTHER; note = 2'-fluoroadenosine-3'-phosphate
  modified_base 15: mod_base = OTHER; note = 2'-O-methyladenosine-3'-phosphate
  modified_base 16: mod_base = OTHER; note = 2'-fluoroguanosine-3'-phosphate
  modified_base 17: mod_base = OTHER; note = 2'-O-methylcytidine-3'-phosphate
  modified_base 18: mod_base = OTHER; note = 2'-O-methylcytidine-3'-phosphate
  modified_base 19: mod_base = OTHER; note = 2'-O-methyladenosine-3'-phosphate
  modified_base 20: mod_base = OTHER; note = 2'-O-methylguanosine-3'-phosphate
  modified_base 21: mod_base = OTHER; note = 2'-O-methyladenosine-3'-phosphorothioate
  modified_base 22: mod_base = OTHER; note = 2'-O-methylguanosine-3'-phosphorothioate
  modified_base 23: mod_base = OTHER; note = 2'-O-methylguanosine-3'-phosphate
agacctcagcaggaagccagagg

SEQ ID NO: 5336 - RNA, 23 nt, synthetic construct
  source 1..23: mol_type = other RNA
  modified_base 1: mod_base = OTHER; note = 2'-O-methyladenosine-3'-phosphorothioate
  modified_base 2: mod_base = OTHER; note = 2'-fluoroguanosine-3'-phosphorothioate
  modified_base 3: mod_base = OTHER; note = 2'-O-methyladenosine-3'-phosphate
  modified_base 4: mod_base = OTHER; note = 2'-O-methylguanosine-3'-phosphate
  modified_base 5: mod_base = OTHER; note = 2'-O-methylguanosine-3'-phosphate
  modified_base 6: mod_base = OTHER; note = 2'-fluoroguanosine-3'-phosphate
  modified_base 7: mod_base = OTHER; note = 2'-O-methyladenosine-3'-phosphate
  modified_base 8: mod_base = OTHER; note = 2'-fluoroadenosine-3'-phosphate
  modified_base 9: mod_base = OTHER; note = 2'-fluorocytidine-3'-phosphate
  modified_base 10: mod_base = OTHER; note = 2'-O-methyladenosine-3'-phosphate
  modified_base 11: mod_base = OTHER; note = 2'-O-methylguanosine-3'-phosphate
  modified_base 12: mod_base = OTHER; note = 2'-O-methylguanosine-3'-phosphate
  modified_base 13: mod_base = OTHER; note = 2'-O-methylguanosine-3'-phosphate
  modified_base 14: mod_base = OTHER; note = 2'-fluoroadenosine-3'-phosphate
  modified_base 15: mod_base = OTHER; note = 2'-O-methyluridine-3'-phosphate
  modified_base 16: mod_base = OTHER; note = 2'-fluoroadenosine-3'-phosphate
  modified_base 17: mod_base = OTHER; note = 2'-O-methyladenosine-3'-phosphate
  modified_base 18: mod_base = OTHER; note = 2'-O-methylguanosine-3'-phosphate
  modified_base 19: mod_base = OTHER; note = 2'-O-methyladenosine-3'-phosphate
  modified_base 20: mod_base = OTHER; note = 2'-O-methyladenosine-3'-phosphate
  modified_base 21: mod_base = OTHER; note = 2'-O-methyladenosine-3'-phosphorothioate
  modified_base 22: mod_base = OTHER; note = 2'-O-methyluridine-3'-phosphorothioate
  modified_base 23: mod_base = OTHER; note = 2'-O-methylguanosine-3'-phosphate
agagggaacagggataagaaatg

SEQ ID NO: 5337 - RNA, 23 nt, synthetic construct
  source 1..23: mol_type = other RNA
  modified_base 1: mod_base = OTHER; note = 2'-O-methyladenosine-3'-phosphorothioate
  modified_base 2: mod_base = OTHER; note = 2'-fluoroadenosine-3'-phosphorothioate
  modified_base 3: mod_base = OTHER; note = 2'-O-methyladenosine-3'-phosphate
  modified_base 4: mod_base = OTHER; note = 2'-O-methylcytidine-3'-phosphate
  modified_base 5: mod_base = OTHER; note = 2'-O-methylcytidine-3'-phosphate
  modified_base 6: mod_base = OTHER; note = 2'-fluoroadenosine-3'-phosphate
  modified_base 7: mod_base = OTHER; note = 2'-O-methyluridine-3'-phosphate
  modified_base 8: mod_base = OTHER; note = 2'-fluoroguanosine-3'-phosphate
  modified_base 9: mod_base = OTHER; note = 2'-fluoroadenosine-3'-phosphate
  modified_base 10: mod_base = OTHER; note = 2'-O-methylcytidine-3'-phosphate
  modified_base 11: mod_base = OTHER; note = 2'-O-methyladenosine-3'-phosphate
  modified_base 12: mod_base = OTHER; note = 2'-O-methylcytidine-3'-phosphate
  modified_base 13: mod_base = OTHER; note = 2'-O-methylcytidine-3'-phosphate
  modified_base 14: mod_base = OTHER; note = 2'-fluorouridine-3'-phosphate
  modified_base 15: mod_base = OTHER; note = 2'-O-methyladenosine-3'-phosphate
  modified_base 16: mod_base = OTHER; note = 2'-fluoroguanosine-3'-phosphate
  modified_base 17: mod_base = OTHER; note = 2'-O-methyladenosine-3'-phosphate
  modified_base 18: mod_base = OTHER; note = 2'-O-methylcytidine-3'-phosphate
  modified_base 19: mod_base = OTHER; note = 2'-O-methyladenosine-3'-phosphate
  modified_base 20: mod_base = OTHER; note = 2'-O-methylguanosine-3'-phosphate
  modified_base 21: mod_base = OTHER; note = 2'-O-methyladenosine-3'-phosphorothioate
  modified_base 22: mod_base = OTHER; note = 2'-O-methylguanosine-3'-phosphorothioate
  modified_base 23: mod_base = OTHER; note = 2'-O-methyladenosine-3'-phosphate
aaaccatgacacctagacagaga

SEQ ID NO: 5338 - RNA, 23 nt, synthetic construct
  source 1..23: mol_type = other RNA
  modified_base 1: mod_base = OTHER; note = 2'-O-methyladenosine-3'-phosphorothioate
  modified_base 2: mod_base = OTHER; note = 2'-fluoroadenosine-3'-phosphorothioate
  modified_base 3: mod_base = OTHER; note = 2'-O-methyladenosine-3'-phosphate
  modified_base 4: mod_base = OTHER; note = 2'-O-methyluridine-3'-phosphate
  modified_base 5: mod_base = OTHER; note = 2'-O-methyladenosine-3'-phosphate
  modified_base 6: mod_base = OTHER; note = 2'-fluoroguanosine-3'-phosphate
  modified_base 7: mod_base = OTHER; note = 2'-O-methylcytidine-3'-phosphate
  modified_base 8: mod_base = OTHER; note = 2'-fluorocytidine-3'-phosphate
  modified_base 9: mod_base = OTHER; note = 2'-fluoroadenosine-3'-phosphate
  modified_base 10: mod_base = OTHER; note = 2'-O-methylcytidine-3'-phosphate
  modified_base 11: mod_base = OTHER; note = 2'-O-methyladenosine-3'-phosphate
  modified_base 12: mod_base = OTHER; note = 2'-O-methylguanosine-3'-phosphate
  modified_base 13: mod_base = OTHER; note = 2'-O-methyluridine-3'-phosphate
  modified_base 14: mod_base = OTHER; note = 2'-fluorouridine-3'-phosphate
  modified_base 15: mod_base = OTHER; note = 2'-O-methyladenosine-3'-phosphate
  modified_base 16: mod_base = OTHER; note = 2'-fluorocytidine-3'-phosphate
  modified_base 17: mod_base = OTHER; note = 2'-O-methyladenosine-3'-phosphate
  modified_base 18: mod_base = OTHER; note = 2'-O-methylcytidine-3'-phosphate
  modified_base 19: mod_base = OTHER; note = 2'-O-methyladenosine-3'-phosphate
  modified_base 20: mod_base = OTHER; note = 2'-O-methylguanosine-3'-phosphate
  modified_base 21: mod_base = OTHER; note = 2'-O-methyladenosine-3'-phosphorothioate
  modified_base 22: mod_base = OTHER; note = 2'-O-methyladenosine-3'-phosphorothioate
  modified_base 23: mod_base = OTHER; note = 2'-O-methylcytidine-3'-phosphate
aaatagccacagttacacagaac

SEQ ID NO: 5339 - RNA, 23 nt, synthetic construct
  source 1..23: mol_type = other RNA
  modified_base 1: mod_base = OTHER; note = 2'-O-methyladenosine-3'-phosphorothioate
  modified_base 2: mod_base = OTHER; note = 2'-fluorouridine -3'-phosphorothioate
  modified_base 3: mod_base = OTHER; note = 2'-O-methyladenosine-3'-phosphate
  modified_base 4: mod_base = OTHER; note = 2'-O-methylguanosine-3'-phosphate
  modified_base 5: mod_base = OTHER; note = 2'-O-methyluridine-3'-phosphate
  modified_base 6: mod_base = OTHER; note = 2'-fluoroguanosine-3'-phosphate
  modified_base 7: mod_base = OTHER; note = 2'-O-methyluridine-3'-phosphate
  modified_base 8: mod_base = OTHER; note = 2'-fluoroadenosine-3'-phosphate
  modified_base 9: mod_base = OTHER; note = 2'-fluoroguanosine-3'-phosphate
  modified_base 10: mod_base = OTHER; note = 2'-O-methylguanosine-3'-phosphate
  modified_base 11: mod_base = OTHER; note = 2'-O-methylguanosine-3'-phosphate
  modified_base 12: mod_base = OTHER; note = 2'-O-methyladenosine-3'-phosphate
  modified_base 13: mod_base = OTHER; note = 2'-O-methylcytidine-3'-phosphate
  modified_base 14: mod_base = OTHER; note = 2'-fluoroadenosine-3'-phosphate
  modified_base 15: mod_base = OTHER; note = 2'-O-methylcytidine-3'-phosphate
  modified_base 16: mod_base = OTHER; note = 2'-fluoroadenosine-3'-phosphate
  modified_base 17: mod_base = OTHER; note = 2'-O-methylguanosine-3'-phosphate
  modified_base 18: mod_base = OTHER; note = 2'-O-methyladenosine-3'-phosphate
  modified_base 19: mod_base = OTHER; note = 2'-O-methyladenosine-3'-phosphate
  modified_base 20: mod_base = OTHER; note = 2'-O-methyluridine-3'-phosphate
  modified_base 21: mod_base = OTHER; note = 2'-O-methyladenosine-3'-phosphorothioate
  modified_base 22: mod_base = OTHER; note = 2'-O-methylguanosine-3'-phosphorothioate
  modified_base 23: mod_base = OTHER; note = 2'-O-methylcytidine-3'-phosphate
atagtgtagggacacagaatagc

SEQ ID NO: 5340 - RNA, 23 nt, synthetic construct
  source 1..23: mol_type = other RNA
  modified_base 1: mod_base = OTHER; note = 2'-O-methyladenosine-3'-phosphorothioate
  modified_base 2: mod_base = OTHER; note = 2'-fluoroadenosine-3'-phosphorothioate
  modified_base 3: mod_base = OTHER; note = 2'-O-methylguanosine-3'-phosphate
  modified_base 4: mod_base = OTHER; note = 2'-O-methyluridine-3'-phosphate
  modified_base 5: mod_base = OTHER; note = 2'-O-methyluridine-3'-phosphate
  modified_base 6: mod_base = OTHER; note = 2'-fluoroadenosine-3'-phosphate
  modified_base 7: mod_base = OTHER; note = 2'-O-methyluridine-3'-phosphate
  modified_base 8: mod_base = OTHER; note = 2'-fluoroadenosine-3'-phosphate
  modified_base 9: mod_base = OTHER; note = 2'-fluorouridine-3'-phosphate
  modified_base 10: mod_base = OTHER; note = 2'-O-methylcytidine-3'-phosphate
  modified_base 11: mod_base = OTHER; note = 2'-O-methyladenosine-3'-phosphate
  modified_base 12: mod_base = OTHER; note = 2'-O-methylguanosine-3'-phosphate
  modified_base 13: mod_base = OTHER; note = 2'-O-methyladenosine-3'-phosphate
  modified_base 14: mod_base = OTHER; note = 2'-fluoroadenosine-3'-phosphate
  modified_base 15: mod_base = OTHER; note = 2'-O-methyluridine-3'-phosphate
  modified_base 16: mod_base = OTHER; note = 2'-fluoroguanosine-3'-phosphate
  modified_base 17: mod_base = OTHER; note = 2'-O-methyluridine-3'-phosphate
  modified_base 18: mod_base = OTHER; note = 2'-O-methyladenosine-3'-phosphate
  modified_base 19: mod_base = OTHER; note = 2'-O-methylguanosine-3'-phosphate
  modified_base 20: mod_base = OTHER; note = 2'-O-methylguanosine-3'-phosphate
  modified_base 21: mod_base = OTHER; note = 2'-O-methylcytidine-3'-phosphorothioate
  modified_base 22: mod_base = OTHER; note = 2'-O-methyladenosine-3'-phosphorothioate
  modified_base 23: mod_base = OTHER; note = 2'-O-methylguanosine-3'-phosphate
aagttatatcagaatgtaggcag

SEQ ID NO: 5341 - RNA, 23 nt, synthetic construct
  source 1..23: mol_type = other RNA
  modified_base 1: mod_base = OTHER; note = 2'-O-methyladenosine-3'-phosphorothioate
  modified_base 2: mod_base = OTHER; note = 2'-fluorocytidine-3'-phosphorothioate
  modified_base 3: mod_base = OTHER; note = 2'-O-methyladenosine-3'-phosphate
  modified_base 4: mod_base = OTHER; note = 2'-O-methyladenosine-3'-phosphate
  modified_base 5: mod_base = OTHER; note = 2'-O-methylguanosine-3'-phosphate
  modified_base 6: mod_base = OTHER; note = 2'-fluoroadenosine-3'-phosphate
  modified_base 7: mod_base = OTHER; note = 2'-O-methyluridine-3'-phosphate
  modified_base 8: mod_base = OTHER; note = 2'-fluoroadenosine-3'-phosphate
  modified_base 9: mod_base = OTHER; note = 2'-fluoroguanosine-3'-phosphate
  modified_base 10: mod_base = OTHER; note = 2'-O-methyladenosine-3'-phosphate
  modified_base 11: mod_base = OTHER; note = 2'-O-methyladenosine-3'-phosphate
  modified_base 12: mod_base = OTHER; note = 2'-O-methyladenosine-3'-phosphate
  modified_base 13: mod_base = OTHER; note = 2'-O-methylguanosine-3'-phosphate
  modified_base 14: mod_base = OTHER; note = 2'-fluorocytidine-3'-phosphate
  modified_base 15: mod_base = OTHER; note = 2'-O-methylcytidine-3'-phosphate
  modified_base 16: mod_base = OTHER; note = 2'-fluorouridine-3'-phosphate
  modified_base 17: mod_base = OTHER; note = 2'-O-methyluridine-3'-phosphate
  modified_base 18: mod_base = OTHER; note = 2'-O-methyluridine-3'-phosphate
  modified_base 19: mod_base = OTHER; note = 2'-O-methyladenosine-3'-phosphate
  modified_base 20: mod_base = OTHER; note = 2'-O-methylguanosine-3'-phosphate
  modified_base 21: mod_base = OTHER; note = 2'-O-methylguanosine-3'-phosphorothioate
  modified_base 22: mod_base = OTHER; note = 2'-O-methyladenosine-3'-phosphorothioate
  modified_base 23: mod_base = OTHER; note = 2'-O-methylcytidine-3'-phosphate
acaagatagaaagcctttaggac

SEQ ID NO: 5342 - RNA, 23 nt, synthetic construct
  source 1..23: mol_type = other RNA
  modified_base 1: mod_base = OTHER; note = 2'-O-methyladenosine-3'-phosphorothioate
  modified_base 2: mod_base = OTHER; note = 2'-fluoroadenosine-3'-phosphorothioate
  modified_base 3: mod_base = OTHER; note = 2'-O-methyladenosine-3'-phosphate
  modified_base 4: mod_base = OTHER; note = 2'-O-methylcytidine-3'-phosphate
  modified_base 5: mod_base = OTHER; note = 2'-O-methylcytidine-3'-phosphate
  modified_base 6: mod_base = OTHER; note = 2'-fluoroadenosine-3'-phosphate
  modified_base 7: mod_base = OTHER; note = 2'-O-methylguanosine-3'-phosphate
  modified_base 8: mod_base = OTHER; note = 2'-fluorouridine-3'-phosphate
  modified_base 9: mod_base = OTHER; note = 2'-fluoroadenosine-3'-phosphate
  modified_base 10: mod_base = OTHER; note = 2'-O-methyluridine-3'-phosphate
  modified_base 11: mod_base = OTHER; note = 2'-O-methylguanosine-3'-phosphate
  modified_base 12: mod_base = OTHER; note = 2'-O-methyladenosine-3'-phosphate
  modified_base 13: mod_base = OTHER; note = 2'-O-methylguanosine-3'-phosphate
  modified_base 14: mod_base = OTHER; note = 2'-fluoroadenosine-3'-phosphate
  modified_base 15: mod_base = OTHER; note = 2'-O-methyluridine-3'-phosphate
  modified_base 16: mod_base = OTHER; note = 2'-fluoroguanosine-3'-phosphate
  modified_base 17: mod_base = OTHER; note = 2'-O-methyluridine-3'-phosphate
  modified_base 18: mod_base = OTHER; note = 2'-O-methyluridine-3'-phosphate
  modified_base 19: mod_base = OTHER; note = 2'-O-methylguanosine-3'-phosphate
  modified_base 20: mod_base = OTHER; note = 2'-O-methyladenosine-3'-phosphate
  modified_base 21: mod_base = OTHER; note = 2'-O-methylguanosine-3'-phosphorothioate
  modified_base 22: mod_base = OTHER; note = 2'-O-methylguanosine-3'-phosphorothioate
  modified_base 23: mod_base = OTHER; note = 2'-O-methylcytidine-3'-phosphate
aaaccagtatgagatgttgaggc

SEQ ID NO: 5343 - RNA, 23 nt, synthetic construct
  source 1..23: mol_type = other RNA
  modified_base 1: mod_base = OTHER; note = 2'-O-methyladenosine-3'-phosphorothioate
  modified_base 2: mod_base = OTHER; note = 2'-fluorouridine -3'-phosphorothioate
  modified_base 3: mod_base = OTHER; note = 2'-O-methyladenosine-3'-phosphate
  modified_base 4: mod_base = OTHER; note = 2'-O-methylguanosine-3'-phosphate
  modified_base 5: mod_base = OTHER; note = 2'-O-methylguanosine-3'-phosphate
  modified_base 6: mod_base = OTHER; note = 2'-fluorocytidine-3'-phosphate
  modified_base 7: mod_base = OTHER; note = 2'-O-methyladenosine-3'-phosphate
  modified_base 8: mod_base = OTHER; note = 2'-fluoroguanosine-3'-phosphate
  modified_base 9: mod_base = OTHER; note = 2'-fluoroadenosine-3'-phosphate
  modified_base 10: mod_base = OTHER; note = 2'-O-methylguanosine-3'-phosphate
  modified_base 11: mod_base = OTHER; note = 2'-O-methyluridine-3'-phosphate
  modified_base 12: mod_base = OTHER; note = 2'-O-methyluridine-3'-phosphate
  modified_base 13: mod_base = OTHER; note = 2'-O-methyladenosine-3'-phosphate
  modified_base 14: mod_base = OTHER; note = 2'-fluoroadenosine-3'-phosphate
  modified_base 15: mod_base = OTHER; note = 2'-O-methylguanosine-3'-phosphate
  modified_base 16: mod_base = OTHER; note = 2'-fluoroguanosine-3'-phosphate
  modified_base 17: mod_base = OTHER; note = 2'-O-methylguanosine-3'-phosphate
  modified_base 18: mod_base = OTHER; note = 2'-O-methyladenosine-3'-phosphate
  modified_base 19: mod_base = OTHER; note = 2'-O-methyladenosine-3'-phosphate
  modified_base 20: mod_base = OTHER; note = 2'-O-methylcytidine-3'-phosphate
  modified_base 21: mod_base = OTHER; note = 2'-O-methylcytidine-3'-phosphorothioate
  modified_base 22: mod_base = OTHER; note = 2'-O-methyladenosine-3'-phosphorothioate
  modified_base 23: mod_base = OTHER; note = 2'-O-methylguanosine-3'-phosphate
ataggcagagttaagggaaccag

SEQ ID NO: 5344 - RNA, 23 nt, synthetic construct
  source 1..23: mol_type = other RNA
  modified_base 1: mod_base = OTHER; note = 2'-O-methyladenosine-3'-phosphorothioate
  modified_base 2: mod_base = OTHER; note = 2'-fluoroadenosine-3'-phosphorothioate
  modified_base 3: mod_base = OTHER; note = 2'-O-methyluridine-3'-phosphate
  modified_base 4: mod_base = OTHER; note = 2'-O-methyluridine-3'-phosphate
  modified_base 5: mod_base = OTHER; note = 2'-O-methyladenosine-3'-phosphate
  modified_base 6: mod_base = OTHER; note = 2'-fluorouridine-3'-phosphate
  modified_base 7: mod_base = OTHER; note = 2'-O-methyluridine-3'-phosphate
  modified_base 8: mod_base = OTHER; note = 2'-fluorouridine-3'-phosphate
  modified_base 9: mod_base = OTHER; note = 2'-fluoroadenosine-3'-phosphate
  modified_base 10: mod_base = OTHER; note = 2'-O-methylcytidine-3'-phosphate
  modified_base 11: mod_base = OTHER; note = 2'-O-methyladenosine-3'-phosphate
  modified_base 12: mod_base = OTHER; note = 2'-O-methylguanosine-3'-phosphate
  modified_base 13: mod_base = OTHER; note = 2'-O-methyladenosine-3'-phosphate
  modified_base 14: mod_base = OTHER; note = 2'-fluoroguanosine-3'-phosphate
  modified_base 15: mod_base = OTHER; note = 2'-O-methylguanosine-3'-phosphate
  modified_base 16: mod_base = OTHER; note = 2'-fluorouridine-3'-phosphate
  modified_base 17: mod_base = OTHER; note = 2'-O-methyladenosine-3'-phosphate
  modified_base 18: mod_base = OTHER; note = 2'-O-methyluridine-3'-phosphate
  modified_base 19: mod_base = OTHER; note = 2'-O-methyladenosine-3'-phosphate
  modified_base 20: mod_base = OTHER; note = 2'-O-methylguanosine-3'-phosphate
  modified_base 21: mod_base = OTHER; note = 2'-O-methylguanosine-3'-phosphorothioate
  modified_base 22: mod_base = OTHER; note = 2'-O-methylcytidine-3'-phosphorothioate
  modified_base 23: mod_base = OTHER; note = 2'-O-methyladenosine-3'-phosphate
aattatttacagaggtataggca

SEQ ID NO: 5345 - RNA, 23 nt, synthetic construct
  source 1..23: mol_type = other RNA
  modified_base 1: mod_base = OTHER; note = 2'-O-methyladenosine-3'-phosphorothioate
  modified_base 2: mod_base = OTHER; note = 2'-fluoroadenosine-3'-phosphorothioate
  modified_base 3: mod_base = OTHER; note = 2'-O-methylguanosine-3'-phosphate
  modified_base 4: mod_base = OTHER; note = 2'-O-methyladenosine-3'-phosphate
  modified_base 5: mod_base = OTHER; note = 2'-O-methyladenosine-3'-phosphate
  modified_base 6: mod_base = OTHER; note = 2'-fluorocytidine-3'-phosphate
  modified_base 7: mod_base = OTHER; note = 2'-O-methyluridine-3'-phosphate
  modified_base 8: mod_base = OTHER; note = 2'-fluorouridine-3'-phosphate
  modified_base 9: mod_base = OTHER; note = 2'-fluoroadenosine-3'-phosphate
  modified_base 10: mod_base = OTHER; note = 2'-O-methylguanosine-3'-phosphate
  modified_base 11: mod_base = OTHER; note = 2'-O-methyluridine-3'-phosphate
  modified_base 12: mod_base = OTHER; note = 2'-O-methylguanosine-3'-phosphate
  modified_base 13: mod_base = OTHER; note = 2'-O-methyladenosine-3'-phosphate
  modified_base 14: mod_base = OTHER; note = 2'-fluoroadenosine-3'-phosphate
  modified_base 15: mod_base = OTHER; note = 2'-O-methylguanosine-3'-phosphate
  modified_base 16: mod_base = OTHER; note = 2'-fluoroguanosine-3'-phosphate
  modified_base 17: mod_base = OTHER; note = 2'-O-methyladenosine-3'-phosphate
  modified_base 18: mod_base = OTHER; note = 2'-O-methyladenosine-3'-phosphate
  modified_base 19: mod_base = OTHER; note = 2'-O-methyluridine-3'-phosphate
  modified_base 20: mod_base = OTHER; note = 2'-O-methyluridine-3'-phosphate
  modified_base 21: mod_base = OTHER; note = 2'-O-methyladenosine-3'-phosphorothioate
  modified_base 22: mod_base = OTHER; note = 2'-O-methyluridine-3'-phosphorothioate
  modified_base 23: mod_base = OTHER; note = 2'-O-methyluridine-3'-phosphate
aagaacttagtgaaggaattatt

SEQ ID NO: 5346 - RNA, 23 nt, synthetic construct
  source 1..23: mol_type = other RNA
  modified_base 1: mod_base = OTHER; note = 2'-O-methyladenosine-3'-phosphorothioate
  modified_base 2: mod_base = OTHER; note = 2'-fluorouridine -3'-phosphorothioate
  modified_base 3: mod_base = OTHER; note = 2'-O-methylguanosine-3'-phosphate
  modified_base 4: mod_base = OTHER; note = 2'-O-methyluridine-3'-phosphate
  modified_base 5: mod_base = OTHER; note = 2'-O-methyladenosine-3'-phosphate
  modified_base 6: mod_base = OTHER; note = 2'-fluoroguanosine-3'-phosphate
  modified_base 7: mod_base = OTHER; note = 2'-O-methylguanosine-3'-phosphate
  modified_base 8: mod_base = OTHER; note = 2'-fluoroadenosine-3'-phosphate
  modified_base 9: mod_base = OTHER; note = 2'-fluoroguanosine-3'-phosphate
  modified_base 10: mod_base = OTHER; note = 2'-O-methyladenosine-3'-phosphate
  modified_base 11: mod_base = OTHER; note = 2'-O-methyluridine-3'-phosphate
  modified_base 12: mod_base = OTHER; note = 2'-O-methyladenosine-3'-phosphate
  modified_base 13: mod_base = OTHER; note = 2'-O-methylguanosine-3'-phosphate
  modified_base 14: mod_base = OTHER; note = 2'-fluoroadenosine-3'-phosphate
  modified_base 15: mod_base = OTHER; note = 2'-O-methylguanosine-3'-phosphate
  modified_base 16: mod_base = OTHER; note = 2'-fluoroguanosine-3'-phosphate
  modified_base 17: mod_base = OTHER; note = 2'-O-methyladenosine-3'-phosphate
  modified_base 18: mod_base = OTHER; note = 2'-O-methylcytidine-3'-phosphate
  modified_base 19: mod_base = OTHER; note = 2'-O-methyluridine-3'-phosphate
  modified_base 20: mod_base = OTHER; note = 2'-O-methyluridine-3'-phosphate
  modified_base 21: mod_base = OTHER; note = 2'-O-methyluridine-3'-phosphorothioate
  modified_base 22: mod_base = OTHER; note = 2'-O-methyluridine-3'-phosphorothioate
  modified_base 23: mod_base = OTHER; note = 2'-O-methylcytidine-3'-phosphate
atgtaggagatagaggacttttc

SEQ ID NO: 5347 - RNA, 23 nt, synthetic construct
  source 1..23: mol_type = other RNA
  modified_base 1: mod_base = OTHER; note = 2'-O-methyladenosine-3'-phosphorothioate
  modified_base 2: mod_base = OTHER; note = 2'-fluorouridine -3'-phosphorothioate
  modified_base 3: mod_base = OTHER; note = 2'-O-methylguanosine-3'-phosphate
  modified_base 4: mod_base = OTHER; note = 2'-O-methylcytidine-3'-phosphate
  modified_base 5: mod_base = OTHER; note = 2'-O-methylcytidine-3'-phosphate
  modified_base 6: mod_base = OTHER; note = 2'-fluoroadenosine-3'-phosphate
  modified_base 7: mod_base = OTHER; note = 2'-O-methylguanosine-3'-phosphate
  modified_base 8: mod_base = OTHER; note = 2'-fluorouridine-3'-phosphate
  modified_base 9: mod_base = OTHER; note = 2'-fluorouridine-3'-phosphate
  modified_base 10: mod_base = OTHER; note = 2'-O-methyladenosine-3'-phosphate
  modified_base 11: mod_base = OTHER; note = 2'-O-methylguanosine-3'-phosphate
  modified_base 12: mod_base = OTHER; note = 2'-O-methylguanosine-3'-phosphate
  modified_base 13: mod_base = OTHER; note = 2'-O-methylguanosine-3'-phosphate
  modified_base 14: mod_base = OTHER; note = 2'-fluorocytidine-3'-phosphate
  modified_base 15: mod_base = OTHER; note = 2'-O-methylcytidine-3'-phosphate
  modified_base 16: mod_base = OTHER; note = 2'-fluorocytidine-3'-phosphate
  modified_base 17: mod_base = OTHER; note = 2'-O-methyluridine-3'-phosphate
  modified_base 18: mod_base = OTHER; note = 2'-O-methyluridine-3'-phosphate
  modified_base 19: mod_base = OTHER; note = 2'-O-methylguanosine-3'-phosphate
  modified_base 20: mod_base = OTHER; note = 2'-O-methyluridine-3'-phosphate
  modified_base 21: mod_base = OTHER; note = 2'-O-methyladenosine-3'-phosphorothioate
  modified_base 22: mod_base = OTHER; note = 2'-O-methylguanosine-3'-phosphorothioate
  modified_base 23: mod_base = OTHER; note = 2'-O-methylguanosine-3'-phosphate
atgccagttagggcccttgtagg

SEQ ID NO: 5348 - RNA, 23 nt, synthetic construct
  source 1..23: mol_type = other RNA
  modified_base 1: mod_base = OTHER; note = 2'-O-methyladenosine-3'-phosphorothioate
  modified_base 2: mod_base = OTHER; note = 2'-fluoroguanosine-3'-phosphorothioate
  modified_base 3: mod_base = OTHER; note = 2'-O-methylguanosine-3'-phosphate
  modified_base 4: mod_base = OTHER; note = 2'-O-methylcytidine-3'-phosphate
  modified_base 5: mod_base = OTHER; note = 2'-O-methyladenosine-3'-phosphate
  modified_base 6: mod_base = OTHER; note = 2'-fluoroguanosine-3'-phosphate
  modified_base 7: mod_base = OTHER; note = 2'-O-methylguanosine-3'-phosphate
  modified_base 8: mod_base = OTHER; note = 2'-fluorocytidine-3'-phosphate
  modified_base 9: mod_base = OTHER; note = 2'-fluorouridine-3'-phosphate
  modified_base 10: mod_base = OTHER; note = 2'-O-methylcytidine-3'-phosphate
  modified_base 11: mod_base = OTHER; note = 2'-O-methyluridine-3'-phosphate
  modified_base 12: mod_base = OTHER; note = 2'-O-methylguanosine-3'-phosphate
  modified_base 13: mod_base = OTHER; note = 2'-O-methyluridine-3'-phosphate
  modified_base 14: mod_base = OTHER; note = 2'-fluoroguanosine-3'-phosphate
  modified_base 15: mod_base = OTHER; note = 2'-O-methyluridine-3'-phosphate
  modified_base 16: mod_base = OTHER; note = 2'-fluorocytidine-3'-phosphate
  modified_base 17: mod_base = OTHER; note = 2'-O-methyladenosine-3'-phosphate
  modified_base 18: mod_base = OTHER; note = 2'-O-methyluridine-3'-phosphate
  modified_base 19: mod_base = OTHER; note = 2'-O-methylcytidine-3'-phosphate
  modified_base 20: mod_base = OTHER; note = 2'-O-methyluridine-3'-phosphate
  modified_base 21: mod_base = OTHER; note = 2'-O-methylguanosine-3'-phosphorothioate
  modified_base 22: mod_base = OTHER; note = 2'-O-methylguanosine-3'-phosphorothioate
  modified_base 23: mod_base = OTHER; note = 2'-O-methylguanosine-3'-phosphate
aggcaggctctgtgtcatctggg

SEQ ID NO: 5349 - RNA, 23 nt, synthetic construct
  source 1..23: mol_type = other RNA
  modified_base 1: mod_base = OTHER; note = 2'-O-methyladenosine-3'-phosphorothioate
  modified_base 2: mod_base = OTHER; note = 2'-fluoroguanosine-3'-phosphorothioate
  modified_base 3: mod_base = OTHER; note = 2'-O-methylcytidine-3'-phosphate
  modified_base 4: mod_base = OTHER; note = 2'-O-methyladenosine-3'-phosphate
  modified_base 5: mod_base = OTHER; note = 2'-O-methylguanosine-3'-phosphate
  modified_base 6: mod_base = OTHER; note = 2'-fluoroadenosine-3'-phosphate
  modified_base 7: mod_base = OTHER; note = 2'-O-methylcytidine-3'-phosphate
  modified_base 8: mod_base = OTHER; note = 2'-fluorouridine-3'-phosphate
  modified_base 9: mod_base = OTHER; note = 2'-fluoroadenosine-3'-phosphate
  modified_base 10: mod_base = OTHER; note = 2'-O-methylcytidine-3'-phosphate
  modified_base 11: mod_base = OTHER; note = 2'-O-methyladenosine-3'-phosphate
  modified_base 12: mod_base = OTHER; note = 2'-O-methylguanosine-3'-phosphate
  modified_base 13: mod_base = OTHER; note = 2'-O-methylcytidine-3'-phosphate
  modified_base 14: mod_base = OTHER; note = 2'-fluoroadenosine-3'-phosphate
  modified_base 15: mod_base = OTHER; note = 2'-O-methyluridine-3'-phosphate
  modified_base 16: mod_base = OTHER; note = 2'-fluoroadenosine-3'-phosphate
  modified_base 17: mod_base = OTHER; note = 2'-O-methyladenosine-3'-phosphate
  modified_base 18: mod_base = OTHER; note = 2'-O-methylguanosine-3'-phosphate
  modified_base 19: mod_base = OTHER; note = 2'-O-methylcytidine-3'-phosphate
  modified_base 20: mod_base = OTHER; note = 2'-O-methyladenosine-3'-phosphate
  modified_base 21: mod_base = OTHER; note = 2'-O-methylguanosine-3'-phosphorothioate
  modified_base 22: mod_base = OTHER; note = 2'-O-methylguanosine-3'-phosphorothioate
  modified_base 23: mod_base = OTHER; note = 2'-O-methylcytidine-3'-phosphate
agcagactacagcataagcaggc

SEQ ID NO: 5350 - RNA, 23 nt, synthetic construct
  source 1..23: mol_type = other RNA
  modified_base 1: mod_base = OTHER; note = 2'-O-methyladenosine-3'-phosphorothioate
  modified_base 2: mod_base = OTHER; note = 2'-fluoroadenosine-3'-phosphorothioate
  modified_base 3: mod_base = OTHER; note = 2'-O-methyluridine-3'-phosphate
  modified_base 4: mod_base = OTHER; note = 2'-O-methylguanosine-3'-phosphate
  modified_base 5: mod_base = OTHER; note = 2'-O-methyluridine-3'-phosphate
  modified_base 6: mod_base = OTHER; note = 2'-fluoroguanosine-3'-phosphate
  modified_base 7: mod_base = OTHER; note = 2'-O-methyladenosine-3'-phosphate
  modified_base 8: mod_base = OTHER; note = 2'-fluoroadenosine-3'-phosphate
  modified_base 9: mod_base = OTHER; note = 2'-fluoroguanosine-3'-phosphate
  modified_base 10: mod_base = OTHER; note = 2'-O-methyladenosine-3'-phosphate
  modified_base 11: mod_base = OTHER; note = 2'-O-methylguanosine-3'-phosphate
  modified_base 12: mod_base = OTHER; note = 2'-O-methyladenosine-3'-phosphate
  modified_base 13: mod_base = OTHER; note = 2'-O-methylcytidine-3'-phosphate
  modified_base 14: mod_base = OTHER; note = 2'-fluoroadenosine-3'-phosphate
  modified_base 15: mod_base = OTHER; note = 2'-O-methylguanosine-3'-phosphate
  modified_base 16: mod_base = OTHER; note = 2'-fluorocytidine-3'-phosphate
  modified_base 17: mod_base = OTHER; note = 2'-O-methyladenosine-3'-phosphate
  modified_base 18: mod_base = OTHER; note = 2'-O-methylguanosine-3'-phosphate
  modified_base 19: mod_base = OTHER; note = 2'-O-methyladenosine-3'-phosphate
  modified_base 20: mod_base = OTHER; note = 2'-O-methylguanosine-3'-phosphate
  modified_base 21: mod_base = OTHER; note = 2'-O-methyluridine-3'-phosphorothioate
  modified_base 22: mod_base = OTHER; note = 2'-O-methyladenosine-3'-phosphorothioate
  modified_base 23: mod_base = OTHER; note = 2'-O-methylguanosine-3'-phosphate
aatgtgaagagacagcagagtag

SEQ ID NO: 5351 - RNA, 23 nt, synthetic construct
  source 1..23: mol_type = other RNA
  modified_base 1: mod_base = OTHER; note = 2'-O-methyladenosine-3'-phosphorothioate
  modified_base 2: mod_base = OTHER; note = 2'-fluorouridine -3'-phosphorothioate
  modified_base 3: mod_base = OTHER; note = 2'-O-methyluridine-3'-phosphate
  modified_base 4: mod_base = OTHER; note = 2'-O-methylcytidine-3'-phosphate
  modified_base 5: mod_base = OTHER; note = 2'-O-methyladenosine-3'-phosphate
  modified_base 6: mod_base = OTHER; note = 2'-fluoroguanosine-3'-phosphate
  modified_base 7: mod_base = OTHER; note = 2'-O-methyluridine-3'-phosphate
  modified_base 8: mod_base = OTHER; note = 2'-fluorouridine-3'-phosphate
  modified_base 9: mod_base = OTHER; note = 2'-fluorocytidine-3'-phosphate
  modified_base 10: mod_base = OTHER; note = 2'-O-methyluridine-3'-phosphate
  modified_base 11: mod_base = OTHER; note = 2'-O-methylguanosine-3'-phosphate
  modified_base 12: mod_base = OTHER; note = 2'-O-methyladenosine-3'-phosphate
  modified_base 13: mod_base = OTHER; note = 2'-O-methylguanosine-3'-phosphate
  modified_base 14: mod_base = OTHER; note = 2'-fluoroguanosine-3'-phosphate
  modified_base 15: mod_base = OTHER; note = 2'-O-methyladenosine-3'-phosphate
  modified_base 16: mod_base = OTHER; note = 2'-fluoroguanosine-3'-phosphate
  modified_base 17: mod_base = OTHER; note = 2'-O-methyladenosine-3'-phosphate
  modified_base 18: mod_base = OTHER; note = 2'-O-methylcytidine-3'-phosphate
  modified_base 19: mod_base = OTHER; note = 2'-O-methylcytidine-3'-phosphate
  modified_base 20: mod_base = OTHER; note = 2'-O-methyladenosine-3'-phosphate
  modified_base 21: mod_base = OTHER; note = 2'-O-methyluridine-3'-phosphorothioate
  modified_base 22: mod_base = OTHER; note = 2'-O-methylguanosine-3'-phosphorothioate
  modified_base 23: mod_base = OTHER; note = 2'-O-methyluridine-3'-phosphate
attcagttctgaggagaccatgt

SEQ ID NO: 5352 - RNA, 23 nt, synthetic construct
  source 1..23: mol_type = other RNA
  modified_base 1: mod_base = OTHER; note = 2'-O-methyladenosine-3'-phosphorothioate
  modified_base 2: mod_base = OTHER; note = 2'-fluoroguanosine-3'-phosphorothioate
  modified_base 3: mod_base = OTHER; note = 2'-O-methyluridine-3'-phosphate
  modified_base 4: mod_base = OTHER; note = 2'-O-methylguanosine-3'-phosphate
  modified_base 5: mod_base = OTHER; note = 2'-O-methyladenosine-3'-phosphate
  modified_base 6: mod_base = OTHER; note = 2'-fluoroguanosine-3'-phosphate
  modified_base 7: mod_base = OTHER; note = 2'-O-methyladenosine-3'-phosphate
  modified_base 8: mod_base = OTHER; note = 2'-fluorouridine-3'-phosphate
  modified_base 9: mod_base = OTHER; note = 2'-fluoroguanosine-3'-phosphate
  modified_base 10: mod_base = OTHER; note = 2'-O-methylguanosine-3'-phosphate
  modified_base 11: mod_base = OTHER; note = 2'-O-methyladenosine-3'-phosphate
  modified_base 12: mod_base = OTHER; note = 2'-O-methyluridine-3'-phosphate
  modified_base 13: mod_base = OTHER; note = 2'-O-methyladenosine-3'-phosphate
  modified_base 14: mod_base = OTHER; note = 2'-fluorocytidine-3'-phosphate
  modified_base 15: mod_base = OTHER; note = 2'-O-methyladenosine-3'-phosphate
  modified_base 16: mod_base = OTHER; note = 2'-fluoroadenosine-3'-phosphate
  modified_base 17: mod_base = OTHER; note = 2'-O-methyluridine-3'-phosphate
  modified_base 18: mod_base = OTHER; note = 2'-O-methyladenosine-3'-phosphate
  modified_base 19: mod_base = OTHER; note = 2'-O-methylguanosine-3'-phosphate
  modified_base 20: mod_base = OTHER; note = 2'-O-methyluridine-3'-phosphate
  modified_base 21: mod_base = OTHER; note = 2'-O-methyluridine-3'-phosphorothioate
  modified_base 22: mod_base = OTHER; note = 2'-O-methylcytidine-3'-phosphorothioate
  modified_base 23: mod_base = OTHER; note = 2'-O-methyladenosine-3'-phosphate
agtgagatggatacaatagttca

SEQ ID NO: 5353 - RNA, 23 nt, synthetic construct
  source 1..23: mol_type = other RNA
  modified_base 1: mod_base = OTHER; note = 2'-O-methyladenosine-3'-phosphorothioate
  modified_base 2: mod_base = OTHER; note = 2'-fluoroadenosine-3'-phosphorothioate
  modified_base 3: mod_base = OTHER; note = 2'-O-methylguanosine-3'-phosphate
  modified_base 4: mod_base = OTHER; note = 2'-O-methyladenosine-3'-phosphate
  modified_base 5: mod_base = OTHER; note = 2'-O-methyladenosine-3'-phosphate
  modified_base 6: mod_base = OTHER; note = 2'-fluoroguanosine-3'-phosphate
  modified_base 7: mod_base = OTHER; note = 2'-O-methyladenosine-3'-phosphate
  modified_base 8: mod_base = OTHER; note = 2'-fluoroguanosine-3'-phosphate
  modified_base 9: mod_base = OTHER; note = 2'-fluoroguanosine-3'-phosphate
  modified_base 10: mod_base = OTHER; note = 2'-O-methylcytidine-3'-phosphate
  modified_base 11: mod_base = OTHER; note = 2'-O-methyladenosine-3'-phosphate
  modified_base 12: mod_base = OTHER; note = 2'-O-methyluridine-3'-phosphate
  modified_base 13: mod_base = OTHER; note = 2'-O-methyladenosine-3'-phosphate
  modified_base 14: mod_base = OTHER; note = 2'-fluoroadenosine-3'-phosphate
  modified_base 15: mod_base = OTHER; note = 2'-O-methyladenosine-3'-phosphate
  modified_base 16: mod_base = OTHER; note = 2'-fluoroguanosine-3'-phosphate
  modified_base 17: mod_base = OTHER; note = 2'-O-methyluridine-3'-phosphate
  modified_base 18: mod_base = OTHER; note = 2'-O-methylguanosine-3'-phosphate
  modified_base 19: mod_base = OTHER; note = 2'-O-methyluridine-3'-phosphate
  modified_base 20: mod_base = OTHER; note = 2'-O-methylguanosine-3'-phosphate
  modified_base 21: mod_base = OTHER; note = 2'-O-methyladenosine-3'-phosphorothioate
  modified_base 22: mod_base = OTHER; note = 2'-O-methylguanosine-3'-phosphorothioate
  modified_base 23: mod_base = OTHER; note = 2'-O-methyladenosine-3'-phosphate
aagaagaggcataaagtgtgaga

SEQ ID NO: 5354 - RNA, 23 nt, synthetic construct
  source 1..23: mol_type = other RNA
  modified_base 1: mod_base = OTHER; note = 2'-O-methyladenosine-3'-phosphorothioate
  modified_base 2: mod_base = OTHER; note = 2'-fluoroadenosine-3'-phosphorothioate
  modified_base 3: mod_base = OTHER; note = 2'-O-methyladenosine-3'-phosphate
  modified_base 4: mod_base = OTHER; note = 2'-O-methyladenosine-3'-phosphate
  modified_base 5: mod_base = OTHER; note = 2'-O-methylguanosine-3'-phosphate
  modified_base 6: mod_base = OTHER; note = 2'-fluoroadenosine-3'-phosphate
  modified_base 7: mod_base = OTHER; note = 2'-O-methyluridine-3'-phosphate
  modified_base 8: mod_base = OTHER; note = 2'-fluoroguanosine-3'-phosphate
  modified_base 9: mod_base = OTHER; note = 2'-fluoroguanosine-3'-phosphate
  modified_base 10: mod_base = OTHER; note = 2'-O-methyluridine-3'-phosphate
  modified_base 11: mod_base = OTHER; note = 2'-O-methyluridine-3'-phosphate
  modified_base 12: mod_base = OTHER; note = 2'-O-methylcytidine-3'-phosphate
  modified_base 13: mod_base = OTHER; note = 2'-O-methyluridine-3'-phosphate
  modified_base 14: mod_base = OTHER; note = 2'-fluoroguanosine-3'-phosphate
  modified_base 15: mod_base = OTHER; note = 2'-O-methylguanosine-3'-phosphate
  modified_base 16: mod_base = OTHER; note = 2'-fluoroadenosine-3'-phosphate
  modified_base 17: mod_base = OTHER; note = 2'-O-methyladenosine-3'-phosphate
  modified_base 18: mod_base = OTHER; note = 2'-O-methylguanosine-3'-phosphate
  modified_base 19: mod_base = OTHER; note = 2'-O-methylguanosine-3'-phosphate
  modified_base 20: mod_base = OTHER; note = 2'-O-methyladenosine-3'-phosphate
  modified_base 21: mod_base = OTHER; note = 2'-O-methyluridine-3'-phosphorothioate
  modified_base 22: mod_base = OTHER; note = 2'-O-methylguanosine-3'-phosphorothioate
  modified_base 23: mod_base = OTHER; note = 2'-O-methylguanosine-3'-phosphate
aaaagatggttctggaaggatgg

SEQ ID NO: 5355 - RNA, 23 nt, synthetic construct
  source 1..23: mol_type = other RNA
  modified_base 1: mod_base = OTHER; note = 2'-O-methyladenosine-3'-phosphorothioate
  modified_base 2: mod_base = OTHER; note = 2'-fluoroadenosine-3'-phosphorothioate
  modified_base 3: mod_base = OTHER; note = 2'-O-methyluridine-3'-phosphate
  modified_base 4: mod_base = OTHER; note = 2'-O-methyluridine-3'-phosphate
  modified_base 5: mod_base = OTHER; note = 2'-O-methyladenosine-3'-phosphate
  modified_base 6: mod_base = OTHER; note = 2'-fluoroguanosine-3'-phosphate
  modified_base 7: mod_base = OTHER; note = 2'-O-methylcytidine-3'-phosphate
  modified_base 8: mod_base = OTHER; note = 2'-fluorocytidine-3'-phosphate
  modified_base 9: mod_base = OTHER; note = 2'-fluoroadenosine-3'-phosphate
  modified_base 10: mod_base = OTHER; note = 2'-O-methyluridine-3'-phosphate
  modified_base 11: mod_base = OTHER; note = 2'-O-methylguanosine-3'-phosphate
  modified_base 12: mod_base = OTHER; note = 2'-O-methyladenosine-3'-phosphate
  modified_base 13: mod_base = OTHER; note = 2'-O-methylguanosine-3'-phosphate
  modified_base 14: mod_base = OTHER; note = 2'-fluoroadenosine-3'-phosphate
  modified_base 15: mod_base = OTHER; note = 2'-O-methylcytidine-3'-phosphate
  modified_base 16: mod_base = OTHER; note = 2'-fluorocytidine-3'-phosphate
  modified_base 17: mod_base = OTHER; note = 2'-O-methyluridine-3'-phosphate
  modified_base 18: mod_base = OTHER; note = 2'-O-methylcytidine-3'-phosphate
  modified_base 19: mod_base = OTHER; note = 2'-O-methyladenosine-3'-phosphate
  modified_base 20: mod_base = OTHER; note = 2'-O-methyladenosine-3'-phosphate
  modified_base 21: mod_base = OTHER; note = 2'-O-methyladenosine-3'-phosphorothioate
  modified_base 22: mod_base = OTHER; note = 2'-O-methylguanosine-3'-phosphorothioate
  modified_base 23: mod_base = OTHER; note = 2'-O-methyladenosine-3'-phosphate
aattagccatgagacctcaaaga

SEQ ID NO: 5356 - RNA, 23 nt, synthetic construct
  source 1..23: mol_type = other RNA
  modified_base 1: mod_base = OTHER; note = 2'-O-methyladenosine-3'-phosphorothioate
  modified_base 2: mod_base = OTHER; note = 2'-fluoroguanosine-3'-phosphorothioate
  modified_base 3: mod_base = OTHER; note = 2'-O-methyladenosine-3'-phosphate
  modified_base 4: mod_base = OTHER; note = 2'-O-methylguanosine-3'-phosphate
  modified_base 5: mod_base = OTHER; note = 2'-O-methylguanosine-3'-phosphate
  modified_base 6: mod_base = OTHER; note = 2'-fluoroguanosine-3'-phosphate
  modified_base 7: mod_base = OTHER; note = 2'-O-methyladenosine-3'-phosphate
  modified_base 8: mod_base = OTHER; note = 2'-fluoroadenosine-3'-phosphate
  modified_base 9: mod_base = OTHER; note = 2'-fluorocytidine-3'-phosphate
  modified_base 10: mod_base = OTHER; note = 2'-O-methyladenosine-3'-phosphate
  modified_base 11: mod_base = OTHER; note = 2'-O-methylguanosine-3'-phosphate
  modified_base 12: mod_base = OTHER; note = 2'-O-methylguanosine-3'-phosphate
  modified_base 13: mod_base = OTHER; note = 2'-O-methyluridine-3'-phosphate
  modified_base 14: mod_base = OTHER; note = 2'-fluoroadenosine-3'-phosphate
  modified_base 15: mod_base = OTHER; note = 2'-O-methyladenosine-3'-phosphate
  modified_base 16: mod_base = OTHER; note = 2'-fluoroadenosine-3'-phosphate
  modified_base 17: mod_base = OTHER; note = 2'-O-methylguanosine-3'-phosphate
  modified_base 18: mod_base = OTHER; note = 2'-O-methylcytidine-3'-phosphate
  modified_base 19: mod_base = OTHER; note = 2'-O-methylcytidine-3'-phosphate
  modified_base 20: mod_base = OTHER; note = 2'-O-methyluridine-3'-phosphate
  modified_base 21: mod_base = OTHER; note = 2'-O-methyladenosine-3'-phosphorothioate
  modified_base 22: mod_base = OTHER; note = 2'-O-methylguanosine-3'-phosphorothioate
  modified_base 23: mod_base = OTHER; note = 2'-O-methylguanosine-3'-phosphate
agagggaacaggtaaagcctagg

SEQ ID NO: 5357 - RNA, 23 nt, synthetic construct
  source 1..23: mol_type = other RNA
  modified_base 1: mod_base = OTHER; note = 2'-O-methyladenosine-3'-phosphorothioate
  modified_base 2: mod_base = OTHER; note = 2'-fluorouridine -3'-phosphorothioate
  modified_base 3: mod_base = OTHER; note = 2'-O-methylcytidine-3'-phosphate
  modified_base 4: mod_base = OTHER; note = 2'-O-methyluridine-3'-phosphate
  modified_base 5: mod_base = OTHER; note = 2'-O-methyluridine-3'-phosphate
  modified_base 6: mod_base = OTHER; note = 2'-fluorouridine-3'-phosphate
  modified_base 7: mod_base = OTHER; note = 2'-O-methyluridine-3'-phosphate
  modified_base 8: mod_base = OTHER; note = 2'-fluoroguanosine-3'-phosphate
  modified_base 9: mod_base = OTHER; note = 2'-fluoroguanosine-3'-phosphate
  modified_base 10: mod_base = OTHER; note = 2'-O-methyladenosine-3'-phosphate
  modified_base 11: mod_base = OTHER; note = 2'-O-methylguanosine-3'-phosphate
  modified_base 12: mod_base = OTHER; note = 2'-O-methylguanosine-3'-phosphate
  modified_base 13: mod_base = OTHER; note = 2'-O-methylguanosine-3'-phosphate
  modified_base 14: mod_base = OTHER; note = 2'-fluoroadenosine-3'-phosphate
  modified_base 15: mod_base = OTHER; note = 2'-O-methyluridine-3'-phosphate
  modified_base 16: mod_base = OTHER; note = 2'-fluorouridine-3'-phosphate
  modified_base 17: mod_base = OTHER; note = 2'-O-methyladenosine-3'-phosphate
  modified_base 18: mod_base = OTHER; note = 2'-O-methylcytidine-3'-phosphate
  modified_base 19: mod_base = OTHER; note = 2'-O-methyladenosine-3'-phosphate
  modified_base 20: mod_base = OTHER; note = 2'-O-methylguanosine-3'-phosphate
  modified_base 21: mod_base = OTHER; note = 2'-O-methyladenosine-3'-phosphorothioate
  modified_base 22: mod_base = OTHER; note = 2'-O-methylguanosine-3'-phosphorothioate
  modified_base 23: mod_base = OTHER; note = 2'-O-methylguanosine-3'-phosphate
atcttttggagggattacagagg

SEQ ID NO: 5358 - RNA, 23 nt, synthetic construct
  source 1..23: mol_type = other RNA
  modified_base 1: mod_base = OTHER; note = 2'-O-methyladenosine-3'-phosphorothioate
  modified_base 2: mod_base = OTHER; note = 2'-fluorocytidine-3'-phosphorothioate
  modified_base 3: mod_base = OTHER; note = 2'-O-methyladenosine-3'-phosphate
  modified_base 4: mod_base = OTHER; note = 2'-O-methyladenosine-3'-phosphate
  modified_base 5: mod_base = OTHER; note = 2'-O-methylguanosine-3'-phosphate
  modified_base 6: mod_base = OTHER; note = 2'-fluorocytidine-3'-phosphate
  modified_base 7: mod_base = OTHER; note = 2'-O-methyladenosine-3'-phosphate
  modified_base 8: mod_base = OTHER; note = 2'-fluorouridine-3'-phosphate
  modified_base 9: mod_base = OTHER; note = 2'-fluoroadenosine-3'-phosphate
  modified_base 10: mod_base = OTHER; note = 2'-O-methylguanosine-3'-phosphate
  modified_base 11: mod_base = OTHER; note = 2'-O-methyladenosine-3'-phosphate
  modified_base 12: mod_base = OTHER; note = 2'-O-methyluridine-3'-phosphate
  modified_base 13: mod_base = OTHER; note = 2'-O-methylcytidine-3'-phosphate
  modified_base 14: mod_base = OTHER; note = 2'-fluorouridine-3'-phosphate
  modified_base 15: mod_base = OTHER; note = 2'-O-methylguanosine-3'-phosphate
  modified_base 16: mod_base = OTHER; note = 2'-fluorouridine-3'-phosphate
  modified_base 17: mod_base = OTHER; note = 2'-O-methylcytidine-3'-phosphate
  modified_base 18: mod_base = OTHER; note = 2'-O-methyluridine-3'-phosphate
  modified_base 19: mod_base = OTHER; note = 2'-O-methylcytidine-3'-phosphate
  modified_base 20: mod_base = OTHER; note = 2'-O-methyladenosine-3'-phosphate
  modified_base 21: mod_base = OTHER; note = 2'-O-methyluridine-3'-phosphorothioate
  modified_base 22: mod_base = OTHER; note = 2'-O-methylcytidine-3'-phosphorothioate
  modified_base 23: mod_base = OTHER; note = 2'-O-methyluridine-3'-phosphate
acaagcatagatctgtctcatct

SEQ ID NO: 5359 - RNA, 23 nt, synthetic construct
  source 1..23: mol_type = other RNA
  modified_base 1: mod_base = OTHER; note = 2'-O-methyladenosine-3'-phosphorothioate
  modified_base 2: mod_base = OTHER; note = 2'-fluorouridine -3'-phosphorothioate
  modified_base 3: mod_base = OTHER; note = 2'-O-methylcytidine-3'-phosphate
  modified_base 4: mod_base = OTHER; note = 2'-O-methyladenosine-3'-phosphate
  modified_base 5: mod_base = OTHER; note = 2'-O-methylguanosine-3'-phosphate
  modified_base 6: mod_base = OTHER; note = 2'-fluorouridine-3'-phosphate
  modified_base 7: mod_base = OTHER; note = 2'-O-methyluridine-3'-phosphate
  modified_base 8: mod_base = OTHER; note = 2'-fluorouridine-3'-phosphate
  modified_base 9: mod_base = OTHER; note = 2'-fluoroadenosine-3'-phosphate
  modified_base 10: mod_base = OTHER; note = 2'-O-methylcytidine-3'-phosphate
  modified_base 11: mod_base = OTHER; note = 2'-O-methyluridine-3'-phosphate
  modified_base 12: mod_base = OTHER; note = 2'-O-methylguanosine-3'-phosphate
  modified_base 13: mod_base = OTHER; note = 2'-O-methylguanosine-3'-phosphate
  modified_base 14: mod_base = OTHER; note = 2'-fluoroadenosine-3'-phosphate
  modified_base 15: mod_base = OTHER; note = 2'-O-methyluridine-3'-phosphate
  modified_base 16: mod_base = OTHER; note = 2'-fluoroguanosine-3'-phosphate
  modified_base 17: mod_base = OTHER; note = 2'-O-methyladenosine-3'-phosphate
  modified_base 18: mod_base = OTHER; note = 2'-O-methylcytidine-3'-phosphate
  modified_base 19: mod_base = OTHER; note = 2'-O-methylcytidine-3'-phosphate
  modified_base 20: mod_base = OTHER; note = 2'-O-methyladenosine-3'-phosphate
  modified_base 21: mod_base = OTHER; note = 2'-O-methyladenosine-3'-phosphorothioate
  modified_base 22: mod_base = OTHER; note = 2'-O-methylguanosine-3'-phosphorothioate
  modified_base 23: mod_base = OTHER; note = 2'-O-methylcytidine-3'-phosphate
atcagtttactggatgaccaagc

SEQ ID NO: 5360 - RNA, 23 nt, synthetic construct
  source 1..23: mol_type = other RNA
  modified_base 1: mod_base = OTHER; note = 2'-O-methyladenosine-3'-phosphorothioate
  modified_base 2: mod_base = OTHER; note = 2'-fluorouridine -3'-phosphorothioate
  modified_base 3: mod_base = OTHER; note = 2'-O-methylcytidine-3'-phosphate
  modified_base 4: mod_base = OTHER; note = 2'-O-methylcytidine-3'-phosphate
  modified_base 5: mod_base = OTHER; note = 2'-O-methylcytidine-3'-phosphate
  modified_base 6: mod_base = OTHER; note = 2'-fluoroadenosine-3'-phosphate
  modified_base 7: mod_base = OTHER; note = 2'-O-methylcytidine-3'-phosphate
  modified_base 8: mod_base = OTHER; note = 2'-fluoroadenosine-3'-phosphate
  modified_base 9: mod_base = OTHER; note = 2'-fluorocytidine-3'-phosphate
  modified_base 10: mod_base = OTHER; note = 2'-O-methyluridine-3'-phosphate
  modified_base 11: mod_base = OTHER; note = 2'-O-methyluridine-3'-phosphate
  modified_base 12: mod_base = OTHER; note = 2'-O-methylguanosine-3'-phosphate
  modified_base 13: mod_base = OTHER; note = 2'-O-methylcytidine-3'-phosphate
  modified_base 14: mod_base = OTHER; note = 2'-fluoroguanosine-3'-phosphate
  modified_base 15: mod_base = OTHER; note = 2'-O-methyluridine-3'-phosphate
  modified_base 16: mod_base = OTHER; note = 2'-fluoroguanosine-3'-phosphate
  modified_base 17: mod_base = OTHER; note = 2'-O-methylcytidine-3'-phosphate
  modified_base 18: mod_base = OTHER; note = 2'-O-methylcytidine-3'-phosphate
  modified_base 19: mod_base = OTHER; note = 2'-O-methylcytidine-3'-phosphate
  modified_base 20: mod_base = OTHER; note = 2'-O-methyladenosine-3'-phosphate
  modified_base 21: mod_base = OTHER; note = 2'-O-methylcytidine-3'-phosphorothioate
  modified_base 22: mod_base = OTHER; note = 2'-O-methyladenosine-3'-phosphorothioate
  modified_base 23: mod_base = OTHER; note = 2'-O-methylguanosine-3'-phosphate
atcccacacttgcgtgcccacag

SEQ ID NO: 5361 - RNA, 23 nt, synthetic construct
  source 1..23: mol_type = other RNA
  modified_base 1: mod_base = OTHER; note = 2'-O-methyladenosine-3'-phosphorothioate
  modified_base 2: mod_base = OTHER; note = 2'-fluoroadenosine-3'-phosphorothioate
  modified_base 3: mod_base = OTHER; note = 2'-O-methylguanosine-3'-phosphate
  modified_base 4: mod_base = OTHER; note = 2'-O-methylcytidine-3'-phosphate
  modified_base 5: mod_base = OTHER; note = 2'-O-methylcytidine-3'-phosphate
  modified_base 6: mod_base = OTHER; note = 2'-fluoroadenosine-3'-phosphate
  modified_base 7: mod_base = OTHER; note = 2'-O-methylguanosine-3'-phosphate
  modified_base 8: mod_base = OTHER; note = 2'-fluorocytidine-3'-phosphate
  modified_base 9: mod_base = OTHER; note = 2'-fluorouridine-3'-phosphate
  modified_base 10: mod_base = OTHER; note = 2'-O-methylcytidine-3'-phosphate
  modified_base 11: mod_base = OTHER; note = 2'-O-methyluridine-3'-phosphate
  modified_base 12: mod_base = OTHER; note = 2'-O-methylguanosine-3'-phosphate
  modified_base 13: mod_base = OTHER; note = 2'-O-methyladenosine-3'-phosphate
  modified_base 14: mod_base = OTHER; note = 2'-fluoroguanosine-3'-phosphate
  modified_base 15: mod_base = OTHER; note = 2'-O-methylcytidine-3'-phosphate
  modified_base 16: mod_base = OTHER; note = 2'-fluoroadenosine-3'-phosphate
  modified_base 17: mod_base = OTHER; note = 2'-O-methyluridine-3'-phosphate
  modified_base 18: mod_base = OTHER; note = 2'-O-methylguanosine-3'-phosphate
  modified_base 19: mod_base = OTHER; note = 2'-O-methylcytidine-3'-phosphate
  modified_base 20: mod_base = OTHER; note = 2'-O-methylcytidine-3'-phosphate
  modified_base 21: mod_base = OTHER; note = 2'-O-methyluridine-3'-phosphorothioate
  modified_base 22: mod_base = OTHER; note = 2'-O-methylcytidine-3'-phosphorothioate
  modified_base 23: mod_base = OTHER; note = 2'-O-methyluridine-3'-phosphate
aagccagctctgagcatgcctct

SEQ ID NO: 5362 - RNA, 23 nt, synthetic construct
  source 1..23: mol_type = other RNA
  modified_base 1: mod_base = OTHER; note = 2'-O-methyladenosine-3'-phosphorothioate
  modified_base 2: mod_base = OTHER; note = 2'-fluorouridine -3'-phosphorothioate
  modified_base 3: mod_base = OTHER; note = 2'-O-methylguanosine-3'-phosphate
  modified_base 4: mod_base = OTHER; note = 2'-O-methyladenosine-3'-phosphate
  modified_base 5: mod_base = OTHER; note = 2'-O-methyladenosine-3'-phosphate
  modified_base 6: mod_base = OTHER; note = 2'-fluoroadenosine-3'-phosphate
  modified_base 7: mod_base = OTHER; note = 2'-O-methylguanosine-3'-phosphate
  modified_base 8: mod_base = OTHER; note = 2'-fluoroguanosine-3'-phosphate
  modified_base 9: mod_base = OTHER; note = 2'-fluoroadenosine-3'-phosphate
  modified_base 10: mod_base = OTHER; note = 2'-O-methyladenosine-3'-phosphate
  modified_base 11: mod_base = OTHER; note = 2'-O-methylguanosine-3'-phosphate
  modified_base 12: mod_base = OTHER; note = 2'-O-methylguanosine-3'-phosphate
  modified_base 13: mod_base = OTHER; note = 2'-O-methylcytidine-3'-phosphate
  modified_base 14: mod_base = OTHER; note = 2'-fluoroadenosine-3'-phosphate
  modified_base 15: mod_base = OTHER; note = 2'-O-methyladenosine-3'-phosphate
  modified_base 16: mod_base = OTHER; note = 2'-fluoroguanosine-3'-phosphate
  modified_base 17: mod_base = OTHER; note = 2'-O-methyluridine-3'-phosphate
  modified_base 18: mod_base = OTHER; note = 2'-O-methylcytidine-3'-phosphate
  modified_base 19: mod_base = OTHER; note = 2'-O-methyladenosine-3'-phosphate
  modified_base 20: mod_base = OTHER; note = 2'-O-methylguanosine-3'-phosphate
  modified_base 21: mod_base = OTHER; note = 2'-O-methyladenosine-3'-phosphorothioate
  modified_base 22: mod_base = OTHER; note = 2'-O-methylguanosine-3'-phosphorothioate
  modified_base 23: mod_base = OTHER; note = 2'-O-methylguanosine-3'-phosphate
atgaaaggaaggcaagtcagagg

SEQ ID NO: 5363 - RNA, 23 nt, synthetic construct
  source 1..23: mol_type = other RNA
  modified_base 1: mod_base = OTHER; note = 2'-O-methyladenosine-3'-phosphorothioate
  modified_base 2: mod_base = OTHER; note = 2'-fluorocytidine-3'-phosphorothioate
  modified_base 3: mod_base = OTHER; note = 2'-O-methyladenosine-3'-phosphate
  modified_base 4: mod_base = OTHER; note = 2'-O-methylguanosine-3'-phosphate
  modified_base 5: mod_base = OTHER; note = 2'-O-methylguanosine-3'-phosphate
  modified_base 6: mod_base = OTHER; note = 2'-fluoroadenosine-3'-phosphate
  modified_base 7: mod_base = OTHER; note = 2'-O-methylcytidine-3'-phosphate
  modified_base 8: mod_base = OTHER; note = 2'-fluorouridine-3'-phosphate
  modified_base 9: mod_base = OTHER; note = 2'-fluorocytidine-3'-phosphate
  modified_base 10: mod_base = OTHER; note = 2'-O-methylcytidine-3'-phosphate
  modified_base 11: mod_base = OTHER; note = 2'-O-methyluridine-3'-phosphate
  modified_base 12: mod_base = OTHER; note = 2'-O-methylguanosine-3'-phosphate
  modified_base 13: mod_base = OTHER; note = 2'-O-methylguanosine-3'-phosphate
  modified_base 14: mod_base = OTHER; note = 2'-fluoroguanosine-3'-phosphate
  modified_base 15: mod_base = OTHER; note = 2'-O-methyluridine-3'-phosphate
  modified_base 16: mod_base = OTHER; note = 2'-fluoroguanosine-3'-phosphate
  modified_base 17: mod_base = OTHER; note = 2'-O-methylguanosine-3'-phosphate
  modified_base 18: mod_base = OTHER; note = 2'-O-methyladenosine-3'-phosphate
  modified_base 19: mod_base = OTHER; note = 2'-O-methylguanosine-3'-phosphate
  modified_base 20: mod_base = OTHER; note = 2'-O-methylcytidine-3'-phosphate
  modified_base 21: mod_base = OTHER; note = 2'-O-methyladenosine-3'-phosphorothioate
  modified_base 22: mod_base = OTHER; note = 2'-O-methylcytidine-3'-phosphorothioate
  modified_base 23: mod_base = OTHER; note = 2'-O-methyluridine-3'-phosphate
acaggactcctgggtggagcact

SEQ ID NO: 5364 - RNA, 23 nt, synthetic construct
  source 1..23: mol_type = other RNA
  modified_base 1: mod_base = OTHER; note = 2'-O-methyladenosine-3'-phosphorothioate
  modified_base 2: mod_base = OTHER; note = 2'-fluorouridine -3'-phosphorothioate
  modified_base 3: mod_base = OTHER; note = 2'-O-methyluridine-3'-phosphate
  modified_base 4: mod_base = OTHER; note = 2'-O-methylguanosine-3'-phosphate
  modified_base 5: mod_base = OTHER; note = 2'-O-methylcytidine-3'-phosphate
  modified_base 6: mod_base = OTHER; note = 2'-fluorocytidine-3'-phosphate
  modified_base 7: mod_base = OTHER; note = 2'-O-methylcytidine-3'-phosphate
  modified_base 8: mod_base = OTHER; note = 2'-fluoroadenosine-3'-phosphate
  modified_base 9: mod_base = OTHER; note = 2'-fluorouridine-3'-phosphate
  modified_base 10: mod_base = OTHER; note = 2'-O-methyluridine-3'-phosphate
  modified_base 11: mod_base = OTHER; note = 2'-O-methylcytidine-3'-phosphate
  modified_base 12: mod_base = OTHER; note = 2'-O-methylcytidine-3'-phosphate
  modified_base 13: mod_base = OTHER; note = 2'-O-methyladenosine-3'-phosphate
  modified_base 14: mod_base = OTHER; note = 2'-fluoroguanosine-3'-phosphate
  modified_base 15: mod_base = OTHER; note = 2'-O-methylcytidine-3'-phosphate
  modified_base 16: mod_base = OTHER; note = 2'-fluorouridine-3'-phosphate
  modified_base 17: mod_base = OTHER; note = 2'-O-methyluridine-3'-phosphate
  modified_base 18: mod_base = OTHER; note = 2'-O-methylcytidine-3'-phosphate
  modified_base 19: mod_base = OTHER; note = 2'-O-methylcytidine-3'-phosphate
  modified_base 20: mod_base = OTHER; note = 2'-O-methyladenosine-3'-phosphate
  modified_base 21: mod_base = OTHER; note = 2'-O-methylguanosine-3'-phosphorothioate
  modified_base 22: mod_base = OTHER; note = 2'-O-methylguanosine-3'-phosphorothioate
  modified_base 23: mod_base = OTHER; note = 2'-O-methylcytidine-3'-phosphate
attgcccattccagcttccaggc

SEQ ID NO: 5365 - RNA, 23 nt, synthetic construct
  source 1..23: mol_type = other RNA
  modified_base 1: mod_base = OTHER; note = 2'-O-methyladenosine-3'-phosphorothioate
  modified_base 2: mod_base = OTHER; note = 2'-fluorocytidine-3'-phosphorothioate
  modified_base 3: mod_base = OTHER; note = 2'-O-methyluridine-3'-phosphate
  modified_base 4: mod_base = OTHER; note = 2'-O-methylguanosine-3'-phosphate
  modified_base 5: mod_base = OTHER; note = 2'-O-methyluridine-3'-phosphate
  modified_base 6: mod_base = OTHER; note = 2'-fluorocytidine-3'-phosphate
  modified_base 7: mod_base = OTHER; note = 2'-O-methylcytidine-3'-phosphate
  modified_base 8: mod_base = OTHER; note = 2'-fluorocytidine-3'-phosphate
  modified_base 9: mod_base = OTHER; note = 2'-fluoroadenosine-3'-phosphate
  modified_base 10: mod_base = OTHER; note = 2'-O-methylcytidine-3'-phosphate
  modified_base 11: mod_base = OTHER; note = 2'-O-methyluridine-3'-phosphate
  modified_base 12: mod_base = OTHER; note = 2'-O-methylcytidine-3'-phosphate
  modified_base 13: mod_base = OTHER; note = 2'-O-methylcytidine-3'-phosphate
  modified_base 14: mod_base = OTHER; note = 2'-fluoroadenosine-3'-phosphate
  modified_base 15: mod_base = OTHER; note = 2'-O-methylguanosine-3'-phosphate
  modified_base 16: mod_base = OTHER; note = 2'-fluorocytidine-3'-phosphate
  modified_base 17: mod_base = OTHER; note = 2'-O-methyladenosine-3'-phosphate
  modified_base 18: mod_base = OTHER; note = 2'-O-methylguanosine-3'-phosphate
  modified_base 19: mod_base = OTHER; note = 2'-O-methylcytidine-3'-phosphate
  modified_base 20: mod_base = OTHER; note = 2'-O-methylcytidine-3'-phosphate
  modified_base 21: mod_base = OTHER; note = 2'-O-methylcytidine-3'-phosphorothioate
  modified_base 22: mod_base = OTHER; note = 2'-O-methyluridine-3'-phosphorothioate
  modified_base 23: mod_base = OTHER; note = 2'-O-methyluridine-3'-phosphate
actgtcccactccagcagccctt

SEQ ID NO: 5366 - RNA, 23 nt, synthetic construct
  source 1..23: mol_type = other RNA
  modified_base 1: mod_base = OTHER; note = 2'-O-methyladenosine-3'-phosphorothioate
  modified_base 2: mod_base = OTHER; note = 2'-fluoroadenosine-3'-phosphorothioate
  modified_base 3: mod_base = OTHER; note = 2'-O-methylguanosine-3'-phosphate
  modified_base 4: mod_base = OTHER; note = 2'-O-methylguanosine-3'-phosphate
  modified_base 5: mod_base = OTHER; note = 2'-O-methylcytidine-3'-phosphate
  modified_base 6: mod_base = OTHER; note = 2'-fluorocytidine-3'-phosphate
  modified_base 7: mod_base = OTHER; note = 2'-O-methyluridine-3'-phosphate
  modified_base 8: mod_base = OTHER; note = 2'-fluorouridine-3'-phosphate
  modified_base 9: mod_base = OTHER; note = 2'-fluorocytidine-3'-phosphate
  modified_base 10: mod_base = OTHER; note = 2'-O-methylcytidine-3'-phosphate
  modified_base 11: mod_base = OTHER; note = 2'-O-methyluridine-3'-phosphate
  modified_base 12: mod_base = OTHER; note = 2'-O-methylcytidine-3'-phosphate
  modified_base 13: mod_base = OTHER; note = 2'-O-methyluridine-3'-phosphate
  modified_base 14: mod_base = OTHER; note = 2'-fluorouridine-3'-phosphate
  modified_base 15: mod_base = OTHER; note = 2'-O-methylcytidine-3'-phosphate
  modified_base 16: mod_base = OTHER; note = 2'-fluorouridine-3'-phosphate
  modified_base 17: mod_base = OTHER; note = 2'-O-methylcytidine-3'-phosphate
  modified_base 18: mod_base = OTHER; note = 2'-O-methylcytidine-3'-phosphate
  modified_base 19: mod_base = OTHER; note = 2'-O-methylcytidine-3'-phosphate
  modified_base 20: mod_base = OTHER; note = 2'-O-methyluridine-3'-phosphate
  modified_base 21: mod_base = OTHER; note = 2'-O-methylguanosine-3'-phosphorothioate
  modified_base 22: mod_base = OTHER; note = 2'-O-methyluridine-3'-phosphorothioate
  modified_base 23: mod_base = OTHER; note = 2'-O-methylcytidine-3'-phosphate
aaggccttcctcttctccctgtc

SEQ ID NO: 5367 - RNA, 23 nt, synthetic construct
  source 1..23: mol_type = other RNA
  modified_base 1: mod_base = OTHER; note = 2'-O-methyladenosine-3'-phosphorothioate
  modified_base 2: mod_base = OTHER; note = 2'-fluorocytidine-3'-phosphorothioate
  modified_base 3: mod_base = OTHER; note = 2'-O-methyladenosine-3'-phosphate
  modified_base 4: mod_base = OTHER; note = 2'-O-methylcytidine-3'-phosphate
  modified_base 5: mod_base = OTHER; note = 2'-O-methylcytidine-3'-phosphate
  modified_base 6: mod_base = OTHER; note = 2'-fluorocytidine-3'-phosphate
  modified_base 7: mod_base = OTHER; note = 2'-O-methyluridine-3'-phosphate
  modified_base 8: mod_base = OTHER; note = 2'-fluorocytidine-3'-phosphate
  modified_base 9: mod_base = OTHER; note = 2'-fluorouridine-3'-phosphate
  modified_base 10: mod_base = OTHER; note = 2'-O-methylcytidine-3'-phosphate
  modified_base 11: mod_base = OTHER; note = 2'-O-methylcytidine-3'-phosphate
  modified_base 12: mod_base = OTHER; note = 2'-O-methyluridine-3'-phosphate
  modified_base 13: mod_base = OTHER; note = 2'-O-methylcytidine-3'-phosphate
  modified_base 14: mod_base = OTHER; note = 2'-fluoroadenosine-3'-phosphate
  modified_base 15: mod_base = OTHER; note = 2'-O-methyluridine-3'-phosphate
  modified_base 16: mod_base = OTHER; note = 2'-fluorocytidine-3'-phosphate
  modified_base 17: mod_base = OTHER; note = 2'-O-methylcytidine-3'-phosphate
  modified_base 18: mod_base = OTHER; note = 2'-O-methyladenosine-3'-phosphate
  modified_base 19: mod_base = OTHER; note = 2'-O-methylguanosine-3'-phosphate
  modified_base 20: mod_base = OTHER; note = 2'-O-methylguanosine-3'-phosphate
  modified_base 21: mod_base = OTHER; note = 2'-O-methylcytidine-3'-phosphorothioate
  modified_base 22: mod_base = OTHER; note = 2'-O-methylcytidine-3'-phosphorothioate
  modified_base 23: mod_base = OTHER; note = 2'-O-methyluridine-3'-phosphate
acaccctctcctcatccaggcct

SEQ ID NO: 5368 - RNA, 23 nt, synthetic construct
  source 1..23: mol_type = other RNA
  modified_base 1: mod_base = OTHER; note = 2'-O-methyladenosine-3'-phosphorothioate
  modified_base 2: mod_base = OTHER; note = 2'-fluoroadenosine-3'-phosphorothioate
  modified_base 3: mod_base = OTHER; note = 2'-O-methylguanosine-3'-phosphate
  modified_base 4: mod_base = OTHER; note = 2'-O-methyluridine-3'-phosphate
  modified_base 5: mod_base = OTHER; note = 2'-O-methylcytidine-3'-phosphate
  modified_base 6: mod_base = OTHER; note = 2'-fluorouridine-3'-phosphate
  modified_base 7: mod_base = OTHER; note = 2'-O-methylcytidine-3'-phosphate
  modified_base 8: mod_base = OTHER; note = 2'-fluoroadenosine-3'-phosphate
  modified_base 9: mod_base = OTHER; note = 2'-fluoroguanosine-3'-phosphate
  modified_base 10: mod_base = OTHER; note = 2'-O-methyladenosine-3'-phosphate
  modified_base 11: mod_base = OTHER; note = 2'-O-methylguanosine-3'-phosphate
  modified_base 12: mod_base = OTHER; note = 2'-O-methylcytidine-3'-phosphate
  modified_base 13: mod_base = OTHER; note = 2'-O-methyladenosine-3'-phosphate
  modified_base 14: mod_base = OTHER; note = 2'-fluoroadenosine-3'-phosphate
  modified_base 15: mod_base = OTHER; note = 2'-O-methyladenosine-3'-phosphate
  modified_base 16: mod_base = OTHER; note = 2'-fluorouridine-3'-phosphate
  modified_base 17: mod_base = OTHER; note = 2'-O-methylguanosine-3'-phosphate
  modified_base 18: mod_base = OTHER; note = 2'-O-methylcytidine-3'-phosphate
  modified_base 19: mod_base = OTHER; note = 2'-O-methylcytidine-3'-phosphate
  modified_base 20: mod_base = OTHER; note = 2'-O-methyladenosine-3'-phosphate
  modified_base 21: mod_base = OTHER; note = 2'-O-methylcytidine-3'-phosphorothioate
  modified_base 22: mod_base = OTHER; note = 2'-O-methylcytidine-3'-phosphorothioate
  modified_base 23: mod_base = OTHER; note = 2'-O-methylcytidine-3'-phosphate
aagtctcagagcaaatgccaccc

SEQ ID NO: 5369 - RNA, 23 nt, synthetic construct
  source 1..23: mol_type = other RNA
  modified_base 1: mod_base = OTHER; note = 2'-O-methyladenosine-3'-phosphorothioate
  modified_base 2: mod_base = OTHER; note = 2'-fluoroadenosine-3'-phosphorothioate
  modified_base 3: mod_base = OTHER; note = 2'-O-methyladenosine-3'-phosphate
  modified_base 4: mod_base = OTHER; note = 2'-O-methyladenosine-3'-phosphate
  modified_base 5: mod_base = OTHER; note = 2'-O-methylguanosine-3'-phosphate
  modified_base 6: mod_base = OTHER; note = 2'-fluoroguanosine-3'-phosphate
  modified_base 7: mod_base = OTHER; note = 2'-O-methyluridine-3'-phosphate
  modified_base 8: mod_base = OTHER; note = 2'-fluorocytidine-3'-phosphate
  modified_base 9: mod_base = OTHER; note = 2'-fluorouridine-3'-phosphate
  modified_base 10: mod_base = OTHER; note = 2'-O-methyladenosine-3'-phosphate
  modified_base 11: mod_base = OTHER; note = 2'-O-methyladenosine-3'-phosphate
  modified_base 12: mod_base = OTHER; note = 2'-O-methyladenosine-3'-phosphate
  modified_base 13: mod_base = OTHER; note = 2'-O-methyladenosine-3'-phosphate
  modified_base 14: mod_base = OTHER; note = 2'-fluoroadenosine-3'-phosphate
  modified_base 15: mod_base = OTHER; note = 2'-O-methylguanosine-3'-phosphate
  modified_base 16: mod_base = OTHER; note = 2'-fluoroguanosine-3'-phosphate
  modified_base 17: mod_base = OTHER; note = 2'-O-methyladenosine-3'-phosphate
  modified_base 18: mod_base = OTHER; note = 2'-O-methylcytidine-3'-phosphate
  modified_base 19: mod_base = OTHER; note = 2'-O-methylcytidine-3'-phosphate
  modified_base 20: mod_base = OTHER; note = 2'-O-methylcytidine-3'-phosphate
  modified_base 21: mod_base = OTHER; note = 2'-O-methyladenosine-3'-phosphorothioate
  modified_base 22: mod_base = OTHER; note = 2'-O-methylguanosine-3'-phosphorothioate
  modified_base 23: mod_base = OTHER; note = 2'-O-methyluridine-3'-phosphate
aaaaggtctaaaaaggacccagt

SEQ ID NO: 5370 - RNA, 23 nt, synthetic construct
  source 1..23: mol_type = other RNA
  modified_base 1: mod_base = OTHER; note = 2'-O-methyladenosine-3'-phosphorothioate
  modified_base 2: mod_base = OTHER; note = 2'-fluoroguanosine-3'-phosphorothioate
  modified_base 3: mod_base = OTHER; note = 2'-O-methyladenosine-3'-phosphate
  modified_base 4: mod_base = OTHER; note = 2'-O-methylcytidine-3'-phosphate
  modified_base 5: mod_base = OTHER; note = 2'-O-methyluridine-3'-phosphate
  modified_base 6: mod_base = OTHER; note = 2'-fluoroguanosine-3'-phosphate
  modified_base 7: mod_base = OTHER; note = 2'-O-methyluridine-3'-phosphate
  modified_base 8: mod_base = OTHER; note = 2'-fluorocytidine-3'-phosphate
  modified_base 9: mod_base = OTHER; note = 2'-fluorocytidine-3'-phosphate
  modified_base 10: mod_base = OTHER; note = 2'-O-methyladenosine-3'-phosphate
  modified_base 11: mod_base = OTHER; note = 2'-O-methylguanosine-3'-phosphate
  modified_base 12: mod_base = OTHER; note = 2'-O-methylcytidine-3'-phosphate
  modified_base 13: mod_base = OTHER; note = 2'-O-methylcytidine-3'-phosphate
  modified_base 14: mod_base = OTHER; note = 2'-fluoroadenosine-3'-phosphate
  modified_base 15: mod_base = OTHER; note = 2'-O-methyladenosine-3'-phosphate
  modified_base 16: mod_base = OTHER; note = 2'-fluoroadenosine-3'-phosphate
  modified_base 17: mod_base = OTHER; note = 2'-O-methylguanosine-3'-phosphate
  modified_base 18: mod_base = OTHER; note = 2'-O-methylguanosine-3'-phosphate
  modified_base 19: mod_base = OTHER; note = 2'-O-methylguanosine-3'-phosphate
  modified_base 20: mod_base = OTHER; note = 2'-O-methyladenosine-3'-phosphate
  modified_base 21: mod_base = OTHER; note = 2'-O-methylguanosine-3'-phosphorothioate
  modified_base 22: mod_base = OTHER; note = 2'-O-methylguanosine-3'-phosphorothioate
  modified_base 23: mod_base = OTHER; note = 2'-O-methyladenosine-3'-phosphate
agactgtccagccaaagggagga

SEQ ID NO: 5371 - RNA, 23 nt, synthetic construct
  source 1..23: mol_type = other RNA
  modified_base 1: mod_base = OTHER; note = 2'-O-methyladenosine-3'-phosphorothioate
  modified_base 2: mod_base = OTHER; note = 2'-fluoroadenosine-3'-phosphorothioate
  modified_base 3: mod_base = OTHER; note = 2'-O-methyluridine-3'-phosphate
  modified_base 4: mod_base = OTHER; note = 2'-O-methyluridine-3'-phosphate
  modified_base 5: mod_base = OTHER; note = 2'-O-methyladenosine-3'-phosphate
  modified_base 6: mod_base = OTHER; note = 2'-fluorouridine-3'-phosphate
  modified_base 7: mod_base = OTHER; note = 2'-O-methylcytidine-3'-phosphate
  modified_base 8: mod_base = OTHER; note = 2'-fluoroguanosine-3'-phosphate
  modified_base 9: mod_base = OTHER; note = 2'-fluoroadenosine-3'-phosphate
  modified_base 10: mod_base = OTHER; note = 2'-O-methylcytidine-3'-phosphate
  modified_base 11: mod_base = OTHER; note = 2'-O-methylcytidine-3'-phosphate
  modified_base 12: mod_base = OTHER; note = 2'-O-methyluridine-3'-phosphate
  modified_base 13: mod_base = OTHER; note = 2'-O-methylcytidine-3'-phosphate
  modified_base 14: mod_base = OTHER; note = 2'-fluoroadenosine-3'-phosphate
  modified_base 15: mod_base = OTHER; note = 2'-O-methyluridine-3'-phosphate
  modified_base 16: mod_base = OTHER; note = 2'-fluoroguanosine-3'-phosphate
  modified_base 17: mod_base = OTHER; note = 2'-O-methylguanosine-3'-phosphate
  modified_base 18: mod_base = OTHER; note = 2'-O-methyluridine-3'-phosphate
  modified_base 19: mod_base = OTHER; note = 2'-O-methyluridine-3'-phosphate
  modified_base 20: mod_base = OTHER; note = 2'-O-methylcytidine-3'-phosphate
  modified_base 21: mod_base = OTHER; note = 2'-O-methyladenosine-3'-phosphorothioate
  modified_base 22: mod_base = OTHER; note = 2'-O-methylguanosine-3'-phosphorothioate
  modified_base 23: mod_base = OTHER; note = 2'-O-methylguanosine-3'-phosphate
aattatcgacctcatggttcagg

SEQ ID NO: 5372 - RNA, 23 nt, synthetic construct
  source 1..23: mol_type = other RNA
  modified_base 1: mod_base = OTHER; note = 2'-O-methyladenosine-3'-phosphorothioate
  modified_base 2: mod_base = OTHER; note = 2'-fluorouridine -3'-phosphorothioate
  modified_base 3: mod_base = OTHER; note = 2'-O-methylcytidine-3'-phosphate
  modified_base 4: mod_base = OTHER; note = 2'-O-methylguanosine-3'-phosphate
  modified_base 5: mod_base = OTHER; note = 2'-O-methylguanosine-3'-phosphate
  modified_base 6: mod_base = OTHER; note = 2'-fluorocytidine-3'-phosphate
  modified_base 7: mod_base = OTHER; note = 2'-O-methylcytidine-3'-phosphate
  modified_base 8: mod_base = OTHER; note = 2'-fluorouridine-3'-phosphate
  modified_base 9: mod_base = OTHER; note = 2'-fluorouridine-3'-phosphate
  modified_base 10: mod_base = OTHER; note = 2'-O-methylguanosine-3'-phosphate
  modified_base 11: mod_base = OTHER; note = 2'-O-methylguanosine-3'-phosphate
  modified_base 12: mod_base = OTHER; note = 2'-O-methylguanosine-3'-phosphate
  modified_base 13: mod_base = OTHER; note = 2'-O-methylcytidine-3'-phosphate
  modified_base 14: mod_base = OTHER; note = 2'-fluorouridine-3'-phosphate
  modified_base 15: mod_base = OTHER; note = 2'-O-methylguanosine-3'-phosphate
  modified_base 16: mod_base = OTHER; note = 2'-fluorocytidine-3'-phosphate
  modified_base 17: mod_base = OTHER; note = 2'-O-methyladenosine-3'-phosphate
  modified_base 18: mod_base = OTHER; note = 2'-O-methylguanosine-3'-phosphate
  modified_base 19: mod_base = OTHER; note = 2'-O-methyladenosine-3'-phosphate
  modified_base 20: mod_base = OTHER; note = 2'-O-methylcytidine-3'-phosphate
  modified_base 21: mod_base = OTHER; note = 2'-O-methyladenosine-3'-phosphorothioate
  modified_base 22: mod_base = OTHER; note = 2'-O-methyluridine-3'-phosphorothioate
  modified_base 23: mod_base = OTHER; note = 2'-O-methyluridine-3'-phosphate
atcggccttgggctgcagacatt

SEQ ID NO: 5373 - RNA, 23 nt, synthetic construct
  source 1..23: mol_type = other RNA
  modified_base 1: mod_base = OTHER; note = 2'-O-methyladenosine-3'-phosphorothioate
  modified_base 2: mod_base = OTHER; note = 2'-fluoroadenosine-3'-phosphorothioate
  modified_base 3: mod_base = OTHER; note = 2'-O-methyluridine-3'-phosphate
  modified_base 4: mod_base = OTHER; note = 2'-O-methylguanosine-3'-phosphate
  modified_base 5: mod_base = OTHER; note = 2'-O-methylguanosine-3'-phosphate
  modified_base 6: mod_base = OTHER; note = 2'-fluoroguanosine-3'-phosphate
  modified_base 7: mod_base = OTHER; note = 2'-O-methyluridine-3'-phosphate
  modified_base 8: mod_base = OTHER; note = 2'-fluorouridine-3'-phosphate
  modified_base 9: mod_base = OTHER; note = 2'-fluorouridine-3'-phosphate
  modified_base 10: mod_base = OTHER; note = 2'-O-methyluridine-3'-phosphate
  modified_base 11: mod_base = OTHER; note = 2'-O-methylguanosine-3'-phosphate
  modified_base 12: mod_base = OTHER; note = 2'-O-methylcytidine-3'-phosphate
  modified_base 13: mod_base = OTHER; note = 2'-O-methylguanosine-3'-phosphate
  modified_base 14: mod_base = OTHER; note = 2'-fluorocytidine-3'-phosphate
  modified_base 15: mod_base = OTHER; note = 2'-O-methyladenosine-3'-phosphate
  modified_base 16: mod_base = OTHER; note = 2'-fluoroadenosine-3'-phosphate
  modified_base 17: mod_base = OTHER; note = 2'-O-methyladenosine-3'-phosphate
  modified_base 18: mod_base = OTHER; note = 2'-O-methylcytidine-3'-phosphate
  modified_base 19: mod_base = OTHER; note = 2'-O-methyluridine-3'-phosphate
  modified_base 20: mod_base = OTHER; note = 2'-O-methylcytidine-3'-phosphate
  modified_base 21: mod_base = OTHER; note = 2'-O-methylguanosine-3'-phosphorothioate
  modified_base 22: mod_base = OTHER; note = 2'-O-methylguanosine-3'-phosphorothioate
  modified_base 23: mod_base = OTHER; note = 2'-O-methylcytidine-3'-phosphate
aatgggttttgcgcaaactcggc

SEQ ID NO: 5374 - RNA, 23 nt, synthetic construct
  source 1..23: mol_type = other RNA
  modified_base 1: mod_base = OTHER; note = 2'-O-methyladenosine-3'-phosphorothioate
  modified_base 2: mod_base = OTHER; note = 2'-fluoroguanosine-3'-phosphorothioate
  modified_base 3: mod_base = OTHER; note = 2'-O-methyluridine-3'-phosphate
  modified_base 4: mod_base = OTHER; note = 2'-O-methyluridine-3'-phosphate
  modified_base 5: mod_base = OTHER; note = 2'-O-methyluridine-3'-phosphate
  modified_base 6: mod_base = OTHER; note = 2'-fluoroadenosine-3'-phosphate
  modified_base 7: mod_base = OTHER; note = 2'-O-methylcytidine-3'-phosphate
  modified_base 8: mod_base = OTHER; note = 2'-fluorocytidine-3'-phosphate
  modified_base 9: mod_base = OTHER; note = 2'-fluoroadenosine-3'-phosphate
  modified_base 10: mod_base = OTHER; note = 2'-O-methyladenosine-3'-phosphate
  modified_base 11: mod_base = OTHER; note = 2'-O-methyladenosine-3'-phosphate
  modified_base 12: mod_base = OTHER; note = 2'-O-methylguanosine-3'-phosphate
  modified_base 13: mod_base = OTHER; note = 2'-O-methyladenosine-3'-phosphate
  modified_base 14: mod_base = OTHER; note = 2'-fluoroadenosine-3'-phosphate
  modified_base 15: mod_base = OTHER; note = 2'-O-methylcytidine-3'-phosphate
  modified_base 16: mod_base = OTHER; note = 2'-fluoroadenosine-3'-phosphate
  modified_base 17: mod_base = OTHER; note = 2'-O-methylcytidine-3'-phosphate
  modified_base 18: mod_base = OTHER; note = 2'-O-methyladenosine-3'-phosphate
  modified_base 19: mod_base = OTHER; note = 2'-O-methyluridine-3'-phosphate
  modified_base 20: mod_base = OTHER; note = 2'-O-methylguanosine-3'-phosphate
  modified_base 21: mod_base = OTHER; note = 2'-O-methylguanosine-3'-phosphorothioate
  modified_base 22: mod_base = OTHER; note = 2'-O-methylguanosine-3'-phosphorothioate
  modified_base 23: mod_base = OTHER; note = 2'-O-methyluridine-3'-phosphate
agtttaccaaagaacacatgggt

SEQ ID NO: 5375 - RNA, 23 nt, synthetic construct
  source 1..23: mol_type = other RNA
  modified_base 1: mod_base = OTHER; note = 2'-O-methyladenosine-3'-phosphorothioate
  modified_base 2: mod_base = OTHER; note = 2'-fluoroguanosine-3'-phosphorothioate
  modified_base 3: mod_base = OTHER; note = 2'-O-methyladenosine-3'-phosphate
  modified_base 4: mod_base = OTHER; note = 2'-O-methylguanosine-3'-phosphate
  modified_base 5: mod_base = OTHER; note = 2'-O-methylcytidine-3'-phosphate
  modified_base 6: mod_base = OTHER; note = 2'-fluoroadenosine-3'-phosphate
  modified_base 7: mod_base = OTHER; note = 2'-O-methyladenosine-3'-phosphate
  modified_base 8: mod_base = OTHER; note = 2'-fluoroadenosine-3'-phosphate
  modified_base 9: mod_base = OTHER; note = 2'-fluorocytidine-3'-phosphate
  modified_base 10: mod_base = OTHER; note = 2'-O-methyladenosine-3'-phosphate
  modified_base 11: mod_base = OTHER; note = 2'-O-methylcytidine-3'-phosphate
  modified_base 12: mod_base = OTHER; note = 2'-O-methyladenosine-3'-phosphate
  modified_base 13: mod_base = OTHER; note = 2'-O-methylguanosine-3'-phosphate
  modified_base 14: mod_base = OTHER; note = 2'-fluoroadenosine-3'-phosphate
  modified_base 15: mod_base = OTHER; note = 2'-O-methylcytidine-3'-phosphate
  modified_base 16: mod_base = OTHER; note = 2'-fluoroadenosine-3'-phosphate
  modified_base 17: mod_base = OTHER; note = 2'-O-methyluridine-3'-phosphate
  modified_base 18: mod_base = OTHER; note = 2'-O-methylcytidine-3'-phosphate
  modified_base 19: mod_base = OTHER; note = 2'-O-methyladenosine-3'-phosphate
  modified_base 20: mod_base = OTHER; note = 2'-O-methylcytidine-3'-phosphate
  modified_base 21: mod_base = OTHER; note = 2'-O-methylguanosine-3'-phosphorothioate
  modified_base 22: mod_base = OTHER; note = 2'-O-methyluridine-3'-phosphorothioate
  modified_base 23: mod_base = OTHER; note = 2'-O-methyluridine-3'-phosphate
agagcaaacacagacatcacgtt

SEQ ID NO: 5376 - RNA, 23 nt, synthetic construct
  source 1..23: mol_type = other RNA
  modified_base 1: mod_base = OTHER; note = 2'-O-methyladenosine-3'-phosphorothioate
  modified_base 2: mod_base = OTHER; note = 2'-fluoroadenosine-3'-phosphorothioate
  modified_base 3: mod_base = OTHER; note = 2'-O-methylcytidine-3'-phosphate
  modified_base 4: mod_base = OTHER; note = 2'-O-methylcytidine-3'-phosphate
  modified_base 5: mod_base = OTHER; note = 2'-O-methyluridine-3'-phosphate
  modified_base 6: mod_base = OTHER; note = 2'-fluorocytidine-3'-phosphate
  modified_base 7: mod_base = OTHER; note = 2'-O-methyluridine-3'-phosphate
  modified_base 8: mod_base = OTHER; note = 2'-fluorouridine-3'-phosphate
  modified_base 9: mod_base = OTHER; note = 2'-fluoroadenosine-3'-phosphate
  modified_base 10: mod_base = OTHER; note = 2'-O-methylcytidine-3'-phosphate
  modified_base 11: mod_base = OTHER; note = 2'-O-methylcytidine-3'-phosphate
  modified_base 12: mod_base = OTHER; note = 2'-O-methylcytidine-3'-phosphate
  modified_base 13: mod_base = OTHER; note = 2'-O-methyluridine-3'-phosphate
  modified_base 14: mod_base = OTHER; note = 2'-fluorocytidine-3'-phosphate
  modified_base 15: mod_base = OTHER; note = 2'-O-methyladenosine-3'-phosphate
  modified_base 16: mod_base = OTHER; note = 2'-fluorouridine-3'-phosphate
  modified_base 17: mod_base = OTHER; note = 2'-O-methyladenosine-3'-phosphate
  modified_base 18: mod_base = OTHER; note = 2'-O-methylguanosine-3'-phosphate
  modified_base 19: mod_base = OTHER; note = 2'-O-methylguanosine-3'-phosphate
  modified_base 20: mod_base = OTHER; note = 2'-O-methyladenosine-3'-phosphate
  modified_base 21: mod_base = OTHER; note = 2'-O-methylguanosine-3'-phosphorothioate
  modified_base 22: mod_base = OTHER; note = 2'-O-methylguanosine-3'-phosphorothioate
  modified_base 23: mod_base = OTHER; note = 2'-O-methylguanosine-3'-phosphate
aacctcttaccctcataggaggg

SEQ ID NO: 5377 - RNA, 23 nt, synthetic construct
  source 1..23: mol_type = other RNA
  modified_base 1: mod_base = OTHER; note = 2'-O-methyladenosine-3'-phosphorothioate
  modified_base 2: mod_base = OTHER; note = 2'-fluorocytidine-3'-phosphorothioate
  modified_base 3: mod_base = OTHER; note = 2'-O-methyluridine-3'-phosphate
  modified_base 4: mod_base = OTHER; note = 2'-O-methyladenosine-3'-phosphate
  modified_base 5: mod_base = OTHER; note = 2'-O-methylguanosine-3'-phosphate
  modified_base 6: mod_base = OTHER; note = 2'-fluoroguanosine-3'-phosphate
  modified_base 7: mod_base = OTHER; note = 2'-O-methylguanosine-3'-phosphate
  modified_base 8: mod_base = OTHER; note = 2'-fluorouridine-3'-phosphate
  modified_base 9: mod_base = OTHER; note = 2'-fluorouridine-3'-phosphate
  modified_base 10: mod_base = OTHER; note = 2'-O-methylcytidine-3'-phosphate
  modified_base 11: mod_base = OTHER; note = 2'-O-methylcytidine-3'-phosphate
  modified_base 12: mod_base = OTHER; note = 2'-O-methyluridine-3'-phosphate
  modified_base 13: mod_base = OTHER; note = 2'-O-methyladenosine-3'-phosphate
  modified_base 14: mod_base = OTHER; note = 2'-fluorouridine-3'-phosphate
  modified_base 15: mod_base = OTHER; note = 2'-O-methyluridine-3'-phosphate
  modified_base 16: mod_base = OTHER; note = 2'-fluorouridine-3'-phosphate
  modified_base 17: mod_base = OTHER; note = 2'-O-methylcytidine-3'-phosphate
  modified_base 18: mod_base = OTHER; note = 2'-O-methyladenosine-3'-phosphate
  modified_base 19: mod_base = OTHER; note = 2'-O-methylguanosine-3'-phosphate
  modified_base 20: mod_base = OTHER; note = 2'-O-methylguanosine-3'-phosphate
  modified_base 21: mod_base = OTHER; note = 2'-O-methylguanosine-3'-phosphorothioate
  modified_base 22: mod_base = OTHER; note = 2'-O-methyladenosine-3'-phosphorothioate
  modified_base 23: mod_base = OTHER; note = 2'-O-methylcytidine-3'-phosphate
actagggttcctatttcagggac

SEQ ID NO: 5378 - RNA, 23 nt, synthetic construct
  source 1..23: mol_type = other RNA
  modified_base 1: mod_base = OTHER; note = 2'-O-methyladenosine-3'-phosphorothioate
  modified_base 2: mod_base = OTHER; note = 2'-fluorouridine -3'-phosphorothioate
  modified_base 3: mod_base = OTHER; note = 2'-O-methyluridine-3'-phosphate
  modified_base 4: mod_base = OTHER; note = 2'-O-methyluridine-3'-phosphate
  modified_base 5: mod_base = OTHER; note = 2'-O-methylcytidine-3'-phosphate
  modified_base 6: mod_base = OTHER; note = 2'-fluoroadenosine-3'-phosphate
  modified_base 7: mod_base = OTHER; note = 2'-O-methylguanosine-3'-phosphate
  modified_base 8: mod_base = OTHER; note = 2'-fluoroadenosine-3'-phosphate
  modified_base 9: mod_base = OTHER; note = 2'-fluorocytidine-3'-phosphate
  modified_base 10: mod_base = OTHER; note = 2'-O-methyluridine-3'-phosphate
  modified_base 11: mod_base = OTHER; note = 2'-O-methyluridine-3'-phosphate
  modified_base 12: mod_base = OTHER; note = 2'-O-methyluridine-3'-phosphate
  modified_base 13: mod_base = OTHER; note = 2'-O-methylcytidine-3'-phosphate
  modified_base 14: mod_base = OTHER; note = 2'-fluorouridine-3'-phosphate
  modified_base 15: mod_base = OTHER; note = 2'-O-methylcytidine-3'-phosphate
  modified_base 16: mod_base = OTHER; note = 2'-fluorocytidine-3'-phosphate
  modified_base 17: mod_base = OTHER; note = 2'-O-methyluridine-3'-phosphate
  modified_base 18: mod_base = OTHER; note = 2'-O-methylcytidine-3'-phosphate
  modified_base 19: mod_base = OTHER; note = 2'-O-methyluridine-3'-phosphate
  modified_base 20: mod_base = OTHER; note = 2'-O-methyladenosine-3'-phosphate
  modified_base 21: mod_base = OTHER; note = 2'-O-methylguanosine-3'-phosphorothioate
  modified_base 22: mod_base = OTHER; note = 2'-O-methylguanosine-3'-phosphorothioate
  modified_base 23: mod_base = OTHER; note = 2'-O-methylguanosine-3'-phosphate
atttcagactttctcctctaggg

SEQ ID NO: 5379 - RNA, 23 nt, synthetic construct
  source 1..23: mol_type = other RNA
  modified_base 1: mod_base = OTHER; note = 2'-O-methyladenosine-3'-phosphorothioate
  modified_base 2: mod_base = OTHER; note = 2'-fluorouridine -3'-phosphorothioate
  modified_base 3: mod_base = OTHER; note = 2'-O-methylcytidine-3'-phosphate
  modified_base 4: mod_base = OTHER; note = 2'-O-methyladenosine-3'-phosphate
  modified_base 5: mod_base = OTHER; note = 2'-O-methyladenosine-3'-phosphate
  modified_base 6: mod_base = OTHER; note = 2'-fluoroguanosine-3'-phosphate
  modified_base 7: mod_base = OTHER; note = 2'-O-methylcytidine-3'-phosphate
  modified_base 8: mod_base = OTHER; note = 2'-fluorouridine-3'-phosphate
  modified_base 9: mod_base = OTHER; note = 2'-fluorocytidine-3'-phosphate
  modified_base 10: mod_base = OTHER; note = 2'-O-methyladenosine-3'-phosphate
  modified_base 11: mod_base = OTHER; note = 2'-O-methylguanosine-3'-phosphate
  modified_base 12: mod_base = OTHER; note = 2'-O-methyladenosine-3'-phosphate
  modified_base 13: mod_base = OTHER; note = 2'-O-methyluridine-3'-phosphate
  modified_base 14: mod_base = OTHER; note = 2'-fluorouridine-3'-phosphate
  modified_base 15: mod_base = OTHER; note = 2'-O-methyluridine-3'-phosphate
  modified_base 16: mod_base = OTHER; note = 2'-fluoroadenosine-3'-phosphate
  modified_base 17: mod_base = OTHER; note = 2'-O-methylcytidine-3'-phosphate
  modified_base 18: mod_base = OTHER; note = 2'-O-methyladenosine-3'-phosphate
  modified_base 19: mod_base = OTHER; note = 2'-O-methylguanosine-3'-phosphate
  modified_base 20: mod_base = OTHER; note = 2'-O-methyluridine-3'-phosphate
  modified_base 21: mod_base = OTHER; note = 2'-O-methylcytidine-3'-phosphorothioate
  modified_base 22: mod_base = OTHER; note = 2'-O-methylcytidine-3'-phosphorothioate
  modified_base 23: mod_base = OTHER; note = 2'-O-methylcytidine-3'-phosphate
atcaagctcagatttacagtccc

SEQ ID NO: 5380 - RNA, 23 nt, synthetic construct
  source 1..23: mol_type = other RNA
  modified_base 1: mod_base = OTHER; note = 2'-O-methyladenosine-3'-phosphorothioate
  modified_base 2: mod_base = OTHER; note = 2'-fluoroadenosine-3'-phosphorothioate
  modified_base 3: mod_base = OTHER; note = 2'-O-methyluridine-3'-phosphate
  modified_base 4: mod_base = OTHER; note = 2'-O-methyladenosine-3'-phosphate
  modified_base 5: mod_base = OTHER; note = 2'-O-methyladenosine-3'-phosphate
  modified_base 6: mod_base = OTHER; note = 2'-fluorocytidine-3'-phosphate
  modified_base 7: mod_base = OTHER; note = 2'-O-methyluridine-3'-phosphate
  modified_base 8: mod_base = OTHER; note = 2'-fluorouridine-3'-phosphate
  modified_base 9: mod_base = OTHER; note = 2'-fluorocytidine-3'-phosphate
  modified_base 10: mod_base = OTHER; note = 2'-O-methylcytidine-3'-phosphate
  modified_base 11: mod_base = OTHER; note = 2'-O-methyladenosine-3'-phosphate
  modified_base 12: mod_base = OTHER; note = 2'-O-methyluridine-3'-phosphate
  modified_base 13: mod_base = OTHER; note = 2'-O-methylguanosine-3'-phosphate
  modified_base 14: mod_base = OTHER; note = 2'-fluoroguanosine-3'-phosphate
  modified_base 15: mod_base = OTHER; note = 2'-O-methylguanosine-3'-phosphate
  modified_base 16: mod_base = OTHER; note = 2'-fluorouridine-3'-phosphate
  modified_base 17: mod_base = OTHER; note = 2'-O-methyluridine-3'-phosphate
  modified_base 18: mod_base = OTHER; note = 2'-O-methylguanosine-3'-phosphate
  modified_base 19: mod_base = OTHER; note = 2'-O-methylcytidine-3'-phosphate
  modified_base 20: mod_base = OTHER; note = 2'-O-methyluridine-3'-phosphate
  modified_base 21: mod_base = OTHER; note = 2'-O-methylcytidine-3'-phosphorothioate
  modified_base 22: mod_base = OTHER; note = 2'-O-methyladenosine-3'-phosphorothioate
  modified_base 23: mod_base = OTHER; note = 2'-O-methylguanosine-3'-phosphate
aataacttccatgggttgctcag

SEQ ID NO: 5381 - RNA, 23 nt, synthetic construct
  source 1..23: mol_type = other RNA
  modified_base 1: mod_base = OTHER; note = 2'-O-methyladenosine-3'-phosphorothioate
  modified_base 2: mod_base = OTHER; note = 2'-fluorouridine -3'-phosphorothioate
  modified_base 3: mod_base = OTHER; note = 2'-O-methylcytidine-3'-phosphate
  modified_base 4: mod_base = OTHER; note = 2'-O-methyluridine-3'-phosphate
  modified_base 5: mod_base = OTHER; note = 2'-O-methylcytidine-3'-phosphate
  modified_base 6: mod_base = OTHER; note = 2'-fluorocytidine-3'-phosphate
  modified_base 7: mod_base = OTHER; note = 2'-O-methyluridine-3'-phosphate
  modified_base 8: mod_base = OTHER; note = 2'-fluorocytidine-3'-phosphate
  modified_base 9: mod_base = OTHER; note = 2'-fluoroadenosine-3'-phosphate
  modified_base 10: mod_base = OTHER; note = 2'-O-methyladenosine-3'-phosphate
  modified_base 11: mod_base = OTHER; note = 2'-O-methylguanosine-3'-phosphate
  modified_base 12: mod_base = OTHER; note = 2'-O-methyluridine-3'-phosphate
  modified_base 13: mod_base = OTHER; note = 2'-O-methylcytidine-3'-phosphate
  modified_base 14: mod_base = OTHER; note = 2'-fluoroadenosine-3'-phosphate
  modified_base 15: mod_base = OTHER; note = 2'-O-methyladenosine-3'-phosphate
  modified_base 16: mod_base = OTHER; note = 2'-fluoroadenosine-3'-phosphate
  modified_base 17: mod_base = OTHER; note = 2'-O-methylguanosine-3'-phosphate
  modified_base 18: mod_base = OTHER; note = 2'-O-methylguanosine-3'-phosphate
  modified_base 19: mod_base = OTHER; note = 2'-O-methyluridine-3'-phosphate
  modified_base 20: mod_base = OTHER; note = 2'-O-methylguanosine-3'-phosphate
  modified_base 21: mod_base = OTHER; note = 2'-O-methylguanosine-3'-phosphorothioate
  modified_base 22: mod_base = OTHER; note = 2'-O-methylguanosine-3'-phosphorothioate
  modified_base 23: mod_base = OTHER; note = 2'-O-methyladenosine-3'-phosphate
atctcctcaagtcaaaggtggga

SEQ ID NO: 5382 - RNA, 23 nt, synthetic construct
  source 1..23: mol_type = other RNA
  modified_base 1: mod_base = OTHER; note = 2'-O-methyladenosine-3'-phosphorothioate
  modified_base 2: mod_base = OTHER; note = 2'-fluoroadenosine-3'-phosphorothioate
  modified_base 3: mod_base = OTHER; note = 2'-O-methylguanosine-3'-phosphate
  modified_base 4: mod_base = OTHER; note = 2'-O-methyladenosine-3'-phosphate
  modified_base 5: mod_base = OTHER; note = 2'-O-methyluridine-3'-phosphate
  modified_base 6: mod_base = OTHER; note = 2'-fluorouridine-3'-phosphate
  modified_base 7: mod_base = OTHER; note = 2'-O-methylcytidine-3'-phosphate
  modified_base 8: mod_base = OTHER; note = 2'-fluorouridine-3'-phosphate
  modified_base 9: mod_base = OTHER; note = 2'-fluorocytidine-3'-phosphate
  modified_base 10: mod_base = OTHER; note = 2'-O-methylcytidine-3'-phosphate
  modified_base 11: mod_base = OTHER; note = 2'-O-methyluridine-3'-phosphate
  modified_base 12: mod_base = OTHER; note = 2'-O-methyluridine-3'-phosphate
  modified_base 13: mod_base = OTHER; note = 2'-O-methyladenosine-3'-phosphate
  modified_base 14: mod_base = OTHER; note = 2'-fluoroguanosine-3'-phosphate
  modified_base 15: mod_base = OTHER; note = 2'-O-methyladenosine-3'-phosphate
  modified_base 16: mod_base = OTHER; note = 2'-fluorouridine-3'-phosphate
  modified_base 17: mod_base = OTHER; note = 2'-O-methylguanosine-3'-phosphate
  modified_base 18: mod_base = OTHER; note = 2'-O-methyladenosine-3'-phosphate
  modified_base 19: mod_base = OTHER; note = 2'-O-methyladenosine-3'-phosphate
  modified_base 20: mod_base = OTHER; note = 2'-O-methylguanosine-3'-phosphate
  modified_base 21: mod_base = OTHER; note = 2'-O-methylguanosine-3'-phosphorothioate
  modified_base 22: mod_base = OTHER; note = 2'-O-methyluridine-3'-phosphorothioate
  modified_base 23: mod_base = OTHER; note = 2'-O-methylcytidine-3'-phosphate
aagattctccttagatgaaggtc

SEQ ID NO: 5383 - RNA, 23 nt, synthetic construct
  source 1..23: mol_type = other RNA
  modified_base 1: mod_base = OTHER; note = 2'-O-methyladenosine-3'-phosphorothioate
  modified_base 2: mod_base = OTHER; note = 2'-fluoroguanosine-3'-phosphorothioate
  modified_base 3: mod_base = OTHER; note = 2'-O-methylguanosine-3'-phosphate
  modified_base 4: mod_base = OTHER; note = 2'-O-methyladenosine-3'-phosphate
  modified_base 5: mod_base = OTHER; note = 2'-O-methylguanosine-3'-phosphate
  modified_base 6: mod_base = OTHER; note = 2'-fluoroadenosine-3'-phosphate
  modified_base 7: mod_base = OTHER; note = 2'-O-methylcytidine-3'-phosphate
  modified_base 8: mod_base = OTHER; note = 2'-fluoroadenosine-3'-phosphate
  modified_base 9: mod_base = OTHER; note = 2'-fluorocytidine-3'-phosphate
  modified_base 10: mod_base = OTHER; note = 2'-O-methylcytidine-3'-phosphate
  modified_base 11: mod_base = OTHER; note = 2'-O-methyladenosine-3'-phosphate
  modified_base 12: mod_base = OTHER; note = 2'-O-methylguanosine-3'-phosphate
  modified_base 13: mod_base = OTHER; note = 2'-O-methyladenosine-3'-phosphate
  modified_base 14: mod_base = OTHER; note = 2'-fluoroadenosine-3'-phosphate
  modified_base 15: mod_base = OTHER; note = 2'-O-methylguanosine-3'-phosphate
  modified_base 16: mod_base = OTHER; note = 2'-fluoroguanosine-3'-phosphate
  modified_base 17: mod_base = OTHER; note = 2'-O-methylcytidine-3'-phosphate
  modified_base 18: mod_base = OTHER; note = 2'-O-methylcytidine-3'-phosphate
  modified_base 19: mod_base = OTHER; note = 2'-O-methyluridine-3'-phosphate
  modified_base 20: mod_base = OTHER; note = 2'-O-methylcytidine-3'-phosphate
  modified_base 21: mod_base = OTHER; note = 2'-O-methylcytidine-3'-phosphorothioate
  modified_base 22: mod_base = OTHER; note = 2'-O-methyluridine-3'-phosphorothioate
  modified_base 23: mod_base = OTHER; note = 2'-O-methyluridine-3'-phosphate
aggagacaccagaaggcctcctt

SEQ ID NO: 5384 - RNA, 23 nt, synthetic construct
  source 1..23: mol_type = other RNA
  modified_base 1: mod_base = OTHER; note = 2'-O-methyladenosine-3'-phosphorothioate
  modified_base 2: mod_base = OTHER; note = 2'-fluoroadenosine-3'-phosphorothioate
  modified_base 3: mod_base = OTHER; note = 2'-O-methylguanosine-3'-phosphate
  modified_base 4: mod_base = OTHER; note = 2'-O-methyladenosine-3'-phosphate
  modified_base 5: mod_base = OTHER; note = 2'-O-methylcytidine-3'-phosphate
  modified_base 6: mod_base = OTHER; note = 2'-fluorouridine-3'-phosphate
  modified_base 7: mod_base = OTHER; note = 2'-O-methyladenosine-3'-phosphate
  modified_base 8: mod_base = OTHER; note = 2'-fluoroadenosine-3'-phosphate
  modified_base 9: mod_base = OTHER; note = 2'-fluoroguanosine-3'-phosphate
  modified_base 10: mod_base = OTHER; note = 2'-O-methylcytidine-3'-phosphate
  modified_base 11: mod_base = OTHER; note = 2'-O-methyluridine-3'-phosphate
  modified_base 12: mod_base = OTHER; note = 2'-O-methylguanosine-3'-phosphate
  modified_base 13: mod_base = OTHER; note = 2'-O-methyluridine-3'-phosphate
  modified_base 14: mod_base = OTHER; note = 2'-fluoroadenosine-3'-phosphate
  modified_base 15: mod_base = OTHER; note = 2'-O-methyladenosine-3'-phosphate
  modified_base 16: mod_base = OTHER; note = 2'-fluorouridine-3'-phosphate
  modified_base 17: mod_base = OTHER; note = 2'-O-methyluridine-3'-phosphate
  modified_base 18: mod_base = OTHER; note = 2'-O-methylguanosine-3'-phosphate
  modified_base 19: mod_base = OTHER; note = 2'-O-methylguanosine-3'-phosphate
  modified_base 20: mod_base = OTHER; note = 2'-O-methylguanosine-3'-phosphate
  modified_base 21: mod_base = OTHER; note = 2'-O-methyladenosine-3'-phosphorothioate
  modified_base 22: mod_base = OTHER; note = 2'-O-methyladenosine-3'-phosphorothioate
  modified_base 23: mod_base = OTHER; note = 2'-O-methylguanosine-3'-phosphate
aagactaagctgtaattgggaag

SEQ ID NO: 5385 - RNA, 23 nt, synthetic construct
  source 1..23: mol_type = other RNA
  modified_base 1: mod_base = OTHER; note = 2'-O-methyladenosine-3'-phosphorothioate
  modified_base 2: mod_base = OTHER; note = 2'-fluorocytidine-3'-phosphorothioate
  modified_base 3: mod_base = OTHER; note = 2'-O-methylcytidine-3'-phosphate
  modified_base 4: mod_base = OTHER; note = 2'-O-methyladenosine-3'-phosphate
  modified_base 5: mod_base = OTHER; note = 2'-O-methylguanosine-3'-phosphate
  modified_base 6: mod_base = OTHER; note = 2'-fluorouridine-3'-phosphate
  modified_base 7: mod_base = OTHER; note = 2'-O-methylcytidine-3'-phosphate
  modified_base 8: mod_base = OTHER; note = 2'-fluorocytidine-3'-phosphate
  modified_base 9: mod_base = OTHER; note = 2'-fluorouridine-3'-phosphate
  modified_base 10: mod_base = OTHER; note = 2'-O-methyladenosine-3'-phosphate
  modified_base 11: mod_base = OTHER; note = 2'-O-methylguanosine-3'-phosphate
  modified_base 12: mod_base = OTHER; note = 2'-O-methylcytidine-3'-phosphate
  modified_base 13: mod_base = OTHER; note = 2'-O-methylcytidine-3'-phosphate
  modified_base 14: mod_base = OTHER; note = 2'-fluorocytidine-3'-phosphate
  modified_base 15: mod_base = OTHER; note = 2'-O-methyluridine-3'-phosphate
  modified_base 16: mod_base = OTHER; note = 2'-fluoroguanosine-3'-phosphate
  modified_base 17: mod_base = OTHER; note = 2'-O-methylguanosine-3'-phosphate
  modified_base 18: mod_base = OTHER; note = 2'-O-methyladenosine-3'-phosphate
  modified_base 19: mod_base = OTHER; note = 2'-O-methylguanosine-3'-phosphate
  modified_base 20: mod_base = OTHER; note = 2'-O-methyladenosine-3'-phosphate
  modified_base 21: mod_base = OTHER; note = 2'-O-methylcytidine-3'-phosphorothioate
  modified_base 22: mod_base = OTHER; note = 2'-O-methyluridine-3'-phosphorothioate
  modified_base 23: mod_base = OTHER; note = 2'-O-methyladenosine-3'-phosphate
accagtcctagccctggagacta

SEQ ID NO: 5386 - RNA, 23 nt, synthetic construct
  source 1..23: mol_type = other RNA
  modified_base 1: mod_base = OTHER; note = 2'-O-methyladenosine-3'-phosphorothioate
  modified_base 2: mod_base = OTHER; note = 2'-fluoroguanosine-3'-phosphorothioate
  modified_base 3: mod_base = OTHER; note = 2'-O-methyluridine-3'-phosphate
  modified_base 4: mod_base = OTHER; note = 2'-O-methylguanosine-3'-phosphate
  modified_base 5: mod_base = OTHER; note = 2'-O-methyladenosine-3'-phosphate
  modified_base 6: mod_base = OTHER; note = 2'-fluoroadenosine-3'-phosphate
  modified_base 7: mod_base = OTHER; note = 2'-O-methyluridine-3'-phosphate
  modified_base 8: mod_base = OTHER; note = 2'-fluoroguanosine-3'-phosphate
  modified_base 9: mod_base = OTHER; note = 2'-fluoroadenosine-3'-phosphate
  modified_base 10: mod_base = OTHER; note = 2'-O-methylcytidine-3'-phosphate
  modified_base 11: mod_base = OTHER; note = 2'-O-methyluridine-3'-phosphate
  modified_base 12: mod_base = OTHER; note = 2'-O-methylcytidine-3'-phosphate
  modified_base 13: mod_base = OTHER; note = 2'-O-methyladenosine-3'-phosphate
  modified_base 14: mod_base = OTHER; note = 2'-fluorocytidine-3'-phosphate
  modified_base 15: mod_base = OTHER; note = 2'-O-methyluridine-3'-phosphate
  modified_base 16: mod_base = OTHER; note = 2'-fluorouridine-3'-phosphate
  modified_base 17: mod_base = OTHER; note = 2'-O-methyluridine-3'-phosphate
  modified_base 18: mod_base = OTHER; note = 2'-O-methylguanosine-3'-phosphate
  modified_base 19: mod_base = OTHER; note = 2'-O-methylcytidine-3'-phosphate
  modified_base 20: mod_base = OTHER; note = 2'-O-methyluridine-3'-phosphate
  modified_base 21: mod_base = OTHER; note = 2'-O-methyluridine-3'-phosphorothioate
  modified_base 22: mod_base = OTHER; note = 2'-O-methyluridine-3'-phosphorothioate
  modified_base 23: mod_base = OTHER; note = 2'-O-methyladenosine-3'-phosphate
agtgaatgactcactttgcttta

SEQ ID NO: 5387 - RNA, 23 nt, synthetic construct
  source 1..23: mol_type = other RNA
  modified_base 1: mod_base = OTHER; note = 2'-O-methyladenosine-3'-phosphorothioate
  modified_base 2: mod_base = OTHER; note = 2'-fluoroadenosine-3'-phosphorothioate
  modified_base 3: mod_base = OTHER; note = 2'-O-methyluridine-3'-phosphate
  modified_base 4: mod_base = OTHER; note = 2'-O-methyluridine-3'-phosphate
  modified_base 5: mod_base = OTHER; note = 2'-O-methyladenosine-3'-phosphate
  modified_base 6: mod_base = OTHER; note = 2'-fluoroadenosine-3'-phosphate
  modified_base 7: mod_base = OTHER; note = 2'-O-methyluridine-3'-phosphate
  modified_base 8: mod_base = OTHER; note = 2'-fluoroadenosine-3'-phosphate
  modified_base 9: mod_base = OTHER; note = 2'-fluoroadenosine-3'-phosphate
  modified_base 10: mod_base = OTHER; note = 2'-O-methyladenosine-3'-phosphate
  modified_base 11: mod_base = OTHER; note = 2'-O-methyluridine-3'-phosphate
  modified_base 12: mod_base = OTHER; note = 2'-O-methyluridine-3'-phosphate
  modified_base 13: mod_base = OTHER; note = 2'-O-methylguanosine-3'-phosphate
  modified_base 14: mod_base = OTHER; note = 2'-fluorouridine-3'-phosphate
  modified_base 15: mod_base = OTHER; note = 2'-O-methyluridine-3'-phosphate
  modified_base 16: mod_base = OTHER; note = 2'-fluorocytidine-3'-phosphate
  modified_base 17: mod_base = OTHER; note = 2'-O-methyladenosine-3'-phosphate
  modified_base 18: mod_base = OTHER; note = 2'-O-methylcytidine-3'-phosphate
  modified_base 19: mod_base = OTHER; note = 2'-O-methylcytidine-3'-phosphate
  modified_base 20: mod_base = OTHER; note = 2'-O-methyladenosine-3'-phosphate
  modified_base 21: mod_base = OTHER; note = 2'-O-methylcytidine-3'-phosphorothioate
  modified_base 22: mod_base = OTHER; note = 2'-O-methylcytidine-3'-phosphorothioate
  modified_base 23: mod_base = OTHER; note = 2'-O-methylcytidine-3'-phosphate
aattaataaattgttcaccaccc

SEQ ID NO: 5388 - RNA, 23 nt, synthetic construct
  source 1..23: mol_type = other RNA
  modified_base 1: mod_base = OTHER; note = 2'-O-methyladenosine-3'-phosphorothioate
  modified_base 2: mod_base = OTHER; note = 2'-fluoroadenosine-3'-phosphorothioate
  modified_base 3: mod_base = OTHER; note = 2'-O-methyladenosine-3'-phosphate
  modified_base 4: mod_base = OTHER; note = 2'-O-methyluridine-3'-phosphate
  modified_base 5: mod_base = OTHER; note = 2'-O-methyladenosine-3'-phosphate
  modified_base 6: mod_base = OTHER; note = 2'-fluorouridine-3'-phosphate
  modified_base 7: mod_base = OTHER; note = 2'-O-methyluridine-3'-phosphate
  modified_base 8: mod_base = OTHER; note = 2'-fluoroguanosine-3'-phosphate
  modified_base 9: mod_base = OTHER; note = 2'-fluorocytidine-3'-phosphate
  modified_base 10: mod_base = OTHER; note = 2'-O-methyladenosine-3'-phosphate
  modified_base 11: mod_base = OTHER; note = 2'-O-methyluridine-3'-phosphate
  modified_base 12: mod_base = OTHER; note = 2'-O-methyluridine-3'-phosphate
  modified_base 13: mod_base = OTHER; note = 2'-O-methyladenosine-3'-phosphate
  modified_base 14: mod_base = OTHER; note = 2'-fluoroadenosine-3'-phosphate
  modified_base 15: mod_base = OTHER; note = 2'-O-methyladenosine-3'-phosphate
  modified_base 16: mod_base = OTHER; note = 2'-fluoroguanosine-3'-phosphate
  modified_base 17: mod_base = OTHER; note = 2'-O-methyluridine-3'-phosphate
  modified_base 18: mod_base = OTHER; note = 2'-O-methylcytidine-3'-phosphate
  modified_base 19: mod_base = OTHER; note = 2'-O-methylcytidine-3'-phosphate
  modified_base 20: mod_base = OTHER; note = 2'-O-methyluridine-3'-phosphate
  modified_base 21: mod_base = OTHER; note = 2'-O-methyladenosine-3'-phosphorothioate
  modified_base 22: mod_base = OTHER; note = 2'-O-methyluridine-3'-phosphorothioate
  modified_base 23: mod_base = OTHER; note = 2'-O-methylcytidine-3'-phosphate
aaatattgcattaaagtcctatc

SEQ ID NO: 5389 - RNA, 23 nt, synthetic construct
  source 1..23: mol_type = other RNA
  modified_base 1: mod_base = OTHER; note = 2'-O-methyladenosine-3'-phosphorothioate
  modified_base 2: mod_base = OTHER; note = 2'-fluoroadenosine-3'-phosphorothioate
  modified_base 3: mod_base = OTHER; note = 2'-O-methyladenosine-3'-phosphate
  modified_base 4: mod_base = OTHER; note = 2'-O-methyladenosine-3'-phosphate
  modified_base 5: mod_base = OTHER; note = 2'-O-methyladenosine-3'-phosphate
  modified_base 6: mod_base = OTHER; note = 2'-fluoroguanosine-3'-phosphate
  modified_base 7: mod_base = OTHER; note = 2'-O-methyluridine-3'-phosphate
  modified_base 8: mod_base = OTHER; note = 2'-fluoroadenosine-3'-phosphate
  modified_base 9: mod_base = OTHER; note = 2'-fluoroguanosine-3'-phosphate
  modified_base 10: mod_base = OTHER; note = 2'-O-methylguanosine-3'-phosphate
  modified_base 11: mod_base = OTHER; note = 2'-O-methylcytidine-3'-phosphate
  modified_base 12: mod_base = OTHER; note = 2'-O-methyluridine-3'-phosphate
  modified_base 13: mod_base = OTHER; note = 2'-O-methyladenosine-3'-phosphate
  modified_base 14: mod_base = OTHER; note = 2'-fluorouridine-3'-phosphate
  modified_base 15: mod_base = OTHER; note = 2'-O-methyluridine-3'-phosphate
  modified_base 16: mod_base = OTHER; note = 2'-fluorouridine-3'-phosphate
  modified_base 17: mod_base = OTHER; note = 2'-O-methyluridine-3'-phosphate
  modified_base 18: mod_base = OTHER; note = 2'-O-methylguanosine-3'-phosphate
  modified_base 19: mod_base = OTHER; note = 2'-O-methyluridine-3'-phosphate
  modified_base 20: mod_base = OTHER; note = 2'-O-methyluridine-3'-phosphate
  modified_base 21: mod_base = OTHER; note = 2'-O-methylcytidine-3'-phosphorothioate
  modified_base 22: mod_base = OTHER; note = 2'-O-methyladenosine-3'-phosphorothioate
  modified_base 23: mod_base = OTHER; note = 2'-O-methyluridine-3'-phosphate
aaaaagtaggctattttgttcat

SEQ ID NO: 5390 - RNA, 23 nt, synthetic construct
  source 1..23: mol_type = other RNA
cttcttccagggcctctggcagc

SEQ ID NO: 5391 - RNA, 23 nt, synthetic construct
  source 1..23: mol_type = other RNA
gccaggacagagttgagaccaca

SEQ ID NO: 5392 - RNA, 23 nt, synthetic construct
  source 1..23: mol_type = other RNA
accacagctgttgagaccctgag

SEQ ID NO: 5393 - RNA, 23 nt, synthetic construct
  source 1..23: mol_type = other RNA
ctgagtctgtattgctcaagaag

SEQ ID NO: 5394 - RNA, 23 nt, synthetic construct
  source 1..23: mol_type = other RNA
aatgacctcctcattgcttctgg

SEQ ID NO: 5395 - RNA, 23 nt, synthetic construct
  source 1..23: mol_type = other RNA
tctggcctttctcctcctggctc

SEQ ID NO: 5396 - RNA, 23 nt, synthetic construct
  source 1..23: mol_type = other RNA
ggctccaaccacagtggccactc

SEQ ID NO: 5397 - RNA, 23 nt, synthetic construct
  source 1..23: mol_type = other RNA
tggcggtcagtgtccagcatgtg

SEQ ID NO: 5398 - RNA, 23 nt, synthetic construct
  source 1..23: mol_type = other RNA
ccaccttggaactggagagccag

SEQ ID NO: 5399 - RNA, 23 nt, synthetic construct
  source 1..23: mol_type = other RNA
gggagctgcttcttgatctggcc

SEQ ID NO: 5400 - RNA, 23 nt, synthetic construct
  source 1..23: mol_type = other RNA
agagaagcatcttggacaagctg

SEQ ID NO: 5401 - RNA, 23 nt, synthetic construct
  source 1..23: mol_type = other RNA
gcccaacactgaaccgccctgtg

SEQ ID NO: 5402 - RNA, 23 nt, synthetic construct
  source 1..23: mol_type = other RNA
tccagagctgctttgaggactgc

SEQ ID NO: 5403 - RNA, 23 nt, synthetic construct
  source 1..23: mol_type = other RNA
ggactgcactgcagcacctccac

SEQ ID NO: 5404 - RNA, 23 nt, synthetic construct
  source 1..23: mol_type = other RNA
gggcacttctagaggacaacagg

SEQ ID NO: 5405 - RNA, 23 nt, synthetic construct
  source 1..23: mol_type = other RNA
gggaacaggaatgtgaaatcatc

SEQ ID NO: 5406 - RNA, 23 nt, synthetic construct
  source 1..23: mol_type = other RNA
atcatcagctttgctgagacagg

SEQ ID NO: 5407 - RNA, 23 nt, synthetic construct
  source 1..23: mol_type = other RNA
acaggcctctccaccatcaacca

SEQ ID NO: 5408 - RNA, 23 nt, synthetic construct
  source 1..23: mol_type = other RNA
tcaaccagactcgtcttgatttt

SEQ ID NO: 5409 - RNA, 23 nt, synthetic construct
  source 1..23: mol_type = other RNA
tgattttcacttctcctctgata

SEQ ID NO: 5410 - RNA, 23 nt, synthetic construct
  source 1..23: mol_type = other RNA
tctgatagaactgctggtgacag

SEQ ID NO: 5411 - RNA, 23 nt, synthetic construct
  source 1..23: mol_type = other RNA
ccagtctcatgttctttgtgcag

SEQ ID NO: 5412 - RNA, 23 nt, synthetic construct
  source 1..23: mol_type = other RNA
tgtgcagctcccttccaatacca

SEQ ID NO: 5413 - RNA, 23 nt, synthetic construct
  source 1..23: mol_type = other RNA
aataccacttggaccttgaaagt

SEQ ID NO: 5414 - RNA, 23 nt, synthetic construct
  source 1..23: mol_type = other RNA
tgaaagtgagagtccttgtgctg

SEQ ID NO: 5415 - RNA, 23 nt, synthetic construct
  source 1..23: mol_type = other RNA
gtccacataataccaacctcacc

SEQ ID NO: 5416 - RNA, 23 nt, synthetic construct
  source 1..23: mol_type = other RNA
ccttggctactcagtacctgctg

SEQ ID NO: 5417 - RNA, 23 nt, synthetic construct
  source 1..23: mol_type = other RNA
cctgctggaggtggatgccagtg

SEQ ID NO: 5418 - RNA, 23 nt, synthetic construct
  source 1..23: mol_type = other RNA
gccagtggctggcatcaactccc

SEQ ID NO: 5419 - RNA, 23 nt, synthetic construct
  source 1..23: mol_type = other RNA
ggcctgaagctcaagctgcctgc

SEQ ID NO: 5420 - RNA, 23 nt, synthetic construct
  source 1..23: mol_type = other RNA
tggagctggtacttgaaggccag

SEQ ID NO: 5421 - RNA, 23 nt, synthetic construct
  source 1..23: mol_type = other RNA
tagcccagagctcagtcatcctg

SEQ ID NO: 5422 - RNA, 23 nt, synthetic construct
  source 1..23: mol_type = other RNA
gctgcccataggccttttgtggc

SEQ ID NO: 5423 - RNA, 23 nt, synthetic construct
  source 1..23: mol_type = other RNA
tgtggcagcccgggtgagagttg

SEQ ID NO: 5424 - RNA, 23 nt, synthetic construct
  source 1..23: mol_type = other RNA
gggcaaacaccagattcaccgac

SEQ ID NO: 5425 - RNA, 23 nt, synthetic construct
  source 1..23: mol_type = other RNA
cgacgaggcatcgactgccaagg

SEQ ID NO: 5426 - RNA, 23 nt, synthetic construct
  source 1..23: mol_type = other RNA
ccaaggagggtccaggatgtgct

SEQ ID NO: 5427 - RNA, 23 nt, synthetic construct
  source 1..23: mol_type = other RNA
atgtgctgtcgacaagagttttt

SEQ ID NO: 5428 - RNA, 23 nt, synthetic construct
  source 1..23: mol_type = other RNA
agttttttgtggacttccgtgag

SEQ ID NO: 5429 - RNA, 23 nt, synthetic construct
  source 1..23: mol_type = other RNA
tggcacgactggatcatccagcc

SEQ ID NO: 5430 - RNA, 23 nt, synthetic construct
  source 1..23: mol_type = other RNA
tacgccatgaacttctgcatagg

SEQ ID NO: 5431 - RNA, 23 nt, synthetic construct
  source 1..23: mol_type = other RNA
agtgcccactacacatagcaggc

SEQ ID NO: 5432 - RNA, 23 nt, synthetic construct
  source 1..23: mol_type = other RNA
caggcatgcctggtattgctgcc

SEQ ID NO: 5433 - RNA, 23 nt, synthetic construct
  source 1..23: mol_type = other RNA
tgctgcctcctttcacactgcag

SEQ ID NO: 5434 - RNA, 23 nt, synthetic construct
  source 1..23: mol_type = other RNA
ctgcagtgctcaatcttctcaag

SEQ ID NO: 5435 - RNA, 23 nt, synthetic construct
  source 1..23: mol_type = other RNA
tcaaggccaacacagctgcaggc

SEQ ID NO: 5436 - RNA, 23 nt, synthetic construct
  source 1..23: mol_type = other RNA
gggctcatgctgtgtacccacgg

SEQ ID NO: 5437 - RNA, 23 nt, synthetic construct
  source 1..23: mol_type = other RNA
ctgtctctgctctattatgacag

SEQ ID NO: 5438 - RNA, 23 nt, synthetic construct
  source 1..23: mol_type = other RNA
atgacagggacagcaacattgtc

SEQ ID NO: 5439 - RNA, 23 nt, synthetic construct
  source 1..23: mol_type = other RNA
attgtcaagactgacatacctga

SEQ ID NO: 5440 - RNA, 23 nt, synthetic construct
  source 1..23: mol_type = other RNA
tacctgacatggtagtagaggcc

SEQ ID NO: 5441 - RNA, 23 nt, synthetic construct
  source 1..23: mol_type = other RNA
gcagttagtctatgtgtggtatg

SEQ ID NO: 5442 - RNA, 23 nt, synthetic construct
  source 1..23: mol_type = other RNA
gcccaaggttgcatgggaaaaca

SEQ ID NO: 5443 - RNA, 23 nt, synthetic construct
  source 1..23: mol_type = other RNA
ctacagaagtgcacttccttgag

SEQ ID NO: 5444 - RNA, 23 nt, synthetic construct
  source 1..23: mol_type = other RNA
tgagaggagggaatgacctcatt

SEQ ID NO: 5445 - RNA, 23 nt, synthetic construct
  source 1..23: mol_type = other RNA
cctcattctctgtccagaatgtg

SEQ ID NO: 5446 - RNA, 23 nt, synthetic construct
  source 1..23: mol_type = other RNA
atgtggactccctcttcctgagc

SEQ ID NO: 5447 - RNA, 23 nt, synthetic construct
  source 1..23: mol_type = other RNA
ctgagcatcttatggaaattacc

SEQ ID NO: 5448 - RNA, 23 nt, synthetic construct
  source 1..23: mol_type = other RNA
cccacctttgacttgaagaaacc

SEQ ID NO: 5449 - RNA, 23 nt, synthetic construct
  source 1..23: mol_type = other RNA
accttcatctaaagcaagtcact

SEQ ID NO: 5450 - RNA, 23 nt, synthetic construct
  source 1..23: mol_type = other RNA
agtcactgtgccatcttcctgac

SEQ ID NO: 5451 - RNA, 23 nt, synthetic construct
  source 1..23: mol_type = other RNA
ctgaccactaccctctttcctag

SEQ ID NO: 5452 - RNA, 23 nt, synthetic construct
  source 1..23: mol_type = other RNA
agtccatcccgctagtccatccc

SEQ ID NO: 5453 - RNA, 23 nt, synthetic construct
  source 1..23: mol_type = other RNA
agacccatctccaaccatgagca

SEQ ID NO: 5454 - RNA, 23 nt, synthetic construct
  source 1..23: mol_type = other RNA
atgagcaatgccatctggttccc

SEQ ID NO: 5455 - RNA, 23 nt, synthetic construct
  source 1..23: mol_type = other RNA
gttcccaggcaaagacaccctta

SEQ ID NO: 5456 - RNA, 23 nt, synthetic construct
  source 1..23: mol_type = other RNA
acccttagctcacctttaataga

SEQ ID NO: 5457 - RNA, 23 nt, synthetic construct
  source 1..23: mol_type = other RNA
taacccactatgccttcctgtcc

SEQ ID NO: 5458 - RNA, 23 nt, synthetic construct
  source 1..23: mol_type = other RNA
ctgtcctttctactcaatggtcc

SEQ ID NO: 5459 - RNA, 23 nt, synthetic construct
  source 1..23: mol_type = other RNA
actccaagatgagttgacacaac

SEQ ID NO: 5460 - RNA, 23 nt, synthetic construct
  source 1..23: mol_type = other RNA
cccaatttttgtggatctccaga

SEQ ID NO: 5461 - RNA, 23 nt, synthetic construct
  source 1..23: mol_type = other RNA
cttctttggattcaccaaagttt

SEQ ID NO: 5462 - RNA, 23 nt, synthetic construct
  source 1..23: mol_type = other RNA
gctgcccaaaatagaggcttacc

SEQ ID NO: 5463 - RNA, 23 nt, synthetic construct
  source 1..23: mol_type = other RNA
ccctgtccttcttagttgtccag

SEQ ID NO: 5464 - RNA, 23 nt, synthetic construct
  source 1..23: mol_type = other RNA
gtgaactactaaagctctctttg

SEQ ID NO: 5465 - RNA, 23 nt, synthetic construct
  source 1..23: mol_type = other RNA
ctctttgcataccttcatccatt

SEQ ID NO: 5466 - RNA, 23 nt, synthetic construct
  source 1..23: mol_type = other RNA
atccattttttgtccttctctgc

SEQ ID NO: 5467 - RNA, 23 nt, synthetic construct
  source 1..23: mol_type = other RNA
ctgcctttctctatgcccttaag

SEQ ID NO: 5468 - RNA, 23 nt, synthetic construct
  source 1..23: mol_type = other RNA
ccttaagggctgacttgcctgag

SEQ ID NO: 5469 - RNA, 23 nt, synthetic construct
  source 1..23: mol_type = other RNA
cctgagctctatcacctgagctc

SEQ ID NO: 5470 - RNA, 23 nt, synthetic construct
  source 1..23: mol_type = other RNA
cctctggcttcctgctgaggtca

SEQ ID NO: 5471 - RNA, 23 nt, synthetic construct
  source 1..23: mol_type = other RNA
catttcttatccctgttccctct

SEQ ID NO: 5472 - RNA, 23 nt, synthetic construct
  source 1..23: mol_type = other RNA
tctctgtctaggtgtcatggttc

SEQ ID NO: 5473 - RNA, 23 nt, synthetic construct
  source 1..23: mol_type = other RNA
gttctgtgtaactgtggctattc

SEQ ID NO: 5474 - RNA, 23 nt, synthetic construct
  source 1..23: mol_type = other RNA
gctattctgtgtccctacactac

SEQ ID NO: 5475 - RNA, 23 nt, synthetic construct
  source 1..23: mol_type = other RNA
ctgcctacattctgatataactg

SEQ ID NO: 5476 - RNA, 23 nt, synthetic construct
  source 1..23: mol_type = other RNA
gtcctaaaggctttctatcttgc

SEQ ID NO: 5477 - RNA, 23 nt, synthetic construct
  source 1..23: mol_type = other RNA
gcctcaacatctcatactggttc

SEQ ID NO: 5478 - RNA, 23 nt, synthetic construct
  source 1..23: mol_type = other RNA
ctggttcccttaactctgcctat

SEQ ID NO: 5479 - RNA, 23 nt, synthetic construct
  source 1..23: mol_type = other RNA
tgcctatacctctgtaaataatt

SEQ ID NO: 5480 - RNA, 23 nt, synthetic construct
  source 1..23: mol_type = other RNA
aataattccttcactaagttctc

SEQ ID NO: 5481 - RNA, 23 nt, synthetic construct
  source 1..23: mol_type = other RNA
gaaaagtcctctatctcctacaa

SEQ ID NO: 5482 - RNA, 23 nt, synthetic construct
  source 1..23: mol_type = other RNA
cctacaagggccctaactggcac

SEQ ID NO: 5483 - RNA, 23 nt, synthetic construct
  source 1..23: mol_type = other RNA
cccagatgacacagagcctgcct

SEQ ID NO: 5484 - RNA, 23 nt, synthetic construct
  source 1..23: mol_type = other RNA
gcctgcttatgctgtagtctgcc

SEQ ID NO: 5485 - RNA, 23 nt, synthetic construct
  source 1..23: mol_type = other RNA
ctactctgctgtctcttcacatg

SEQ ID NO: 5486 - RNA, 23 nt, synthetic construct
  source 1..23: mol_type = other RNA
acatggtctcctcagaactgaac

SEQ ID NO: 5487 - RNA, 23 nt, synthetic construct
  source 1..23: mol_type = other RNA
tgaactattgtatccatctcaca

SEQ ID NO: 5488 - RNA, 23 nt, synthetic construct
  source 1..23: mol_type = other RNA
tctcacactttatgcctcttctt

SEQ ID NO: 5489 - RNA, 23 nt, synthetic construct
  source 1..23: mol_type = other RNA
ccatccttccagaaccatctttg

SEQ ID NO: 5490 - RNA, 23 nt, synthetic construct
  source 1..23: mol_type = other RNA
tctttgaggtctcatggctaata

SEQ ID NO: 5491 - RNA, 23 nt, synthetic construct
  source 1..23: mol_type = other RNA
cctaggctttacctgttccctct

SEQ ID NO: 5492 - RNA, 23 nt, synthetic construct
  source 1..23: mol_type = other RNA
cctctgtaatccctccaaaagat

SEQ ID NO: 5493 - RNA, 23 nt, synthetic construct
  source 1..23: mol_type = other RNA
agatgagacagatctatgcttgg

SEQ ID NO: 5494 - RNA, 23 nt, synthetic construct
  source 1..23: mol_type = other RNA
gcttggtcatccagtaaactgac

SEQ ID NO: 5495 - RNA, 23 nt, synthetic construct
  source 1..23: mol_type = other RNA
ctgtgggcacgcaagtgtgggag

SEQ ID NO: 5496 - RNA, 23 nt, synthetic construct
  source 1..23: mol_type = other RNA
agaggcatgctcagagctggctg

SEQ ID NO: 5497 - RNA, 23 nt, synthetic construct
  source 1..23: mol_type = other RNA
cctctgacttgccttcctttcac

SEQ ID NO: 5498 - RNA, 23 nt, synthetic construct
  source 1..23: mol_type = other RNA
agtgctccacccaggagtcctgc

SEQ ID NO: 5499 - RNA, 23 nt, synthetic construct
  source 1..23: mol_type = other RNA
gcctggaagctggaatgggcaag

SEQ ID NO: 5500 - RNA, 23 nt, synthetic construct
  source 1..23: mol_type = other RNA
aagggctgctggagtgggacagg

SEQ ID NO: 5501 - RNA, 23 nt, synthetic construct
  source 1..23: mol_type = other RNA
gacagggagaagaggaaggcctg

SEQ ID NO: 5502 - RNA, 23 nt, synthetic construct
  source 1..23: mol_type = other RNA
aggcctggatgaggagagggtgg

SEQ ID NO: 5503 - RNA, 23 nt, synthetic construct
  source 1..23: mol_type = other RNA
gggtggcatttgctctgagactg

SEQ ID NO: 5504 - RNA, 23 nt, synthetic construct
  source 1..23: mol_type = other RNA
actgggtcctttttagacctttg

SEQ ID NO: 5505 - RNA, 23 nt, synthetic construct
  source 1..23: mol_type = other RNA
tcctccctttggctggacagtcc

SEQ ID NO: 5506 - RNA, 23 nt, synthetic construct
  source 1..23: mol_type = other RNA
cctgaaccatgaggtcgataatg

SEQ ID NO: 5507 - RNA, 23 nt, synthetic construct
  source 1..23: mol_type = other RNA
aatgtctgcagcccaaggccgag

SEQ ID NO: 5508 - RNA, 23 nt, synthetic construct
  source 1..23: mol_type = other RNA
gccgagtttgcgcaaaacccatg

SEQ ID NO: 5509 - RNA, 23 nt, synthetic construct
  source 1..23: mol_type = other RNA
acccatgtgttctttggtaaacg

SEQ ID NO: 5510 - RNA, 23 nt, synthetic construct
  source 1..23: mol_type = other RNA
aacgtgatgtctgtgtttgctca

SEQ ID NO: 5511 - RNA, 23 nt, synthetic construct
  source 1..23: mol_type = other RNA
ccctcctatgagggtaagaggtc

SEQ ID NO: 5512 - RNA, 23 nt, synthetic construct
  source 1..23: mol_type = other RNA
gtccctgaaataggaaccctaga

SEQ ID NO: 5513 - RNA, 23 nt, synthetic construct
  source 1..23: mol_type = other RNA
ccctagaggagaaagtctgaaaa

SEQ ID NO: 5514 - RNA, 23 nt, synthetic construct
  source 1..23: mol_type = other RNA
gggactgtaaatctgagcttgag

SEQ ID NO: 5515 - RNA, 23 nt, synthetic construct
  source 1..23: mol_type = other RNA
ctgagcaacccatggaagttatc

SEQ ID NO: 5516 - RNA, 23 nt, synthetic construct
  source 1..23: mol_type = other RNA
tcccacctttgacttgaggagac

SEQ ID NO: 5517 - RNA, 23 nt, synthetic construct
  source 1..23: mol_type = other RNA
gaccttcatctaaggagaatcta

SEQ ID NO: 5518 - RNA, 23 nt, synthetic construct
  source 1..23: mol_type = other RNA
aaggaggccttctggtgtctccc

SEQ ID NO: 5519 - RNA, 23 nt, synthetic construct
  source 1..23: mol_type = other RNA
cttcccaattacagcttagtctc

SEQ ID NO: 5520 - RNA, 23 nt, synthetic construct
  source 1..23: mol_type = other RNA
tagtctccagggctaggactggg

SEQ ID NO: 5521 - RNA, 23 nt, synthetic construct
  source 1..23: mol_type = other RNA
taaagcaaagtgagtcattcacc

SEQ ID NO: 5522 - RNA, 23 nt, synthetic construct
  source 1..23: mol_type = other RNA
gggtggtgaacaatttattaatc

SEQ ID NO: 5523 - RNA, 23 nt, synthetic construct
  source 1..23: mol_type = other RNA
gataggactttaatgcaatatta

SEQ ID NO: 5524 - RNA, 23 nt, synthetic construct
  source 1..23: mol_type = other RNA
atgaacaaaatagcctactttta

SEQ ID NO: 5525 - RNA, 21 nt, synthetic construct
  source 1..21: mol_type = other RNA
gccagacatgagctgtgaggt

SEQ ID NO: 5526 - RNA, 21 nt, synthetic construct
  source 1..21: mol_type = other RNA
ccagacatgagctgtgagggt

SEQ ID NO: 5527 - RNA, 21 nt, synthetic construct
  source 1..21: mol_type = other RNA
agacatgagctgtgagggtct

SEQ ID NO: 5528 - RNA, 21 nt, synthetic construct
  source 1..21: mol_type = other RNA
gacatgagctgtgagggtcat

SEQ ID NO: 5529 - RNA, 21 nt, synthetic construct
  source 1..21: mol_type = other RNA
acatgagctgtgagggtcaat

SEQ ID NO: 5530 - RNA, 21 nt, synthetic construct
  source 1..21: mol_type = other RNA
catgagctgtgagggtcaagt

SEQ ID NO: 5531 - RNA, 21 nt, synthetic construct
  source 1..21: mol_type = other RNA
atgagctgtgagggtcaagct

SEQ ID NO: 5532 - RNA, 21 nt, synthetic construct
  source 1..21: mol_type = other RNA
tgagctgtgagggtcaagcat

SEQ ID NO: 5533 - RNA, 21 nt, synthetic construct
  source 1..21: mol_type = other RNA
gagctgtgagggtcaagcact

SEQ ID NO: 5534 - RNA, 21 nt, synthetic construct
  source 1..21: mol_type = other RNA
agctgtgagggtcaagcacat

SEQ ID NO: 5535 - RNA, 21 nt, synthetic construct
  source 1..21: mol_type = other RNA
gctgtgagggtcaagcacagt

SEQ ID NO: 5536 - RNA, 21 nt, synthetic construct
  source 1..21: mol_type = other RNA
ctgtgagggtcaagcacagct

SEQ ID NO: 5537 - RNA, 21 nt, synthetic construct
  source 1..21: mol_type = other RNA
tgtgagggtcaagcacagctt

SEQ ID NO: 5538 - RNA, 21 nt, synthetic construct
  source 1..21: mol_type = other RNA
gtgagggtcaagcacagctat

SEQ ID NO: 5539 - RNA, 21 nt, synthetic construct
  source 1..21: mol_type = other RNA
tgagggtcaagcacagctatt

SEQ ID NO: 5540 - RNA, 21 nt, synthetic construct
  source 1..21: mol_type = other RNA
agggtcaagcacagctatcct

SEQ ID NO: 5541 - RNA, 21 nt, synthetic construct
  source 1..21: mol_type = other RNA
gggtcaagcacagctatccat

SEQ ID NO: 5542 - RNA, 21 nt, synthetic construct
  source 1..21: mol_type = other RNA
caagcacagctatccatcagt

SEQ ID NO: 5543 - RNA, 21 nt, synthetic construct
  source 1..21: mol_type = other RNA
aagcacagctatccatcagat

SEQ ID NO: 5544 - RNA, 21 nt, synthetic construct
  source 1..21: mol_type = other RNA
gcacagctatccatcagatgt

SEQ ID NO: 5545 - RNA, 21 nt, synthetic construct
  source 1..21: mol_type = other RNA
cacagctatccatcagatgat

SEQ ID NO: 5546 - RNA, 21 nt, synthetic construct
  source 1..21: mol_type = other RNA
acagctatccatcagatgatt

SEQ ID NO: 5547 - RNA, 21 nt, synthetic construct
  source 1..21: mol_type = other RNA
cagctatccatcagatgatct

SEQ ID NO: 5548 - RNA, 21 nt, synthetic construct
  source 1..21: mol_type = other RNA
agctatccatcagatgatctt

SEQ ID NO: 5549 - RNA, 21 nt, synthetic construct
  source 1..21: mol_type = other RNA
gctatccatcagatgatctat

SEQ ID NO: 5550 - RNA, 21 nt, synthetic construct
  source 1..21: mol_type = other RNA
ctatccatcagatgatctact

SEQ ID NO: 5551 - RNA, 21 nt, synthetic construct
  source 1..21: mol_type = other RNA
tatccatcagatgatctactt

SEQ ID NO: 5552 - RNA, 21 nt, synthetic construct
  source 1..21: mol_type = other RNA
tccatcagatgatctactttt

SEQ ID NO: 5553 - RNA, 21 nt, synthetic construct
  source 1..21: mol_type = other RNA
ccatcagatgatctactttct

SEQ ID NO: 5554 - RNA, 21 nt, synthetic construct
  source 1..21: mol_type = other RNA
catcagatgatctactttcat

SEQ ID NO: 5555 - RNA, 21 nt, synthetic construct
  source 1..21: mol_type = other RNA
atcagatgatctactttcagt

SEQ ID NO: 5556 - RNA, 21 nt, synthetic construct
  source 1..21: mol_type = other RNA
tcagatgatctactttcagct

SEQ ID NO: 5557 - RNA, 21 nt, synthetic construct
  source 1..21: mol_type = other RNA
cagatgatctactttcagcct

SEQ ID NO: 5558 - RNA, 21 nt, synthetic construct
  source 1..21: mol_type = other RNA
agatgatctactttcagcctt

SEQ ID NO: 5559 - RNA, 21 nt, synthetic construct
  source 1..21: mol_type = other RNA
gatgatctactttcagccttt

SEQ ID NO: 5560 - RNA, 21 nt, synthetic construct
  source 1..21: mol_type = other RNA
atgatctactttcagccttct

SEQ ID NO: 5561 - RNA, 21 nt, synthetic construct
  source 1..21: mol_type = other RNA
tgatctactttcagccttcct

SEQ ID NO: 5562 - RNA, 21 nt, synthetic construct
  source 1..21: mol_type = other RNA
atctactttcagccttcctgt

SEQ ID NO: 5563 - RNA, 21 nt, synthetic construct
  source 1..21: mol_type = other RNA
tctactttcagccttcctgat

SEQ ID NO: 5564 - RNA, 21 nt, synthetic construct
  source 1..21: mol_type = other RNA
ctactttcagccttcctgagt

SEQ ID NO: 5565 - RNA, 21 nt, synthetic construct
  source 1..21: mol_type = other RNA
tactttcagccttcctgagtt

SEQ ID NO: 5566 - RNA, 21 nt, synthetic construct
  source 1..21: mol_type = other RNA
actttcagccttcctgagtct

SEQ ID NO: 5567 - RNA, 21 nt, synthetic construct
  source 1..21: mol_type = other RNA
tcagccttcctgagtcccagt

SEQ ID NO: 5568 - RNA, 21 nt, synthetic construct
  source 1..21: mol_type = other RNA
gacaatagaagacaggtggct

SEQ ID NO: 5569 - RNA, 21 nt, synthetic construct
  source 1..21: mol_type = other RNA
acaatagaagacaggtggctt

SEQ ID NO: 5570 - RNA, 21 nt, synthetic construct
  source 1..21: mol_type = other RNA
tggcagtggtgtctgctgtct

SEQ ID NO: 5571 - RNA, 21 nt, synthetic construct
  source 1..21: mol_type = other RNA
ggcagtggtgtctgctgtcat

SEQ ID NO: 5572 - RNA, 21 nt, synthetic construct
  source 1..21: mol_type = other RNA
gcagtggtgtctgctgtcact

SEQ ID NO: 5573 - RNA, 21 nt, synthetic construct
  source 1..21: mol_type = other RNA
cagtggtgtctgctgtcactt

SEQ ID NO: 5574 - RNA, 21 nt, synthetic construct
  source 1..21: mol_type = other RNA
agtggtgtctgctgtcactgt

SEQ ID NO: 5575 - RNA, 21 nt, synthetic construct
  source 1..21: mol_type = other RNA
gtggtgtctgctgtcactgtt

SEQ ID NO: 5576 - RNA, 21 nt, synthetic construct
  source 1..21: mol_type = other RNA
tggtgtctgctgtcactgtgt

SEQ ID NO: 5577 - RNA, 21 nt, synthetic construct
  source 1..21: mol_type = other RNA
ggtgtctgctgtcactgtgct

SEQ ID NO: 5578 - RNA, 21 nt, synthetic construct
  source 1..21: mol_type = other RNA
cagactcaacagacggagcat

SEQ ID NO: 5579 - RNA, 21 nt, synthetic construct
  source 1..21: mol_type = other RNA
agactcaacagacggagcaat

SEQ ID NO: 5580 - RNA, 21 nt, synthetic construct
  source 1..21: mol_type = other RNA
gactcaacagacggagcaact

SEQ ID NO: 5581 - RNA, 21 nt, synthetic construct
  source 1..21: mol_type = other RNA
actcaacagacggagcaactt

SEQ ID NO: 5582 - RNA, 21 nt, synthetic construct
  source 1..21: mol_type = other RNA
ctcaacagacggagcaactgt

SEQ ID NO: 5583 - RNA, 21 nt, synthetic construct
  source 1..21: mol_type = other RNA
tcaacagacggagcaactgct

SEQ ID NO: 5584 - RNA, 21 nt, synthetic construct
  source 1..21: mol_type = other RNA
caacagacggagcaactgcct

SEQ ID NO: 5585 - RNA, 21 nt, synthetic construct
  source 1..21: mol_type = other RNA
aacagacggagcaactgccat

SEQ ID NO: 5586 - RNA, 21 nt, synthetic construct
  source 1..21: mol_type = other RNA
acagacggagcaactgccatt

SEQ ID NO: 5587 - RNA, 21 nt, synthetic construct
  source 1..21: mol_type = other RNA
cagacggagcaactgccatct

SEQ ID NO: 5588 - RNA, 21 nt, synthetic construct
  source 1..21: mol_type = other RNA
agacggagcaactgccatcct

SEQ ID NO: 5589 - RNA, 21 nt, synthetic construct
  source 1..21: mol_type = other RNA
gacggagcaactgccatccgt

SEQ ID NO: 5590 - RNA, 21 nt, synthetic construct
  source 1..21: mol_type = other RNA
cggagcaactgccatccgagt

SEQ ID NO: 5591 - RNA, 21 nt, synthetic construct
  source 1..21: mol_type = other RNA
ggagcaactgccatccgaggt

SEQ ID NO: 5592 - RNA, 21 nt, synthetic construct
  source 1..21: mol_type = other RNA
agcaactgccatccgaggctt

SEQ ID NO: 5593 - RNA, 21 nt, synthetic construct
  source 1..21: mol_type = other RNA
gcaactgccatccgaggctct

SEQ ID NO: 5594 - RNA, 21 nt, synthetic construct
  source 1..21: mol_type = other RNA
caactgccatccgaggctcct

SEQ ID NO: 5595 - RNA, 21 nt, synthetic construct
  source 1..21: mol_type = other RNA
aagcagaacgagctctggtgt

SEQ ID NO: 5596 - RNA, 21 nt, synthetic construct
  source 1..21: mol_type = other RNA
agcagaacgagctctggtgct

SEQ ID NO: 5597 - RNA, 21 nt, synthetic construct
  source 1..21: mol_type = other RNA
gcagaacgagctctggtgctt

SEQ ID NO: 5598 - RNA, 21 nt, synthetic construct
  source 1..21: mol_type = other RNA
cagaacgagctctggtgctgt

SEQ ID NO: 5599 - RNA, 21 nt, synthetic construct
  source 1..21: mol_type = other RNA
agaacgagctctggtgctggt

SEQ ID NO: 5600 - RNA, 21 nt, synthetic construct
  source 1..21: mol_type = other RNA
gaacgagctctggtgctggat

SEQ ID NO: 5601 - RNA, 21 nt, synthetic construct
  source 1..21: mol_type = other RNA
aacgagctctggtgctggagt

SEQ ID NO: 5602 - RNA, 21 nt, synthetic construct
  source 1..21: mol_type = other RNA
acgagctctggtgctggagct

SEQ ID NO: 5603 - RNA, 21 nt, synthetic construct
  source 1..21: mol_type = other RNA
gagctctggtgctggagctat

SEQ ID NO: 5604 - RNA, 21 nt, synthetic construct
  source 1..21: mol_type = other RNA
gctctggtgctggagctagct

SEQ ID NO: 5605 - RNA, 21 nt, synthetic construct
  source 1..21: mol_type = other RNA
ctctggtgctggagctagcct

SEQ ID NO: 5606 - RNA, 21 nt, synthetic construct
  source 1..21: mol_type = other RNA
tctggtgctggagctagccat

SEQ ID NO: 5607 - RNA, 21 nt, synthetic construct
  source 1..21: mol_type = other RNA
tggtgctggagctagccaagt

SEQ ID NO: 5608 - RNA, 21 nt, synthetic construct
  source 1..21: mol_type = other RNA
ggtgctggagctagccaagct

SEQ ID NO: 5609 - RNA, 21 nt, synthetic construct
  source 1..21: mol_type = other RNA
gtgctggagctagccaagcat

SEQ ID NO: 5610 - RNA, 21 nt, synthetic construct
  source 1..21: mol_type = other RNA
tgctggagctagccaagcagt

SEQ ID NO: 5611 - RNA, 21 nt, synthetic construct
  source 1..21: mol_type = other RNA
ggagctagccaagcagcaaat

SEQ ID NO: 5612 - RNA, 21 nt, synthetic construct
  source 1..21: mol_type = other RNA
gagctagccaagcagcaaatt

SEQ ID NO: 5613 - RNA, 21 nt, synthetic construct
  source 1..21: mol_type = other RNA
agctagccaagcagcaaatct

SEQ ID NO: 5614 - RNA, 21 nt, synthetic construct
  source 1..21: mol_type = other RNA
gctagccaagcagcaaatcct

SEQ ID NO: 5615 - RNA, 21 nt, synthetic construct
  source 1..21: mol_type = other RNA
tagccaagcagcaaatcctgt

SEQ ID NO: 5616 - RNA, 21 nt, synthetic construct
  source 1..21: mol_type = other RNA
agccaagcagcaaatcctggt

SEQ ID NO: 5617 - RNA, 21 nt, synthetic construct
  source 1..21: mol_type = other RNA
gccaagcagcaaatcctggat

SEQ ID NO: 5618 - RNA, 21 nt, synthetic construct
  source 1..21: mol_type = other RNA
acctgaccagtcgtcccagat

SEQ ID NO: 5619 - RNA, 21 nt, synthetic construct
  source 1..21: mol_type = other RNA
cctgaccagtcgtcccagaat

SEQ ID NO: 5620 - RNA, 21 nt, synthetic construct
  source 1..21: mol_type = other RNA
ctgaccagtcgtcccagaatt

SEQ ID NO: 5621 - RNA, 21 nt, synthetic construct
  source 1..21: mol_type = other RNA
tgaccagtcgtcccagaatat

SEQ ID NO: 5622 - RNA, 21 nt, synthetic construct
  source 1..21: mol_type = other RNA
gaccagtcgtcccagaataat

SEQ ID NO: 5623 - RNA, 21 nt, synthetic construct
  source 1..21: mol_type = other RNA
ccagtcgtcccagaataactt

SEQ ID NO: 5624 - RNA, 21 nt, synthetic construct
  source 1..21: mol_type = other RNA
cagtcgtcccagaataactct

SEQ ID NO: 5625 - RNA, 21 nt, synthetic construct
  source 1..21: mol_type = other RNA
agtcgtcccagaataactcat

SEQ ID NO: 5626 - RNA, 21 nt, synthetic construct
  source 1..21: mol_type = other RNA
gtcgtcccagaataactcatt

SEQ ID NO: 5627 - RNA, 21 nt, synthetic construct
  source 1..21: mol_type = other RNA
cgtcccagaataactcatcct

SEQ ID NO: 5628 - RNA, 21 nt, synthetic construct
  source 1..21: mol_type = other RNA
gtcccagaataactcatcctt

SEQ ID NO: 5629 - RNA, 21 nt, synthetic construct
  source 1..21: mol_type = other RNA
tcccagaataactcatcctct

SEQ ID NO: 5630 - RNA, 21 nt, synthetic construct
  source 1..21: mol_type = other RNA
cccagaataactcatcctcct

SEQ ID NO: 5631 - RNA, 21 nt, synthetic construct
  source 1..21: mol_type = other RNA
cagaataactcatcctccact

SEQ ID NO: 5632 - RNA, 21 nt, synthetic construct
  source 1..21: mol_type = other RNA
gggagtgtggctccagggaat

SEQ ID NO: 5633 - RNA, 21 nt, synthetic construct
  source 1..21: mol_type = other RNA
ggagtgtggctccagggaatt

SEQ ID NO: 5634 - RNA, 21 nt, synthetic construct
  source 1..21: mol_type = other RNA
gagtgtggctccagggaatgt

SEQ ID NO: 5635 - RNA, 21 nt, synthetic construct
  source 1..21: mol_type = other RNA
gaggaggtcatcagctttgct

SEQ ID NO: 5636 - RNA, 21 nt, synthetic construct
  source 1..21: mol_type = other RNA
aggaggtcatcagctttgctt

SEQ ID NO: 5637 - RNA, 21 nt, synthetic construct
  source 1..21: mol_type = other RNA
ggaggtcatcagctttgctat

SEQ ID NO: 5638 - RNA, 21 nt, synthetic construct
  source 1..21: mol_type = other RNA
gaggtcatcagctttgctact

SEQ ID NO: 5639 - RNA, 21 nt, synthetic construct
  source 1..21: mol_type = other RNA
aggtcatcagctttgctactt

SEQ ID NO: 5640 - RNA, 21 nt, synthetic construct
  source 1..21: mol_type = other RNA
ggtcatcagctttgctactgt

SEQ ID NO: 5641 - RNA, 21 nt, synthetic construct
  source 1..21: mol_type = other RNA
gtcatcagctttgctactgtt

SEQ ID NO: 5642 - RNA, 21 nt, synthetic construct
  source 1..21: mol_type = other RNA
tcatcagctttgctactgtct

SEQ ID NO: 5643 - RNA, 21 nt, synthetic construct
  source 1..21: mol_type = other RNA
tcagctttgctactgtcacat

SEQ ID NO: 5644 - RNA, 21 nt, synthetic construct
  source 1..21: mol_type = other RNA
cagctttgctactgtcacagt

SEQ ID NO: 5645 - RNA, 21 nt, synthetic construct
  source 1..21: mol_type = other RNA
agctttgctactgtcacagat

SEQ ID NO: 5646 - RNA, 21 nt, synthetic construct
  source 1..21: mol_type = other RNA
gctttgctactgtcacagact

SEQ ID NO: 5647 - RNA, 21 nt, synthetic construct
  source 1..21: mol_type = other RNA
ctttgctactgtcacagactt

SEQ ID NO: 5648 - RNA, 21 nt, synthetic construct
  source 1..21: mol_type = other RNA
tttgctactgtcacagactct

SEQ ID NO: 5649 - RNA, 21 nt, synthetic construct
  source 1..21: mol_type = other RNA
ttgctactgtcacagactcct

SEQ ID NO: 5650 - RNA, 21 nt, synthetic construct
  source 1..21: mol_type = other RNA
tgctactgtcacagactccat

SEQ ID NO: 5651 - RNA, 21 nt, synthetic construct
  source 1..21: mol_type = other RNA
actgtcacagactccacttct

SEQ ID NO: 5652 - RNA, 21 nt, synthetic construct
  source 1..21: mol_type = other RNA
tcacagactccacttcagcct

SEQ ID NO: 5653 - RNA, 21 nt, synthetic construct
  source 1..21: mol_type = other RNA
cacagactccacttcagcctt

SEQ ID NO: 5654 - RNA, 21 nt, synthetic construct
  source 1..21: mol_type = other RNA
acagactccacttcagcctat

SEQ ID NO: 5655 - RNA, 21 nt, synthetic construct
  source 1..21: mol_type = other RNA
cagactccacttcagcctact

SEQ ID NO: 5656 - RNA, 21 nt, synthetic construct
  source 1..21: mol_type = other RNA
agactccacttcagcctacat

SEQ ID NO: 5657 - RNA, 21 nt, synthetic construct
  source 1..21: mol_type = other RNA
gactccacttcagcctacagt

SEQ ID NO: 5658 - RNA, 21 nt, synthetic construct
  source 1..21: mol_type = other RNA
actccacttcagcctacagct

SEQ ID NO: 5659 - RNA, 21 nt, synthetic construct
  source 1..21: mol_type = other RNA
ctccacttcagcctacagctt

SEQ ID NO: 5660 - RNA, 21 nt, synthetic construct
  source 1..21: mol_type = other RNA
ccacttcagcctacagctcct

SEQ ID NO: 5661 - RNA, 21 nt, synthetic construct
  source 1..21: mol_type = other RNA
cacttcagcctacagctccct

SEQ ID NO: 5662 - RNA, 21 nt, synthetic construct
  source 1..21: mol_type = other RNA
acttcagcctacagctccctt

SEQ ID NO: 5663 - RNA, 21 nt, synthetic construct
  source 1..21: mol_type = other RNA
tcagcctacagctccctgctt

SEQ ID NO: 5664 - RNA, 21 nt, synthetic construct
  source 1..21: mol_type = other RNA
cacctgtaccatgcccgcctt

SEQ ID NO: 5665 - RNA, 21 nt, synthetic construct
  source 1..21: mol_type = other RNA
cctgtaccatgcccgcctgtt

SEQ ID NO: 5666 - RNA, 21 nt, synthetic construct
  source 1..21: mol_type = other RNA
ctgtaccatgcccgcctgtgt

SEQ ID NO: 5667 - RNA, 21 nt, synthetic construct
  source 1..21: mol_type = other RNA
cacccttcctggcactctttt

SEQ ID NO: 5668 - RNA, 21 nt, synthetic construct
  source 1..21: mol_type = other RNA
acccttcctggcactctttgt

SEQ ID NO: 5669 - RNA, 21 nt, synthetic construct
  source 1..21: mol_type = other RNA
ccttcctggcactctttgctt

SEQ ID NO: 5670 - RNA, 21 nt, synthetic construct
  source 1..21: mol_type = other RNA
cttcctggcactctttgcttt

SEQ ID NO: 5671 - RNA, 21 nt, synthetic construct
  source 1..21: mol_type = other RNA
ttcctggcactctttgcttgt

SEQ ID NO: 5672 - RNA, 21 nt, synthetic construct
  source 1..21: mol_type = other RNA
tcctggcactctttgcttgat

SEQ ID NO: 5673 - RNA, 21 nt, synthetic construct
  source 1..21: mol_type = other RNA
cctggcactctttgcttgagt

SEQ ID NO: 5674 - RNA, 21 nt, synthetic construct
  source 1..21: mol_type = other RNA
ctggcactctttgcttgaggt

SEQ ID NO: 5675 - RNA, 21 nt, synthetic construct
  source 1..21: mol_type = other RNA
tggcactctttgcttgaggat

SEQ ID NO: 5676 - RNA, 21 nt, synthetic construct
  source 1..21: mol_type = other RNA
ggcactctttgcttgaggatt

SEQ ID NO: 5677 - RNA, 21 nt, synthetic construct
  source 1..21: mol_type = other RNA
gcactctttgcttgaggatct

SEQ ID NO: 5678 - RNA, 21 nt, synthetic construct
  source 1..21: mol_type = other RNA
actctttgcttgaggatcttt

SEQ ID NO: 5679 - RNA, 21 nt, synthetic construct
  source 1..21: mol_type = other RNA
tctttgcttgaggatcttcct

SEQ ID NO: 5680 - RNA, 21 nt, synthetic construct
  source 1..21: mol_type = other RNA
tttgcttgaggatcttccgat

SEQ ID NO: 5681 - RNA, 21 nt, synthetic construct
  source 1..21: mol_type = other RNA
ttgcttgaggatcttccgatt

SEQ ID NO: 5682 - RNA, 21 nt, synthetic construct
  source 1..21: mol_type = other RNA
tgcttgaggatcttccgatgt

SEQ ID NO: 5683 - RNA, 21 nt, synthetic construct
  source 1..21: mol_type = other RNA
gcttgaggatcttccgatggt

SEQ ID NO: 5684 - RNA, 21 nt, synthetic construct
  source 1..21: mol_type = other RNA
ctggctgagcaccacatcact

SEQ ID NO: 5685 - RNA, 21 nt, synthetic construct
  source 1..21: mol_type = other RNA
tggctgagcaccacatcacct

SEQ ID NO: 5686 - RNA, 21 nt, synthetic construct
  source 1..21: mol_type = other RNA
ggctgagcaccacatcaccat

SEQ ID NO: 5687 - RNA, 21 nt, synthetic construct
  source 1..21: mol_type = other RNA
gctgagcaccacatcaccaat

SEQ ID NO: 5688 - RNA, 21 nt, synthetic construct
  source 1..21: mol_type = other RNA
ctgagcaccacatcaccaact

SEQ ID NO: 5689 - RNA, 21 nt, synthetic construct
  source 1..21: mol_type = other RNA
tgagcaccacatcaccaacct

SEQ ID NO: 5690 - RNA, 21 nt, synthetic construct
  source 1..21: mol_type = other RNA
agcaccacatcaccaacctgt

SEQ ID NO: 5691 - RNA, 21 nt, synthetic construct
  source 1..21: mol_type = other RNA
gcaccacatcaccaacctggt

SEQ ID NO: 5692 - RNA, 21 nt, synthetic construct
  source 1..21: mol_type = other RNA
ccacatcaccaacctgggctt

SEQ ID NO: 5693 - RNA, 21 nt, synthetic construct
  source 1..21: mol_type = other RNA
cacatcaccaacctgggctgt

SEQ ID NO: 5694 - RNA, 21 nt, synthetic construct
  source 1..21: mol_type = other RNA
acatcaccaacctgggctggt

SEQ ID NO: 5695 - RNA, 21 nt, synthetic construct
  source 1..21: mol_type = other RNA
atcaccaacctgggctggcat

SEQ ID NO: 5696 - RNA, 21 nt, synthetic construct
  source 1..21: mol_type = other RNA
tcaccaacctgggctggcatt

SEQ ID NO: 5697 - RNA, 21 nt, synthetic construct
  source 1..21: mol_type = other RNA
taccttaactctgccctctat

SEQ ID NO: 5698 - RNA, 21 nt, synthetic construct
  source 1..21: mol_type = other RNA
accttaactctgccctctagt

SEQ ID NO: 5699 - RNA, 21 nt, synthetic construct
  source 1..21: mol_type = other RNA
ccttaactctgccctctagtt

SEQ ID NO: 5700 - RNA, 21 nt, synthetic construct
  source 1..21: mol_type = other RNA
cttaactctgccctctagtgt

SEQ ID NO: 5701 - RNA, 21 nt, synthetic construct
  source 1..21: mol_type = other RNA
ttaactctgccctctagtggt

SEQ ID NO: 5702 - RNA, 21 nt, synthetic construct
  source 1..21: mol_type = other RNA
taactctgccctctagtggct

SEQ ID NO: 5703 - RNA, 21 nt, synthetic construct
  source 1..21: mol_type = other RNA
aagtctggtgtcctgaaactt

SEQ ID NO: 5704 - RNA, 21 nt, synthetic construct
  source 1..21: mol_type = other RNA
agtctggtgtcctgaaactgt

SEQ ID NO: 5705 - RNA, 21 nt, synthetic construct
  source 1..21: mol_type = other RNA
gtctggtgtcctgaaactgct

SEQ ID NO: 5706 - RNA, 21 nt, synthetic construct
  source 1..21: mol_type = other RNA
tctggtgtcctgaaactgcat

SEQ ID NO: 5707 - RNA, 21 nt, synthetic construct
  source 1..21: mol_type = other RNA
ctggtgtcctgaaactgcaat

SEQ ID NO: 5708 - RNA, 21 nt, synthetic construct
  source 1..21: mol_type = other RNA
tggtgtcctgaaactgcaact

SEQ ID NO: 5709 - RNA, 21 nt, synthetic construct
  source 1..21: mol_type = other RNA
ggtgtcctgaaactgcaactt

SEQ ID NO: 5710 - RNA, 21 nt, synthetic construct
  source 1..21: mol_type = other RNA
gtgtcctgaaactgcaactat

SEQ ID NO: 5711 - RNA, 21 nt, synthetic construct
  source 1..21: mol_type = other RNA
tgtcctgaaactgcaactagt

SEQ ID NO: 5712 - RNA, 21 nt, synthetic construct
  source 1..21: mol_type = other RNA
tcctgaaactgcaactagact

SEQ ID NO: 5713 - RNA, 21 nt, synthetic construct
  source 1..21: mol_type = other RNA
cctgaaactgcaactagactt

SEQ ID NO: 5714 - RNA, 21 nt, synthetic construct
  source 1..21: mol_type = other RNA
ctgaaactgcaactagactgt

SEQ ID NO: 5715 - RNA, 21 nt, synthetic construct
  source 1..21: mol_type = other RNA
tgaaactgcaactagactgct

SEQ ID NO: 5716 - RNA, 21 nt, synthetic construct
  source 1..21: mol_type = other RNA
gaaactgcaactagactgcat

SEQ ID NO: 5717 - RNA, 21 nt, synthetic construct
  source 1..21: mol_type = other RNA
aaactgcaactagactgcagt

SEQ ID NO: 5718 - RNA, 21 nt, synthetic construct
  source 1..21: mol_type = other RNA
aactgcaactagactgcagat

SEQ ID NO: 5719 - RNA, 21 nt, synthetic construct
  source 1..21: mol_type = other RNA
ctgcaactagactgcagacct

SEQ ID NO: 5720 - RNA, 21 nt, synthetic construct
  source 1..21: mol_type = other RNA
ggcaacagcacagttactggt

SEQ ID NO: 5721 - RNA, 21 nt, synthetic construct
  source 1..21: mol_type = other RNA
gcaacagcacagttactggat

SEQ ID NO: 5722 - RNA, 21 nt, synthetic construct
  source 1..21: mol_type = other RNA
caacagcacagttactggact

SEQ ID NO: 5723 - RNA, 21 nt, synthetic construct
  source 1..21: mol_type = other RNA
aacagcacagttactggacat

SEQ ID NO: 5724 - RNA, 21 nt, synthetic construct
  source 1..21: mol_type = other RNA
cagcacagttactggacaact

SEQ ID NO: 5725 - RNA, 21 nt, synthetic construct
  source 1..21: mol_type = other RNA
agcacagttactggacaacct

SEQ ID NO: 5726 - RNA, 21 nt, synthetic construct
  source 1..21: mol_type = other RNA
cttggacacagcaggacacct

SEQ ID NO: 5727 - RNA, 21 nt, synthetic construct
  source 1..21: mol_type = other RNA
ttggacacagcaggacaccat

SEQ ID NO: 5728 - RNA, 21 nt, synthetic construct
  source 1..21: mol_type = other RNA
tggacacagcaggacaccagt

SEQ ID NO: 5729 - RNA, 21 nt, synthetic construct
  source 1..21: mol_type = other RNA
ggacacagcaggacaccagct

SEQ ID NO: 5730 - RNA, 21 nt, synthetic construct
  source 1..21: mol_type = other RNA
gacacagcaggacaccagcat

SEQ ID NO: 5731 - RNA, 21 nt, synthetic construct
  source 1..21: mol_type = other RNA
acacagcaggacaccagcagt

SEQ ID NO: 5732 - RNA, 21 nt, synthetic construct
  source 1..21: mol_type = other RNA
cacagcaggacaccagcagct

SEQ ID NO: 5733 - RNA, 21 nt, synthetic construct
  source 1..21: mol_type = other RNA
gcaggacaccagcagcccttt

SEQ ID NO: 5734 - RNA, 21 nt, synthetic construct
  source 1..21: mol_type = other RNA
ggacaccagcagcccttcctt

SEQ ID NO: 5735 - RNA, 21 nt, synthetic construct
  source 1..21: mol_type = other RNA
acaccagcagcccttcctagt

SEQ ID NO: 5736 - RNA, 21 nt, synthetic construct
  source 1..21: mol_type = other RNA
accagcagcccttcctagagt

SEQ ID NO: 5737 - RNA, 21 nt, synthetic construct
  source 1..21: mol_type = other RNA
ccagcagcccttcctagagct

SEQ ID NO: 5738 - RNA, 21 nt, synthetic construct
  source 1..21: mol_type = other RNA
cagcagcccttcctagagctt

SEQ ID NO: 5739 - RNA, 21 nt, synthetic construct
  source 1..21: mol_type = other RNA
gcagcccttcctagagcttat

SEQ ID NO: 5740 - RNA, 21 nt, synthetic construct
  source 1..21: mol_type = other RNA
cagcccttcctagagcttaat

SEQ ID NO: 5741 - RNA, 21 nt, synthetic construct
  source 1..21: mol_type = other RNA
agcccttcctagagcttaagt

SEQ ID NO: 5742 - RNA, 21 nt, synthetic construct
  source 1..21: mol_type = other RNA
gcccttcctagagcttaagat

SEQ ID NO: 5743 - RNA, 21 nt, synthetic construct
  source 1..21: mol_type = other RNA
cccttcctagagcttaagatt

SEQ ID NO: 5744 - RNA, 21 nt, synthetic construct
  source 1..21: mol_type = other RNA
ttacgtagacttccaggaact

SEQ ID NO: 5745 - RNA, 21 nt, synthetic construct
  source 1..21: mol_type = other RNA
acgtagacttccaggaactgt

SEQ ID NO: 5746 - RNA, 21 nt, synthetic construct
  source 1..21: mol_type = other RNA
cgtagacttccaggaactggt

SEQ ID NO: 5747 - RNA, 21 nt, synthetic construct
  source 1..21: mol_type = other RNA
tagacttccaggaactgggat

SEQ ID NO: 5748 - RNA, 21 nt, synthetic construct
  source 1..21: mol_type = other RNA
agacttccaggaactgggatt

SEQ ID NO: 5749 - RNA, 21 nt, synthetic construct
  source 1..21: mol_type = other RNA
gacttccaggaactgggatgt

SEQ ID NO: 5750 - RNA, 21 nt, synthetic construct
  source 1..21: mol_type = other RNA
acttccaggaactgggatggt

SEQ ID NO: 5751 - RNA, 21 nt, synthetic construct
  source 1..21: mol_type = other RNA
cttccaggaactgggatggct

SEQ ID NO: 5752 - RNA, 21 nt, synthetic construct
  source 1..21: mol_type = other RNA
gactggatactgcagcccgat

SEQ ID NO: 5753 - RNA, 21 nt, synthetic construct
  source 1..21: mol_type = other RNA
actggatactgcagcccgagt

SEQ ID NO: 5754 - RNA, 21 nt, synthetic construct
  source 1..21: mol_type = other RNA
ctggatactgcagcccgaggt

SEQ ID NO: 5755 - RNA, 21 nt, synthetic construct
  source 1..21: mol_type = other RNA
gtaccagctgaattactgcat

SEQ ID NO: 5756 - RNA, 21 nt, synthetic construct
  source 1..21: mol_type = other RNA
accagctgaattactgcagtt

SEQ ID NO: 5757 - RNA, 21 nt, synthetic construct
  source 1..21: mol_type = other RNA
ccagctgaattactgcagtgt

SEQ ID NO: 5758 - RNA, 21 nt, synthetic construct
  source 1..21: mol_type = other RNA
cagctgaattactgcagtggt

SEQ ID NO: 5759 - RNA, 21 nt, synthetic construct
  source 1..21: mol_type = other RNA
agctgaattactgcagtgggt

SEQ ID NO: 5760 - RNA, 21 nt, synthetic construct
  source 1..21: mol_type = other RNA
gctgaattactgcagtgggct

SEQ ID NO: 5761 - RNA, 21 nt, synthetic construct
  source 1..21: mol_type = other RNA
ctgaattactgcagtgggcat

SEQ ID NO: 5762 - RNA, 21 nt, synthetic construct
  source 1..21: mol_type = other RNA
tgaattactgcagtgggcagt

SEQ ID NO: 5763 - RNA, 21 nt, synthetic construct
  source 1..21: mol_type = other RNA
gaattactgcagtgggcagtt

SEQ ID NO: 5764 - RNA, 21 nt, synthetic construct
  source 1..21: mol_type = other RNA
aggcattgctgcctctttcct

SEQ ID NO: 5765 - RNA, 21 nt, synthetic construct
  source 1..21: mol_type = other RNA
ggcattgctgcctctttccat

SEQ ID NO: 5766 - RNA, 21 nt, synthetic construct
  source 1..21: mol_type = other RNA
gcattgctgcctctttccatt

SEQ ID NO: 5767 - RNA, 21 nt, synthetic construct
  source 1..21: mol_type = other RNA
cattgctgcctctttccattt

SEQ ID NO: 5768 - RNA, 21 nt, synthetic construct
  source 1..21: mol_type = other RNA
attgctgcctctttccattct

SEQ ID NO: 5769 - RNA, 21 nt, synthetic construct
  source 1..21: mol_type = other RNA
ttgctgcctctttccattctt

SEQ ID NO: 5770 - RNA, 21 nt, synthetic construct
  source 1..21: mol_type = other RNA
tgctgcctctttccattctgt

SEQ ID NO: 5771 - RNA, 21 nt, synthetic construct
  source 1..21: mol_type = other RNA
gctgcctctttccattctgct

SEQ ID NO: 5772 - RNA, 21 nt, synthetic construct
  source 1..21: mol_type = other RNA
ctgcctctttccattctgcct

SEQ ID NO: 5773 - RNA, 21 nt, synthetic construct
  source 1..21: mol_type = other RNA
tgcctctttccattctgccgt

SEQ ID NO: 5774 - RNA, 21 nt, synthetic construct
  source 1..21: mol_type = other RNA
gcctctttccattctgccgtt

SEQ ID NO: 5775 - RNA, 21 nt, synthetic construct
  source 1..21: mol_type = other RNA
cctctttccattctgccgtct

SEQ ID NO: 5776 - RNA, 21 nt, synthetic construct
  source 1..21: mol_type = other RNA
ctctttccattctgccgtctt

SEQ ID NO: 5777 - RNA, 21 nt, synthetic construct
  source 1..21: mol_type = other RNA
tctttccattctgccgtcttt

SEQ ID NO: 5778 - RNA, 21 nt, synthetic construct
  source 1..21: mol_type = other RNA
ctttccattctgccgtcttct

SEQ ID NO: 5779 - RNA, 21 nt, synthetic construct
  source 1..21: mol_type = other RNA
ttccattctgccgtcttcagt

SEQ ID NO: 5780 - RNA, 21 nt, synthetic construct
  source 1..21: mol_type = other RNA
tccattctgccgtcttcagct

SEQ ID NO: 5781 - RNA, 21 nt, synthetic construct
  source 1..21: mol_type = other RNA
ccattctgccgtcttcagcct

SEQ ID NO: 5782 - RNA, 21 nt, synthetic construct
  source 1..21: mol_type = other RNA
cattctgccgtcttcagcctt

SEQ ID NO: 5783 - RNA, 21 nt, synthetic construct
  source 1..21: mol_type = other RNA
tctgccgtcttcagcctcctt

SEQ ID NO: 5784 - RNA, 21 nt, synthetic construct
  source 1..21: mol_type = other RNA
ccgtcttcagcctcctcaaat

SEQ ID NO: 5785 - RNA, 21 nt, synthetic construct
  source 1..21: mol_type = other RNA
gtcttcagcctcctcaaagct

SEQ ID NO: 5786 - RNA, 21 nt, synthetic construct
  source 1..21: mol_type = other RNA
tcttcagcctcctcaaagcct

SEQ ID NO: 5787 - RNA, 21 nt, synthetic construct
  source 1..21: mol_type = other RNA
cttcagcctcctcaaagccat

SEQ ID NO: 5788 - RNA, 21 nt, synthetic construct
  source 1..21: mol_type = other RNA
tcagcctcctcaaagccaact

SEQ ID NO: 5789 - RNA, 21 nt, synthetic construct
  source 1..21: mol_type = other RNA
cagcctcctcaaagccaacat

SEQ ID NO: 5790 - RNA, 21 nt, synthetic construct
  source 1..21: mol_type = other RNA
agcctcctcaaagccaacaat

SEQ ID NO: 5791 - RNA, 21 nt, synthetic construct
  source 1..21: mol_type = other RNA
gcctcctcaaagccaacaatt

SEQ ID NO: 5792 - RNA, 21 nt, synthetic construct
  source 1..21: mol_type = other RNA
cctcctcaaagccaacaatct

SEQ ID NO: 5793 - RNA, 21 nt, synthetic construct
  source 1..21: mol_type = other RNA
ctcctcaaagccaacaatcct

SEQ ID NO: 5794 - RNA, 21 nt, synthetic construct
  source 1..21: mol_type = other RNA
tcctcaaagccaacaatcctt

SEQ ID NO: 5795 - RNA, 21 nt, synthetic construct
  source 1..21: mol_type = other RNA
ctcaaagccaacaatccttgt

SEQ ID NO: 5796 - RNA, 21 nt, synthetic construct
  source 1..21: mol_type = other RNA
aagccaacaatccttggcctt

SEQ ID NO: 5797 - RNA, 21 nt, synthetic construct
  source 1..21: mol_type = other RNA
agccaacaatccttggcctgt

SEQ ID NO: 5798 - RNA, 21 nt, synthetic construct
  source 1..21: mol_type = other RNA
gccaacaatccttggcctgct

SEQ ID NO: 5799 - RNA, 21 nt, synthetic construct
  source 1..21: mol_type = other RNA
ccaacaatccttggcctgcct

SEQ ID NO: 5800 - RNA, 21 nt, synthetic construct
  source 1..21: mol_type = other RNA
aacaatccttggcctgccagt

SEQ ID NO: 5801 - RNA, 21 nt, synthetic construct
  source 1..21: mol_type = other RNA
acaatccttggcctgccagtt

SEQ ID NO: 5802 - RNA, 21 nt, synthetic construct
  source 1..21: mol_type = other RNA
ttggcctgccagtacctcctt

SEQ ID NO: 5803 - RNA, 21 nt, synthetic construct
  source 1..21: mol_type = other RNA
gttgtgtccctactgcccgat

SEQ ID NO: 5804 - RNA, 21 nt, synthetic construct
  source 1..21: mol_type = other RNA
ttgtgtccctactgcccgaat

SEQ ID NO: 5805 - RNA, 21 nt, synthetic construct
  source 1..21: mol_type = other RNA
tgtgtccctactgcccgaagt

SEQ ID NO: 5806 - RNA, 21 nt, synthetic construct
  source 1..21: mol_type = other RNA
tgtccctactgcccgaaggct

SEQ ID NO: 5807 - RNA, 21 nt, synthetic construct
  source 1..21: mol_type = other RNA
tctctctcctctacctggatt

SEQ ID NO: 5808 - RNA, 21 nt, synthetic construct
  source 1..21: mol_type = other RNA
ctctctcctctacctggatct

SEQ ID NO: 5809 - RNA, 21 nt, synthetic construct
  source 1..21: mol_type = other RNA
tctctcctctacctggatcat

SEQ ID NO: 5810 - RNA, 21 nt, synthetic construct
  source 1..21: mol_type = other RNA
ctctcctctacctggatcatt

SEQ ID NO: 5811 - RNA, 21 nt, synthetic construct
  source 1..21: mol_type = other RNA
tctcctctacctggatcatat

SEQ ID NO: 5812 - RNA, 21 nt, synthetic construct
  source 1..21: mol_type = other RNA
ctcctctacctggatcataat

SEQ ID NO: 5813 - RNA, 21 nt, synthetic construct
  source 1..21: mol_type = other RNA
tcctctacctggatcataatt

SEQ ID NO: 5814 - RNA, 21 nt, synthetic construct
  source 1..21: mol_type = other RNA
cctctacctggatcataatgt

SEQ ID NO: 5815 - RNA, 21 nt, synthetic construct
  source 1..21: mol_type = other RNA
ctctacctggatcataatggt

SEQ ID NO: 5816 - RNA, 21 nt, synthetic construct
  source 1..21: mol_type = other RNA
tctacctggatcataatggct

SEQ ID NO: 5817 - RNA, 21 nt, synthetic construct
  source 1..21: mol_type = other RNA
ctacctggatcataatggcat

SEQ ID NO: 5818 - RNA, 21 nt, synthetic construct
  source 1..21: mol_type = other RNA
acctggatcataatggcaatt

SEQ ID NO: 5819 - RNA, 21 nt, synthetic construct
  source 1..21: mol_type = other RNA
cctggatcataatggcaatgt

SEQ ID NO: 5820 - RNA, 21 nt, synthetic construct
  source 1..21: mol_type = other RNA
ctggatcataatggcaatgtt

SEQ ID NO: 5821 - RNA, 21 nt, synthetic construct
  source 1..21: mol_type = other RNA
tggatcataatggcaatgtgt

SEQ ID NO: 5822 - RNA, 21 nt, synthetic construct
  source 1..21: mol_type = other RNA
ggatcataatggcaatgtggt

SEQ ID NO: 5823 - RNA, 21 nt, synthetic construct
  source 1..21: mol_type = other RNA
gatcataatggcaatgtggtt

SEQ ID NO: 5824 - RNA, 21 nt, synthetic construct
  source 1..21: mol_type = other RNA
atcataatggcaatgtggtct

SEQ ID NO: 5825 - RNA, 21 nt, synthetic construct
  source 1..21: mol_type = other RNA
tcataatggcaatgtggtcat

SEQ ID NO: 5826 - RNA, 21 nt, synthetic construct
  source 1..21: mol_type = other RNA
cataatggcaatgtggtcaat

SEQ ID NO: 5827 - RNA, 21 nt, synthetic construct
  source 1..21: mol_type = other RNA
ataatggcaatgtggtcaagt

SEQ ID NO: 5828 - RNA, 21 nt, synthetic construct
  source 1..21: mol_type = other RNA
taatggcaatgtggtcaagat

SEQ ID NO: 5829 - RNA, 21 nt, synthetic construct
  source 1..21: mol_type = other RNA
atggcaatgtggtcaagacgt

SEQ ID NO: 5830 - RNA, 21 nt, synthetic construct
  source 1..21: mol_type = other RNA
tggcaatgtggtcaagacggt

SEQ ID NO: 5831 - RNA, 21 nt, synthetic construct
  source 1..21: mol_type = other RNA
ggcaatgtggtcaagacggat

SEQ ID NO: 5832 - RNA, 21 nt, synthetic construct
  source 1..21: mol_type = other RNA
gcaatgtggtcaagacggatt

SEQ ID NO: 5833 - RNA, 21 nt, synthetic construct
  source 1..21: mol_type = other RNA
caatgtggtcaagacggatgt

SEQ ID NO: 5834 - RNA, 21 nt, synthetic construct
  source 1..21: mol_type = other RNA
aatgtggtcaagacggatgtt

SEQ ID NO: 5835 - RNA, 21 nt, synthetic construct
  source 1..21: mol_type = other RNA
atgtggtcaagacggatgtgt

SEQ ID NO: 5836 - RNA, 21 nt, synthetic construct
  source 1..21: mol_type = other RNA
tgtggtcaagacggatgtgct

SEQ ID NO: 5837 - RNA, 21 nt, synthetic construct
  source 1..21: mol_type = other RNA
gtggtcaagacggatgtgcct

SEQ ID NO: 5838 - RNA, 21 nt, synthetic construct
  source 1..21: mol_type = other RNA
tggtcaagacggatgtgccat

SEQ ID NO: 5839 - RNA, 21 nt, synthetic construct
  source 1..21: mol_type = other RNA
ggtcaagacggatgtgccagt

SEQ ID NO: 5840 - RNA, 21 nt, synthetic construct
  source 1..21: mol_type = other RNA
gtcaagacggatgtgccagat

SEQ ID NO: 5841 - RNA, 21 nt, synthetic construct
  source 1..21: mol_type = other RNA
tcaagacggatgtgccagatt

SEQ ID NO: 5842 - RNA, 21 nt, synthetic construct
  source 1..21: mol_type = other RNA
caagacggatgtgccagatat

SEQ ID NO: 5843 - RNA, 21 nt, synthetic construct
  source 1..21: mol_type = other RNA
agacggatgtgccagatatgt

SEQ ID NO: 5844 - RNA, 21 nt, synthetic construct
  source 1..21: mol_type = other RNA
gacggatgtgccagatatggt

SEQ ID NO: 5845 - RNA, 21 nt, synthetic construct
  source 1..21: mol_type = other RNA
acggatgtgccagatatggtt

SEQ ID NO: 5846 - RNA, 21 nt, synthetic construct
  source 1..21: mol_type = other RNA
cggatgtgccagatatggtgt

SEQ ID NO: 5847 - RNA, 21 nt, synthetic construct
  source 1..21: mol_type = other RNA
gatgtgccagatatggtggtt

SEQ ID NO: 5848 - RNA, 21 nt, synthetic construct
  source 1..21: mol_type = other RNA
atgtgccagatatggtggtgt

SEQ ID NO: 5849 - RNA, 21 nt, synthetic construct
  source 1..21: mol_type = other RNA
tgtgccagatatggtggtggt

SEQ ID NO: 5850 - RNA, 21 nt, synthetic construct
  source 1..21: mol_type = other RNA
gtgccagatatggtggtggat

SEQ ID NO: 5851 - RNA, 21 nt, synthetic construct
  source 1..21: mol_type = other RNA
tgccagatatggtggtggagt

SEQ ID NO: 5852 - RNA, 21 nt, synthetic construct
  source 1..21: mol_type = other RNA
ccagatatggtggtggaggct

SEQ ID NO: 5853 - RNA, 21 nt, synthetic construct
  source 1..21: mol_type = other RNA
tggtggtggaggcctgtggct

SEQ ID NO: 5854 - RNA, 21 nt, synthetic construct
  source 1..21: mol_type = other RNA
ggtggtggaggcctgtggctt

SEQ ID NO: 5855 - RNA, 21 nt, synthetic construct
  source 1..21: mol_type = other RNA
gcctgtggctgcagctagcat

SEQ ID NO: 5856 - RNA, 21 nt, synthetic construct
  source 1..21: mol_type = other RNA
cctgtggctgcagctagcaat

SEQ ID NO: 5857 - RNA, 21 nt, synthetic construct
  source 1..21: mol_type = other RNA
ctgtggctgcagctagcaagt

SEQ ID NO: 5858 - RNA, 21 nt, synthetic construct
  source 1..21: mol_type = other RNA
tgtggctgcagctagcaagat

SEQ ID NO: 5859 - RNA, 21 nt, synthetic construct
  source 1..21: mol_type = other RNA
gtggctgcagctagcaagagt

SEQ ID NO: 5860 - RNA, 21 nt, synthetic construct
  source 1..21: mol_type = other RNA
tggctgcagctagcaagaggt

SEQ ID NO: 5861 - RNA, 21 nt, synthetic construct
  source 1..21: mol_type = other RNA
ggctgcagctagcaagaggat

SEQ ID NO: 5862 - RNA, 21 nt, synthetic construct
  source 1..21: mol_type = other RNA
gctgcagctagcaagaggact

SEQ ID NO: 5863 - RNA, 21 nt, synthetic construct
  source 1..21: mol_type = other RNA
ctgcagctagcaagaggacct

SEQ ID NO: 5864 - RNA, 21 nt, synthetic construct
  source 1..21: mol_type = other RNA
gcagctagcaagaggacctgt

SEQ ID NO: 5865 - RNA, 21 nt, synthetic construct
  source 1..21: mol_type = other RNA
cagctagcaagaggacctggt

SEQ ID NO: 5866 - RNA, 21 nt, synthetic construct
  source 1..21: mol_type = other RNA
gctttggagtgaagagaccat

SEQ ID NO: 5867 - RNA, 21 nt, synthetic construct
  source 1..21: mol_type = other RNA
tttggagtgaagagaccaagt

SEQ ID NO: 5868 - RNA, 21 nt, synthetic construct
  source 1..21: mol_type = other RNA
tggagtgaagagaccaagatt

SEQ ID NO: 5869 - RNA, 21 nt, synthetic construct
  source 1..21: mol_type = other RNA
ggagtgaagagaccaagatgt

SEQ ID NO: 5870 - RNA, 21 nt, synthetic construct
  source 1..21: mol_type = other RNA
gagtgaagagaccaagatgat

SEQ ID NO: 5871 - RNA, 21 nt, synthetic construct
  source 1..21: mol_type = other RNA
tgaagagaccaagatgaagtt

SEQ ID NO: 5872 - RNA, 21 nt, synthetic construct
  source 1..21: mol_type = other RNA
aagagaccaagatgaagtttt

SEQ ID NO: 5873 - RNA, 21 nt, synthetic construct
  source 1..21: mol_type = other RNA
gagaccaagatgaagtttcct

SEQ ID NO: 5874 - RNA, 21 nt, synthetic construct
  source 1..21: mol_type = other RNA
agaccaagatgaagtttccct

SEQ ID NO: 5875 - RNA, 21 nt, synthetic construct
  source 1..21: mol_type = other RNA
gaccaagatgaagtttcccat

SEQ ID NO: 5876 - RNA, 21 nt, synthetic construct
  source 1..21: mol_type = other RNA
accaagatgaagtttcccagt

SEQ ID NO: 5877 - RNA, 21 nt, synthetic construct
  source 1..21: mol_type = other RNA
ccaagatgaagtttcccaggt

SEQ ID NO: 5878 - RNA, 21 nt, synthetic construct
  source 1..21: mol_type = other RNA
caagatgaagtttcccaggct

SEQ ID NO: 5879 - RNA, 21 nt, synthetic construct
  source 1..21: mol_type = other RNA
aagatgaagtttcccaggcat

SEQ ID NO: 5880 - RNA, 21 nt, synthetic construct
  source 1..21: mol_type = other RNA
agatgaagtttcccaggcact

SEQ ID NO: 5881 - RNA, 21 nt, synthetic construct
  source 1..21: mol_type = other RNA
gatgaagtttcccaggcacat

SEQ ID NO: 5882 - RNA, 21 nt, synthetic construct
  source 1..21: mol_type = other RNA
atgaagtttcccaggcacagt

SEQ ID NO: 5883 - RNA, 21 nt, synthetic construct
  source 1..21: mol_type = other RNA
gaagtttcccaggcacagggt

SEQ ID NO: 5884 - RNA, 21 nt, synthetic construct
  source 1..21: mol_type = other RNA
aagtttcccaggcacagggct

SEQ ID NO: 5885 - RNA, 21 nt, synthetic construct
  source 1..21: mol_type = other RNA
gtttcccaggcacagggcatt

SEQ ID NO: 5886 - RNA, 21 nt, synthetic construct
  source 1..21: mol_type = other RNA
tttcccaggcacagggcatct

SEQ ID NO: 5887 - RNA, 21 nt, synthetic construct
  source 1..21: mol_type = other RNA
ttcccaggcacagggcatctt

SEQ ID NO: 5888 - RNA, 21 nt, synthetic construct
  source 1..21: mol_type = other RNA
tcccaggcacagggcatctgt

SEQ ID NO: 5889 - RNA, 21 nt, synthetic construct
  source 1..21: mol_type = other RNA
caacccaacaaccacctggct

SEQ ID NO: 5890 - RNA, 21 nt, synthetic construct
  source 1..21: mol_type = other RNA
aacccaacaaccacctggcat

SEQ ID NO: 5891 - RNA, 21 nt, synthetic construct
  source 1..21: mol_type = other RNA
cccaacaaccacctggcaatt

SEQ ID NO: 5892 - RNA, 21 nt, synthetic construct
  source 1..21: mol_type = other RNA
ccaacaaccacctggcaatat

SEQ ID NO: 5893 - RNA, 21 nt, synthetic construct
  source 1..21: mol_type = other RNA
caacaaccacctggcaatatt

SEQ ID NO: 5894 - RNA, 21 nt, synthetic construct
  source 1..21: mol_type = other RNA
aacaaccacctggcaatatgt

SEQ ID NO: 5895 - RNA, 21 nt, synthetic construct
  source 1..21: mol_type = other RNA
acaaccacctggcaatatgat

SEQ ID NO: 5896 - RNA, 21 nt, synthetic construct
  source 1..21: mol_type = other RNA
caaccacctggcaatatgact

SEQ ID NO: 5897 - RNA, 21 nt, synthetic construct
  source 1..21: mol_type = other RNA
aaccacctggcaatatgactt

SEQ ID NO: 5898 - RNA, 21 nt, synthetic construct
  source 1..21: mol_type = other RNA
accacctggcaatatgactct

SEQ ID NO: 5899 - RNA, 21 nt, synthetic construct
  source 1..21: mol_type = other RNA
ccacctggcaatatgactcat

SEQ ID NO: 5900 - RNA, 21 nt, synthetic construct
  source 1..21: mol_type = other RNA
cacctggcaatatgactcact

SEQ ID NO: 5901 - RNA, 21 nt, synthetic construct
  source 1..21: mol_type = other RNA
acctggcaatatgactcactt

SEQ ID NO: 5902 - RNA, 21 nt, synthetic construct
  source 1..21: mol_type = other RNA
cctggcaatatgactcacttt

SEQ ID NO: 5903 - RNA, 21 nt, synthetic construct
  source 1..21: mol_type = other RNA
ctggcaatatgactcacttgt

SEQ ID NO: 5904 - RNA, 21 nt, synthetic construct
  source 1..21: mol_type = other RNA
tggcaatatgactcacttgat

SEQ ID NO: 5905 - RNA, 21 nt, synthetic construct
  source 1..21: mol_type = other RNA
gcaatatgactcacttgacct

SEQ ID NO: 5906 - RNA, 21 nt, synthetic construct
  source 1..21: mol_type = other RNA
ggacccaaatgggcactttct

SEQ ID NO: 5907 - RNA, 21 nt, synthetic construct
  source 1..21: mol_type = other RNA
acccaaatgggcactttcttt

SEQ ID NO: 5908 - RNA, 21 nt, synthetic construct
  source 1..21: mol_type = other RNA
cccaaatgggcactttcttgt

SEQ ID NO: 5909 - RNA, 21 nt, synthetic construct
  source 1..21: mol_type = other RNA
ccaaatgggcactttcttgtt

SEQ ID NO: 5910 - RNA, 21 nt, synthetic construct
  source 1..21: mol_type = other RNA
caaatgggcactttcttgtct

SEQ ID NO: 5911 - RNA, 21 nt, synthetic construct
  source 1..21: mol_type = other RNA
aaatgggcactttcttgtctt

SEQ ID NO: 5912 - RNA, 21 nt, synthetic construct
  source 1..21: mol_type = other RNA
atgggcactttcttgtctgat

SEQ ID NO: 5913 - RNA, 21 nt, synthetic construct
  source 1..21: mol_type = other RNA
tgggcactttcttgtctgagt

SEQ ID NO: 5914 - RNA, 21 nt, synthetic construct
  source 1..21: mol_type = other RNA
gggcactttcttgtctgagat

SEQ ID NO: 5915 - RNA, 21 nt, synthetic construct
  source 1..21: mol_type = other RNA
ggcactttcttgtctgagact

SEQ ID NO: 5916 - RNA, 21 nt, synthetic construct
  source 1..21: mol_type = other RNA
gcactttcttgtctgagactt

SEQ ID NO: 5917 - RNA, 21 nt, synthetic construct
  source 1..21: mol_type = other RNA
cactttcttgtctgagactct

SEQ ID NO: 5918 - RNA, 21 nt, synthetic construct
  source 1..21: mol_type = other RNA
ctttcttgtctgagactctgt

SEQ ID NO: 5919 - RNA, 21 nt, synthetic construct
  source 1..21: mol_type = other RNA
tttcttgtctgagactctggt

SEQ ID NO: 5920 - RNA, 21 nt, synthetic construct
  source 1..21: mol_type = other RNA
ttcttgtctgagactctggct

SEQ ID NO: 5921 - RNA, 21 nt, synthetic construct
  source 1..21: mol_type = other RNA
tcttgtctgagactctggctt

SEQ ID NO: 5922 - RNA, 21 nt, synthetic construct
  source 1..21: mol_type = other RNA
cttgtctgagactctggcttt

SEQ ID NO: 5923 - RNA, 21 nt, synthetic construct
  source 1..21: mol_type = other RNA
tattccaggttggctgatgtt

SEQ ID NO: 5924 - RNA, 21 nt, synthetic construct
  source 1..21: mol_type = other RNA
attccaggttggctgatgtgt

SEQ ID NO: 5925 - RNA, 21 nt, synthetic construct
  source 1..21: mol_type = other RNA
ttccaggttggctgatgtgtt

SEQ ID NO: 5926 - RNA, 21 nt, synthetic construct
  source 1..21: mol_type = other RNA
ccaggttggctgatgtgttgt

SEQ ID NO: 5927 - RNA, 21 nt, synthetic construct
  source 1..21: mol_type = other RNA
caggttggctgatgtgttggt

SEQ ID NO: 5928 - RNA, 21 nt, synthetic construct
  source 1..21: mol_type = other RNA
tttcctgccctaagtcctgtt

SEQ ID NO: 5929 - RNA, 21 nt, synthetic construct
  source 1..21: mol_type = other RNA
agaagatgtcagggactaggt

SEQ ID NO: 5930 - RNA, 21 nt, synthetic construct
  source 1..21: mol_type = other RNA
gaagatgtcagggactagggt

SEQ ID NO: 5931 - RNA, 21 nt, synthetic construct
  source 1..21: mol_type = other RNA
aagatgtcagggactagggat

SEQ ID NO: 5932 - RNA, 21 nt, synthetic construct
  source 1..21: mol_type = other RNA
agatgtcagggactagggagt

SEQ ID NO: 5933 - RNA, 21 nt, synthetic construct
  source 1..21: mol_type = other RNA
gatgtcagggactagggaggt

SEQ ID NO: 5934 - RNA, 21 nt, synthetic construct
  source 1..21: mol_type = other RNA
atgtcagggactagggagggt

SEQ ID NO: 5935 - RNA, 21 nt, synthetic construct
  source 1..21: mol_type = other RNA
gaggaggaagcagatagatgt

SEQ ID NO: 5936 - RNA, 21 nt, synthetic construct
  source 1..21: mol_type = other RNA
aggaggaagcagatagatggt

SEQ ID NO: 5937 - RNA, 21 nt, synthetic construct
  source 1..21: mol_type = other RNA
gaggaagcagatagatggtct

SEQ ID NO: 5938 - RNA, 21 nt, synthetic construct
  source 1..21: mol_type = other RNA
aggaagcagatagatggtcct

SEQ ID NO: 5939 - RNA, 21 nt, synthetic construct
  source 1..21: mol_type = other RNA
ggaagcagatagatggtccat

SEQ ID NO: 5940 - RNA, 21 nt, synthetic construct
  source 1..21: mol_type = other RNA
gaagcagatagatggtccagt

SEQ ID NO: 5941 - RNA, 21 nt, synthetic construct
  source 1..21: mol_type = other RNA
aagcagatagatggtccagct

SEQ ID NO: 5942 - RNA, 21 nt, synthetic construct
  source 1..21: mol_type = other RNA
agcagatagatggtccagcat

SEQ ID NO: 5943 - RNA, 21 nt, synthetic construct
  source 1..21: mol_type = other RNA
gcagatagatggtccagcagt

SEQ ID NO: 5944 - RNA, 21 nt, synthetic construct
  source 1..21: mol_type = other RNA
cagatagatggtccagcaggt

SEQ ID NO: 5945 - RNA, 21 nt, synthetic construct
  source 1..21: mol_type = other RNA
agatagatggtccagcaggct

SEQ ID NO: 5946 - RNA, 21 nt, synthetic construct
  source 1..21: mol_type = other RNA
gatagatggtccagcaggctt

SEQ ID NO: 5947 - RNA, 21 nt, synthetic construct
  source 1..21: mol_type = other RNA
atagatggtccagcaggcttt

SEQ ID NO: 5948 - RNA, 21 nt, synthetic construct
  source 1..21: mol_type = other RNA
tagatggtccagcaggcttgt

SEQ ID NO: 5949 - RNA, 21 nt, synthetic construct
  source 1..21: mol_type = other RNA
agatggtccagcaggcttgat

SEQ ID NO: 5950 - RNA, 21 nt, synthetic construct
  source 1..21: mol_type = other RNA
gatggtccagcaggcttgaat

SEQ ID NO: 5951 - RNA, 21 nt, synthetic construct
  source 1..21: mol_type = other RNA
atggtccagcaggcttgaagt

SEQ ID NO: 5952 - RNA, 21 nt, synthetic construct
  source 1..21: mol_type = other RNA
tggtccagcaggcttgaagct

SEQ ID NO: 5953 - RNA, 21 nt, synthetic construct
  source 1..21: mol_type = other RNA
ggtccagcaggcttgaagcat

SEQ ID NO: 5954 - RNA, 21 nt, synthetic construct
  source 1..21: mol_type = other RNA
gtccagcaggcttgaagcagt

SEQ ID NO: 5955 - RNA, 21 nt, synthetic construct
  source 1..21: mol_type = other RNA
aaggtcaagagggagatgggt

SEQ ID NO: 5956 - RNA, 21 nt, synthetic construct
  source 1..21: mol_type = other RNA
aggtcaagagggagatgggct

SEQ ID NO: 5957 - RNA, 21 nt, synthetic construct
  source 1..21: mol_type = other RNA
ggtcaagagggagatgggcat

SEQ ID NO: 5958 - RNA, 21 nt, synthetic construct
  source 1..21: mol_type = other RNA
tcaagagggagatgggcaagt

SEQ ID NO: 5959 - RNA, 21 nt, synthetic construct
  source 1..21: mol_type = other RNA
gcgctgagggaggatgcttat

SEQ ID NO: 5960 - RNA, 21 nt, synthetic construct
  source 1..21: mol_type = other RNA
cgctgagggaggatgcttagt

SEQ ID NO: 5961 - RNA, 21 nt, synthetic construct
  source 1..21: mol_type = other RNA
gcactaagcctaagaagttct

SEQ ID NO: 5962 - RNA, 21 nt, synthetic construct
  source 1..21: mol_type = other RNA
cactaagcctaagaagttcct

SEQ ID NO: 5963 - RNA, 21 nt, synthetic construct
  source 1..21: mol_type = other RNA
acaggacccactgggagacat

SEQ ID NO: 5964 - RNA, 21 nt, synthetic construct
  source 1..21: mol_type = other RNA
caggacccactgggagacaat

SEQ ID NO: 5965 - RNA, 21 nt, synthetic construct
  source 1..21: mol_type = other RNA
aggacccactgggagacaagt

SEQ ID NO: 5966 - RNA, 21 nt, synthetic construct
  source 1..21: mol_type = other RNA
ggacccactgggagacaagct

SEQ ID NO: 5967 - RNA, 21 nt, synthetic construct
  source 1..21: mol_type = other RNA
gacccactgggagacaagcat

SEQ ID NO: 5968 - RNA, 21 nt, synthetic construct
  source 1..21: mol_type = other RNA
acccactgggagacaagcatt

SEQ ID NO: 5969 - RNA, 21 nt, synthetic construct
  source 1..21: mol_type = other RNA
cccactgggagacaagcattt

SEQ ID NO: 5970 - RNA, 21 nt, synthetic construct
  source 1..21: mol_type = other RNA
ccactgggagacaagcatttt

SEQ ID NO: 5971 - RNA, 21 nt, synthetic construct
  source 1..21: mol_type = other RNA
actgggagacaagcatttatt

SEQ ID NO: 5972 - RNA, 21 nt, synthetic construct
  source 1..21: mol_type = other RNA
ctgggagacaagcatttatat

SEQ ID NO: 5973 - RNA, 21 nt, synthetic construct
  source 1..21: mol_type = other RNA
tgggagacaagcatttatact

SEQ ID NO: 5974 - RNA, 21 nt, synthetic construct
  source 1..21: mol_type = other RNA
ggagacaagcatttatacttt

SEQ ID NO: 5975 - RNA, 21 nt, synthetic construct
  source 1..21: mol_type = other RNA
gagacaagcatttatactttt

SEQ ID NO: 5976 - RNA, 21 nt, synthetic construct
  source 1..21: mol_type = other RNA
agacaagcatttatactttct

SEQ ID NO: 5977 - RNA, 21 nt, synthetic construct
  source 1..21: mol_type = other RNA
caagcatttatactttctttt

SEQ ID NO: 5978 - RNA, 23 nt, synthetic construct
  source 1..23: mol_type = other RNA
acctcacagctcatgtctggcta

SEQ ID NO: 5979 - RNA, 23 nt, synthetic construct
  source 1..23: mol_type = other RNA
  modified_base 5: mod_base = OTHER; note = thymine
  modified_base 12: mod_base = OTHER; note = thymine
accctcacagctcatgtctggct

SEQ ID NO: 5980 - RNA, 23 nt, synthetic construct
  source 1..23: mol_type = other RNA
  modified_base 7: mod_base = OTHER; note = thymine
agaccctcacagctcatgtctgg

SEQ ID NO: 5981 - RNA, 23 nt, synthetic construct
  source 1..23: mol_type = other RNA
  modified_base 2: mod_base = OTHER; note = thymine
atgaccctcacagctcatgtctg

SEQ ID NO: 5982 - RNA, 23 nt, synthetic construct
  source 1..23: mol_type = other RNA
  modified_base 2: mod_base = OTHER; note = thymine
attgaccctcacagctcatgtct

SEQ ID NO: 5983 - RNA, 23 nt, synthetic construct
  source 1..23: mol_type = other RNA
acttgaccctcacagctcatgtc

SEQ ID NO: 5984 - RNA, 23 nt, synthetic construct
  source 1..23: mol_type = other RNA
  modified_base 5: mod_base = OTHER; note = thymine
agcttgaccctcacagctcatgt

SEQ ID NO: 5985 - RNA, 23 nt, synthetic construct
  source 1..23: mol_type = other RNA
  modified_base 2: mod_base = OTHER; note = thymine
  modified_base 5: mod_base = OTHER; note = thymine
  modified_base 12: mod_base = OTHER; note = thymine
atgcttgaccctcacagctcatg

SEQ ID NO: 5986 - RNA, 23 nt, synthetic construct
  source 1..23: mol_type = other RNA
  modified_base 7: mod_base = OTHER; note = thymine
agtgcttgaccctcacagctcat

SEQ ID NO: 5987 - RNA, 23 nt, synthetic construct
  source 1..23: mol_type = other RNA
  modified_base 2: mod_base = OTHER; note = thymine
  modified_base 7: mod_base = OTHER; note = thymine
atgtgcttgaccctcacagctca

SEQ ID NO: 5988 - RNA, 23 nt, synthetic construct
  source 1..23: mol_type = other RNA
  modified_base 5: mod_base = OTHER; note = thymine
actgtgcttgaccctcacagctc

SEQ ID NO: 5989 - RNA, 23 nt, synthetic construct
  source 1..23: mol_type = other RNA
agctgtgcttgaccctcacagct

SEQ ID NO: 5990 - RNA, 23 nt, synthetic construct
  source 1..23: mol_type = other RNA
  modified_base 5: mod_base = OTHER; note = thymine
  modified_base 7: mod_base = OTHER; note = thymine
aagctgtgcttgaccctcacagc

SEQ ID NO: 5991 - RNA, 23 nt, synthetic construct
  source 1..23: mol_type = other RNA
  modified_base 2: mod_base = OTHER; note = thymine
  modified_base 12: mod_base = OTHER; note = thymine
atagctgtgcttgaccctcacag

SEQ ID NO: 5992 - RNA, 23 nt, synthetic construct
  source 1..23: mol_type = other RNA
  modified_base 7: mod_base = OTHER; note = thymine
  modified_base 12: mod_base = OTHER; note = thymine
aatagctgtgcttgaccctcaca

SEQ ID NO: 5993 - RNA, 23 nt, synthetic construct
  source 1..23: mol_type = other RNA
  modified_base 5: mod_base = OTHER; note = thymine
aggatagctgtgcttgaccctca

SEQ ID NO: 5994 - RNA, 23 nt, synthetic construct
  source 1..23: mol_type = other RNA
  modified_base 2: mod_base = OTHER; note = thymine
  modified_base 12: mod_base = OTHER; note = thymine
atggatagctgtgcttgaccctc

SEQ ID NO: 5995 - RNA, 23 nt, synthetic construct
  source 1..23: mol_type = other RNA
actgatggatagctgtgcttgac

SEQ ID NO: 5996 - RNA, 23 nt, synthetic construct
  source 1..23: mol_type = other RNA
  modified_base 2: mod_base = OTHER; note = thymine
  modified_base 7: mod_base = OTHER; note = thymine
atctgatggatagctgtgcttga

SEQ ID NO: 5997 - RNA, 23 nt, synthetic construct
  source 1..23: mol_type = other RNA
acatctgatggatagctgtgctt

SEQ ID NO: 5998 - RNA, 23 nt, synthetic construct
  source 1..23: mol_type = other RNA
  modified_base 2: mod_base = OTHER; note = thymine
  modified_base 5: mod_base = OTHER; note = thymine
  modified_base 7: mod_base = OTHER; note = thymine
atcatctgatggatagctgtgct

SEQ ID NO: 5999 - RNA, 23 nt, synthetic construct
  source 1..23: mol_type = other RNA
aatcatctgatggatagctgtgc

SEQ ID NO: 6000 - RNA, 23 nt, synthetic construct
  source 1..23: mol_type = other RNA
  modified_base 7: mod_base = OTHER; note = thymine
  modified_base 12: mod_base = OTHER; note = thymine
agatcatctgatggatagctgtg

SEQ ID NO: 6001 - RNA, 23 nt, synthetic construct
  source 1..23: mol_type = other RNA
  modified_base 5: mod_base = OTHER; note = thymine
aagatcatctgatggatagctgt

SEQ ID NO: 6002 - RNA, 23 nt, synthetic construct
  source 1..23: mol_type = other RNA
  modified_base 2: mod_base = OTHER; note = thymine
atagatcatctgatggatagctg

SEQ ID NO: 6003 - RNA, 23 nt, synthetic construct
  source 1..23: mol_type = other RNA
  modified_base 7: mod_base = OTHER; note = thymine
  modified_base 12: mod_base = OTHER; note = thymine
agtagatcatctgatggatagct

SEQ ID NO: 6004 - RNA, 23 nt, synthetic construct
  source 1..23: mol_type = other RNA
aagtagatcatctgatggatagc

SEQ ID NO: 6005 - RNA, 23 nt, synthetic construct
  source 1..23: mol_type = other RNA
  modified_base 5: mod_base = OTHER; note = thymine
  modified_base 12: mod_base = OTHER; note = thymine
aaagtagatcatctgatggatag

SEQ ID NO: 6006 - RNA, 23 nt, synthetic construct
  source 1..23: mol_type = other RNA
aaaagtagatcatctgatggata

SEQ ID NO: 6007 - RNA, 23 nt, synthetic construct
  source 1..23: mol_type = other RNA
  modified_base 7: mod_base = OTHER; note = thymine
agaaagtagatcatctgatggat

SEQ ID NO: 6008 - RNA, 23 nt, synthetic construct
  source 1..23: mol_type = other RNA
  modified_base 2: mod_base = OTHER; note = thymine
  modified_base 12: mod_base = OTHER; note = thymine
atgaaagtagatcatctgatgga

SEQ ID NO: 6009 - RNA, 23 nt, synthetic construct
  source 1..23: mol_type = other RNA
actgaaagtagatcatctgatgg

SEQ ID NO: 6010 - RNA, 23 nt, synthetic construct
  source 1..23: mol_type = other RNA
agctgaaagtagatcatctgatg

SEQ ID NO: 6011 - RNA, 23 nt, synthetic construct
  source 1..23: mol_type = other RNA
  modified_base 5: mod_base = OTHER; note = thymine
aggctgaaagtagatcatctgat

SEQ ID NO: 6012 - RNA, 23 nt, synthetic construct
  source 1..23: mol_type = other RNA
  modified_base 12: mod_base = OTHER; note = thymine
aaggctgaaagtagatcatctga

SEQ ID NO: 6013 - RNA, 23 nt, synthetic construct
  source 1..23: mol_type = other RNA
  modified_base 7: mod_base = OTHER; note = thymine
aaaggctgaaagtagatcatctg

SEQ ID NO: 6014 - RNA, 23 nt, synthetic construct
  source 1..23: mol_type = other RNA
agaaggctgaaagtagatcatct

SEQ ID NO: 6015 - RNA, 23 nt, synthetic construct
  source 1..23: mol_type = other RNA
aggaaggctgaaagtagatcatc

SEQ ID NO: 6016 - RNA, 23 nt, synthetic construct
  source 1..23: mol_type = other RNA
acaggaaggctgaaagtagatca

SEQ ID NO: 6017 - RNA, 23 nt, synthetic construct
  source 1..23: mol_type = other RNA
  modified_base 2: mod_base = OTHER; note = thymine
  modified_base 12: mod_base = OTHER; note = thymine
atcaggaaggctgaaagtagatc

SEQ ID NO: 6018 - RNA, 23 nt, synthetic construct
  source 1..23: mol_type = other RNA
actcaggaaggctgaaagtagat

SEQ ID NO: 6019 - RNA, 23 nt, synthetic construct
  source 1..23: mol_type = other RNA
aactcaggaaggctgaaagtaga

SEQ ID NO: 6020 - RNA, 23 nt, synthetic construct
  source 1..23: mol_type = other RNA
  modified_base 5: mod_base = OTHER; note = thymine
agactcaggaaggctgaaagtag

SEQ ID NO: 6021 - RNA, 23 nt, synthetic construct
  source 1..23: mol_type = other RNA
actgggactcaggaaggctgaaa

SEQ ID NO: 6022 - RNA, 23 nt, synthetic construct
  source 1..23: mol_type = other RNA
  modified_base 12: mod_base = OTHER; note = thymine
agccacctgtcttctattgtctg

SEQ ID NO: 6023 - RNA, 23 nt, synthetic construct
  source 1..23: mol_type = other RNA
aagccacctgtcttctattgtct

SEQ ID NO: 6024 - RNA, 23 nt, synthetic construct
  source 1..23: mol_type = other RNA
agacagcagacaccactgccaca

SEQ ID NO: 6025 - RNA, 23 nt, synthetic construct
  source 1..23: mol_type = other RNA
  modified_base 2: mod_base = OTHER; note = thymine
atgacagcagacaccactgccac

SEQ ID NO: 6026 - RNA, 23 nt, synthetic construct
  source 1..23: mol_type = other RNA
agtgacagcagacaccactgcca

SEQ ID NO: 6027 - RNA, 23 nt, synthetic construct
  source 1..23: mol_type = other RNA
aagtgacagcagacaccactgcc

SEQ ID NO: 6028 - RNA, 23 nt, synthetic construct
  source 1..23: mol_type = other RNA
  modified_base 5: mod_base = OTHER; note = thymine
acagtgacagcagacaccactgc

SEQ ID NO: 6029 - RNA, 23 nt, synthetic construct
  source 1..23: mol_type = other RNA
aacagtgacagcagacaccactg

SEQ ID NO: 6030 - RNA, 23 nt, synthetic construct
  source 1..23: mol_type = other RNA
  modified_base 7: mod_base = OTHER; note = thymine
acacagtgacagcagacaccact

SEQ ID NO: 6031 - RNA, 23 nt, synthetic construct
  source 1..23: mol_type = other RNA
agcacagtgacagcagacaccac

SEQ ID NO: 6032 - RNA, 23 nt, synthetic construct
  source 1..23: mol_type = other RNA
  modified_base 2: mod_base = OTHER; note = thymine
  modified_base 5: mod_base = OTHER; note = thymine
atgctccgtctgttgagtctgat

SEQ ID NO: 6033 - RNA, 23 nt, synthetic construct
  source 1..23: mol_type = other RNA
  modified_base 2: mod_base = OTHER; note = thymine
  modified_base 12: mod_base = OTHER; note = thymine
attgctccgtctgttgagtctga

SEQ ID NO: 6034 - RNA, 23 nt, synthetic construct
  source 1..23: mol_type = other RNA
  modified_base 7: mod_base = OTHER; note = thymine
agttgctccgtctgttgagtctg

SEQ ID NO: 6035 - RNA, 23 nt, synthetic construct
  source 1..23: mol_type = other RNA
  modified_base 5: mod_base = OTHER; note = thymine
  modified_base 12: mod_base = OTHER; note = thymine
aagttgctccgtctgttgagtct

SEQ ID NO: 6036 - RNA, 23 nt, synthetic construct
  source 1..23: mol_type = other RNA
  modified_base 5: mod_base = OTHER; note = thymine
acagttgctccgtctgttgagtc

SEQ ID NO: 6037 - RNA, 23 nt, synthetic construct
  source 1..23: mol_type = other RNA
  modified_base 7: mod_base = OTHER; note = thymine
agcagttgctccgtctgttgagt

SEQ ID NO: 6038 - RNA, 23 nt, synthetic construct
  source 1..23: mol_type = other RNA
  modified_base 7: mod_base = OTHER; note = thymine
aggcagttgctccgtctgttgag

SEQ ID NO: 6039 - RNA, 23 nt, synthetic construct
  source 1..23: mol_type = other RNA
  modified_base 2: mod_base = OTHER; note = thymine
  modified_base 12: mod_base = OTHER; note = thymine
atggcagttgctccgtctgttga

SEQ ID NO: 6040 - RNA, 23 nt, synthetic construct
  source 1..23: mol_type = other RNA
aatggcagttgctccgtctgttg

SEQ ID NO: 6041 - RNA, 23 nt, synthetic construct
  source 1..23: mol_type = other RNA
agatggcagttgctccgtctgtt

SEQ ID NO: 6042 - RNA, 23 nt, synthetic construct
  source 1..23: mol_type = other RNA
  modified_base 5: mod_base = OTHER; note = thymine
  modified_base 12: mod_base = OTHER; note = thymine
aggatggcagttgctccgtctgt

SEQ ID NO: 6043 - RNA, 23 nt, synthetic construct
  source 1..23: mol_type = other RNA
  modified_base 12: mod_base = OTHER; note = thymine
acggatggcagttgctccgtctg

SEQ ID NO: 6044 - RNA, 23 nt, synthetic construct
  source 1..23: mol_type = other RNA
  modified_base 2: mod_base = OTHER; note = thymine
  modified_base 7: mod_base = OTHER; note = thymine
atcggatggcagttgctccgtct

SEQ ID NO: 6045 - RNA, 23 nt, synthetic construct
  source 1..23: mol_type = other RNA
actcggatggcagttgctccgtc

SEQ ID NO: 6046 - RNA, 23 nt, synthetic construct
  source 1..23: mol_type = other RNA
acctcggatggcagttgctccgt

SEQ ID NO: 6047 - RNA, 23 nt, synthetic construct
  source 1..23: mol_type = other RNA
aagcctcggatggcagttgctcc

SEQ ID NO: 6048 - RNA, 23 nt, synthetic construct
  source 1..23: mol_type = other RNA
  modified_base 7: mod_base = OTHER; note = thymine
  modified_base 12: mod_base = OTHER; note = thymine
agagcctcggatggcagttgctc

SEQ ID NO: 6049 - RNA, 23 nt, synthetic construct
  source 1..23: mol_type = other RNA
aggagcctcggatggcagttgct

SEQ ID NO: 6050 - RNA, 23 nt, synthetic construct
  source 1..23: mol_type = other RNA
acaccagagctcgttctgcttgg

SEQ ID NO: 6051 - RNA, 23 nt, synthetic construct
  source 1..23: mol_type = other RNA
  modified_base 12: mod_base = OTHER; note = thymine
agcaccagagctcgttctgcttg

SEQ ID NO: 6052 - RNA, 23 nt, synthetic construct
  source 1..23: mol_type = other RNA
aagcaccagagctcgttctgctt

SEQ ID NO: 6053 - RNA, 23 nt, synthetic construct
  source 1..23: mol_type = other RNA
acagcaccagagctcgttctgct

SEQ ID NO: 6054 - RNA, 23 nt, synthetic construct
  source 1..23: mol_type = other RNA
accagcaccagagctcgttctgc

SEQ ID NO: 6055 - RNA, 23 nt, synthetic construct
  source 1..23: mol_type = other RNA
  modified_base 2: mod_base = OTHER; note = thymine
atccagcaccagagctcgttctg

SEQ ID NO: 6056 - RNA, 23 nt, synthetic construct
  source 1..23: mol_type = other RNA
actccagcaccagagctcgttct

SEQ ID NO: 6057 - RNA, 23 nt, synthetic construct
  source 1..23: mol_type = other RNA
agctccagcaccagagctcgttc

SEQ ID NO: 6058 - RNA, 23 nt, synthetic construct
  source 1..23: mol_type = other RNA
  modified_base 2: mod_base = OTHER; note = thymine
atagctccagcaccagagctcgt

SEQ ID NO: 6059 - RNA, 23 nt, synthetic construct
  source 1..23: mol_type = other RNA
agctagctccagcaccagagctc

SEQ ID NO: 6060 - RNA, 23 nt, synthetic construct
  source 1..23: mol_type = other RNA
  modified_base 5: mod_base = OTHER; note = thymine
aggctagctccagcaccagagct

SEQ ID NO: 6061 - RNA, 23 nt, synthetic construct
  source 1..23: mol_type = other RNA
  modified_base 2: mod_base = OTHER; note = thymine
atggctagctccagcaccagagc

SEQ ID NO: 6062 - RNA, 23 nt, synthetic construct
  source 1..23: mol_type = other RNA
  modified_base 2: mod_base = OTHER; note = thymine
  modified_base 7: mod_base = OTHER; note = thymine
attggctagctccagcaccagag

SEQ ID NO: 6063 - RNA, 23 nt, synthetic construct
  source 1..23: mol_type = other RNA
  modified_base 12: mod_base = OTHER; note = thymine
acttggctagctccagcaccaga

SEQ ID NO: 6064 - RNA, 23 nt, synthetic construct
  source 1..23: mol_type = other RNA
  modified_base 5: mod_base = OTHER; note = thymine
agcttggctagctccagcaccag

SEQ ID NO: 6065 - RNA, 23 nt, synthetic construct
  source 1..23: mol_type = other RNA
  modified_base 2: mod_base = OTHER; note = thymine
  modified_base 5: mod_base = OTHER; note = thymine
atgcttggctagctccagcacca

SEQ ID NO: 6066 - RNA, 23 nt, synthetic construct
  source 1..23: mol_type = other RNA
  modified_base 7: mod_base = OTHER; note = thymine
actgcttggctagctccagcacc

SEQ ID NO: 6067 - RNA, 23 nt, synthetic construct
  source 1..23: mol_type = other RNA
  modified_base 2: mod_base = OTHER; note = thymine
  modified_base 7: mod_base = OTHER; note = thymine
atttgctgcttggctagctccag

SEQ ID NO: 6068 - RNA, 23 nt, synthetic construct
  source 1..23: mol_type = other RNA
  modified_base 5: mod_base = OTHER; note = thymine
  modified_base 12: mod_base = OTHER; note = thymine
aatttgctgcttggctagctcca

SEQ ID NO: 6069 - RNA, 23 nt, synthetic construct
  source 1..23: mol_type = other RNA
  modified_base 5: mod_base = OTHER; note = thymine
  modified_base 12: mod_base = OTHER; note = thymine
agatttgctgcttggctagctcc

SEQ ID NO: 6070 - RNA, 23 nt, synthetic construct
  source 1..23: mol_type = other RNA
  modified_base 5: mod_base = OTHER; note = thymine
  modified_base 7: mod_base = OTHER; note = thymine
aggatttgctgcttggctagctc

SEQ ID NO: 6071 - RNA, 23 nt, synthetic construct
  source 1..23: mol_type = other RNA
  modified_base 7: mod_base = OTHER; note = thymine
aaggatttgctgcttggctagct

SEQ ID NO: 6072 - RNA, 23 nt, synthetic construct
  source 1..23: mol_type = other RNA
  modified_base 7: mod_base = OTHER; note = thymine
  modified_base 12: mod_base = OTHER; note = thymine
acaggatttgctgcttggctagc

SEQ ID NO: 6073 - RNA, 23 nt, synthetic construct
  source 1..23: mol_type = other RNA
accaggatttgctgcttggctag

SEQ ID NO: 6074 - RNA, 23 nt, synthetic construct
  source 1..23: mol_type = other RNA
  modified_base 2: mod_base = OTHER; note = thymine
atccaggatttgctgcttggcta

SEQ ID NO: 6075 - RNA, 23 nt, synthetic construct
  source 1..23: mol_type = other RNA
  modified_base 2: mod_base = OTHER; note = thymine
atctgggacgactggtcaggtgc

SEQ ID NO: 6076 - RNA, 23 nt, synthetic construct
  source 1..23: mol_type = other RNA
  modified_base 2: mod_base = OTHER; note = thymine
  modified_base 5: mod_base = OTHER; note = thymine
attctgggacgactggtcaggtg

SEQ ID NO: 6077 - RNA, 23 nt, synthetic construct
  source 1..23: mol_type = other RNA
aattctgggacgactggtcaggt

SEQ ID NO: 6078 - RNA, 23 nt, synthetic construct
  source 1..23: mol_type = other RNA
  modified_base 2: mod_base = OTHER; note = thymine
  modified_base 5: mod_base = OTHER; note = thymine
  modified_base 7: mod_base = OTHER; note = thymine
atattctgggacgactggtcagg

SEQ ID NO: 6079 - RNA, 23 nt, synthetic construct
  source 1..23: mol_type = other RNA
  modified_base 2: mod_base = OTHER; note = thymine
  modified_base 5: mod_base = OTHER; note = thymine
attattctgggacgactggtcag

SEQ ID NO: 6080 - RNA, 23 nt, synthetic construct
  source 1..23: mol_type = other RNA
  modified_base 5: mod_base = OTHER; note = thymine
  modified_base 7: mod_base = OTHER; note = thymine
aagttattctgggacgactggtc

SEQ ID NO: 6081 - RNA, 23 nt, synthetic construct
  source 1..23: mol_type = other RNA
  modified_base 5: mod_base = OTHER; note = thymine
agagttattctgggacgactggt

SEQ ID NO: 6082 - RNA, 23 nt, synthetic construct
  source 1..23: mol_type = other RNA
  modified_base 2: mod_base = OTHER; note = thymine
  modified_base 7: mod_base = OTHER; note = thymine
  modified_base 12: mod_base = OTHER; note = thymine
atgagttattctgggacgactgg

SEQ ID NO: 6083 - RNA, 23 nt, synthetic construct
  source 1..23: mol_type = other RNA
  modified_base 7: mod_base = OTHER; note = thymine
aatgagttattctgggacgactg

SEQ ID NO: 6084 - RNA, 23 nt, synthetic construct
  source 1..23: mol_type = other RNA
  modified_base 12: mod_base = OTHER; note = thymine
agatgagttattctgggacgact

SEQ ID NO: 6085 - RNA, 23 nt, synthetic construct
  source 1..23: mol_type = other RNA
  modified_base 5: mod_base = OTHER; note = thymine
  modified_base 12: mod_base = OTHER; note = thymine
aggatgagttattctgggacgac

SEQ ID NO: 6086 - RNA, 23 nt, synthetic construct
  source 1..23: mol_type = other RNA
aaggatgagttattctgggacga

SEQ ID NO: 6087 - RNA, 23 nt, synthetic construct
  source 1..23: mol_type = other RNA
  modified_base 7: mod_base = OTHER; note = thymine
  modified_base 12: mod_base = OTHER; note = thymine
agaggatgagttattctgggacg

SEQ ID NO: 6088 - RNA, 23 nt, synthetic construct
  source 1..23: mol_type = other RNA
  modified_base 12: mod_base = OTHER; note = thymine
aggaggatgagttattctgggac

SEQ ID NO: 6089 - RNA, 23 nt, synthetic construct
  source 1..23: mol_type = other RNA
agtggaggatgagttattctggg

SEQ ID NO: 6090 - RNA, 23 nt, synthetic construct
  source 1..23: mol_type = other RNA
  modified_base 2: mod_base = OTHER; note = thymine
  modified_base 7: mod_base = OTHER; note = thymine
attccctggagccacactccctg

SEQ ID NO: 6091 - RNA, 23 nt, synthetic construct
  source 1..23: mol_type = other RNA
aattccctggagccacactccct

SEQ ID NO: 6092 - RNA, 23 nt, synthetic construct
  source 1..23: mol_type = other RNA
  modified_base 5: mod_base = OTHER; note = thymine
acattccctggagccacactccc

SEQ ID NO: 6093 - RNA, 23 nt, synthetic construct
  source 1..23: mol_type = other RNA
  modified_base 5: mod_base = OTHER; note = thymine
accattccctggagccacactcc

SEQ ID NO: 6094 - RNA, 23 nt, synthetic construct
  source 1..23: mol_type = other RNA
  modified_base 12: mod_base = OTHER; note = thymine
agcaaagctgatgacctcctccc

SEQ ID NO: 6095 - RNA, 23 nt, synthetic construct
  source 1..23: mol_type = other RNA
aagcaaagctgatgacctcctcc

SEQ ID NO: 6096 - RNA, 23 nt, synthetic construct
  source 1..23: mol_type = other RNA
  modified_base 2: mod_base = OTHER; note = thymine
atagcaaagctgatgacctcctc

SEQ ID NO: 6097 - RNA, 23 nt, synthetic construct
  source 1..23: mol_type = other RNA
  modified_base 12: mod_base = OTHER; note = thymine
agtagcaaagctgatgacctcct

SEQ ID NO: 6098 - RNA, 23 nt, synthetic construct
  source 1..23: mol_type = other RNA
aagtagcaaagctgatgacctcc

SEQ ID NO: 6099 - RNA, 23 nt, synthetic construct
  source 1..23: mol_type = other RNA
  modified_base 5: mod_base = OTHER; note = thymine
acagtagcaaagctgatgacctc

SEQ ID NO: 6100 - RNA, 23 nt, synthetic construct
  source 1..23: mol_type = other RNA
aacagtagcaaagctgatgacct

SEQ ID NO: 6101 - RNA, 23 nt, synthetic construct
  source 1..23: mol_type = other RNA
  modified_base 7: mod_base = OTHER; note = thymine
agacagtagcaaagctgatgacc

SEQ ID NO: 6102 - RNA, 23 nt, synthetic construct
  source 1..23: mol_type = other RNA
  modified_base 2: mod_base = OTHER; note = thymine
atgtgacagtagcaaagctgatg

SEQ ID NO: 6103 - RNA, 23 nt, synthetic construct
  source 1..23: mol_type = other RNA
  modified_base 5: mod_base = OTHER; note = thymine
actgtgacagtagcaaagctgat

SEQ ID NO: 6104 - RNA, 23 nt, synthetic construct
  source 1..23: mol_type = other RNA
  modified_base 2: mod_base = OTHER; note = thymine
  modified_base 12: mod_base = OTHER; note = thymine
atctgtgacagtagcaaagctga

SEQ ID NO: 6105 - RNA, 23 nt, synthetic construct
  source 1..23: mol_type = other RNA
  modified_base 5: mod_base = OTHER; note = thymine
  modified_base 7: mod_base = OTHER; note = thymine
agtctgtgacagtagcaaagctg

SEQ ID NO: 6106 - RNA, 23 nt, synthetic construct
  source 1..23: mol_type = other RNA
aagtctgtgacagtagcaaagct

SEQ ID NO: 6107 - RNA, 23 nt, synthetic construct
  source 1..23: mol_type = other RNA
  modified_base 5: mod_base = OTHER; note = thymine
  modified_base 7: mod_base = OTHER; note = thymine
agagtctgtgacagtagcaaagc

SEQ ID NO: 6108 - RNA, 23 nt, synthetic construct
  source 1..23: mol_type = other RNA
aggagtctgtgacagtagcaaag

SEQ ID NO: 6109 - RNA, 23 nt, synthetic construct
  source 1..23: mol_type = other RNA
  modified_base 2: mod_base = OTHER; note = thymine
  modified_base 7: mod_base = OTHER; note = thymine
atggagtctgtgacagtagcaaa

SEQ ID NO: 6110 - RNA, 23 nt, synthetic construct
  source 1..23: mol_type = other RNA
agaagtggagtctgtgacagtag

SEQ ID NO: 6111 - RNA, 23 nt, synthetic construct
  source 1..23: mol_type = other RNA
  modified_base 2: mod_base = OTHER; note = thymine
  modified_base 7: mod_base = OTHER; note = thymine
  modified_base 12: mod_base = OTHER; note = thymine
atgaagtggagtctgtgacagta

SEQ ID NO: 6112 - RNA, 23 nt, synthetic construct
  source 1..23: mol_type = other RNA
  modified_base 5: mod_base = OTHER; note = thymine
aggctgaagtggagtctgtgaca

SEQ ID NO: 6113 - RNA, 23 nt, synthetic construct
  source 1..23: mol_type = other RNA
aaggctgaagtggagtctgtgac

SEQ ID NO: 6114 - RNA, 23 nt, synthetic construct
  source 1..23: mol_type = other RNA
  modified_base 2: mod_base = OTHER; note = thymine
  modified_base 7: mod_base = OTHER; note = thymine
  modified_base 12: mod_base = OTHER; note = thymine
ataggctgaagtggagtctgtga

SEQ ID NO: 6115 - RNA, 23 nt, synthetic construct
  source 1..23: mol_type = other RNA
agtaggctgaagtggagtctgtg

SEQ ID NO: 6116 - RNA, 23 nt, synthetic construct
  source 1..23: mol_type = other RNA
  modified_base 2: mod_base = OTHER; note = thymine
atgtaggctgaagtggagtctgt

SEQ ID NO: 6117 - RNA, 23 nt, synthetic construct
  source 1..23: mol_type = other RNA
  modified_base 5: mod_base = OTHER; note = thymine
actgtaggctgaagtggagtctg

SEQ ID NO: 6118 - RNA, 23 nt, synthetic construct
  source 1..23: mol_type = other RNA
agctgtaggctgaagtggagtct

SEQ ID NO: 6119 - RNA, 23 nt, synthetic construct
  source 1..23: mol_type = other RNA
  modified_base 5: mod_base = OTHER; note = thymine
  modified_base 7: mod_base = OTHER; note = thymine
  modified_base 12: mod_base = OTHER; note = thymine
aagctgtaggctgaagtggagtc

SEQ ID NO: 6120 - RNA, 23 nt, synthetic construct
  source 1..23: mol_type = other RNA
  modified_base 7: mod_base = OTHER; note = thymine
aggagctgtaggctgaagtggag

SEQ ID NO: 6121 - RNA, 23 nt, synthetic construct
  source 1..23: mol_type = other RNA
agggagctgtaggctgaagtgga

SEQ ID NO: 6122 - RNA, 23 nt, synthetic construct
  source 1..23: mol_type = other RNA
aagggagctgtaggctgaagtgg

SEQ ID NO: 6123 - RNA, 23 nt, synthetic construct
  source 1..23: mol_type = other RNA
  modified_base 12: mod_base = OTHER; note = thymine
aagcagggagctgtaggctgaag

SEQ ID NO: 6124 - RNA, 23 nt, synthetic construct
  source 1..23: mol_type = other RNA
aaggcgggcatggtacaggtggt

SEQ ID NO: 6125 - RNA, 23 nt, synthetic construct
  source 1..23: mol_type = other RNA
aacaggcgggcatggtacaggtg

SEQ ID NO: 6126 - RNA, 23 nt, synthetic construct
  source 1..23: mol_type = other RNA
acacaggcgggcatggtacaggt

SEQ ID NO: 6127 - RNA, 23 nt, synthetic construct
  source 1..23: mol_type = other RNA
aaaagagtgccaggaagggtggg

SEQ ID NO: 6128 - RNA, 23 nt, synthetic construct
  source 1..23: mol_type = other RNA
acaaagagtgccaggaagggtgg

SEQ ID NO: 6129 - RNA, 23 nt, synthetic construct
  source 1..23: mol_type = other RNA
aagcaaagagtgccaggaagggt

SEQ ID NO: 6130 - RNA, 23 nt, synthetic construct
  source 1..23: mol_type = other RNA
  modified_base 12: mod_base = OTHER; note = thymine
aaagcaaagagtgccaggaaggg

SEQ ID NO: 6131 - RNA, 23 nt, synthetic construct
  source 1..23: mol_type = other RNA
acaagcaaagagtgccaggaagg

SEQ ID NO: 6132 - RNA, 23 nt, synthetic construct
  source 1..23: mol_type = other RNA
  modified_base 2: mod_base = OTHER; note = thymine
atcaagcaaagagtgccaggaag

SEQ ID NO: 6133 - RNA, 23 nt, synthetic construct
  source 1..23: mol_type = other RNA
actcaagcaaagagtgccaggaa

SEQ ID NO: 6134 - RNA, 23 nt, synthetic construct
  source 1..23: mol_type = other RNA
acctcaagcaaagagtgccagga

SEQ ID NO: 6135 - RNA, 23 nt, synthetic construct
  source 1..23: mol_type = other RNA
  modified_base 2: mod_base = OTHER; note = thymine
  modified_base 5: mod_base = OTHER; note = thymine
atcctcaagcaaagagtgccagg

SEQ ID NO: 6136 - RNA, 23 nt, synthetic construct
  source 1..23: mol_type = other RNA
aatcctcaagcaaagagtgccag

SEQ ID NO: 6137 - RNA, 23 nt, synthetic construct
  source 1..23: mol_type = other RNA
  modified_base 7: mod_base = OTHER; note = thymine
agatcctcaagcaaagagtgcca

SEQ ID NO: 6138 - RNA, 23 nt, synthetic construct
  source 1..23: mol_type = other RNA
aaagatcctcaagcaaagagtgc

SEQ ID NO: 6139 - RNA, 23 nt, synthetic construct
  source 1..23: mol_type = other RNA
  modified_base 7: mod_base = OTHER; note = thymine
agaagatcctcaagcaaagagtg

SEQ ID NO: 6140 - RNA, 23 nt, synthetic construct
  source 1..23: mol_type = other RNA
aggaagatcctcaagcaaagagt

SEQ ID NO: 6141 - RNA, 23 nt, synthetic construct
  source 1..23: mol_type = other RNA
  modified_base 2: mod_base = OTHER; note = thymine
atcggaagatcctcaagcaaaga

SEQ ID NO: 6142 - RNA, 23 nt, synthetic construct
  source 1..23: mol_type = other RNA
aatcggaagatcctcaagcaaag

SEQ ID NO: 6143 - RNA, 23 nt, synthetic construct
  source 1..23: mol_type = other RNA
  modified_base 12: mod_base = OTHER; note = thymine
acatcggaagatcctcaagcaaa

SEQ ID NO: 6144 - RNA, 23 nt, synthetic construct
  source 1..23: mol_type = other RNA
  modified_base 5: mod_base = OTHER; note = thymine
accatcggaagatcctcaagcaa

SEQ ID NO: 6145 - RNA, 23 nt, synthetic construct
  source 1..23: mol_type = other RNA
agtgatgtggtgctcagccagga

SEQ ID NO: 6146 - RNA, 23 nt, synthetic construct
  source 1..23: mol_type = other RNA
  modified_base 7: mod_base = OTHER; note = thymine
  modified_base 12: mod_base = OTHER; note = thymine
aggtgatgtggtgctcagccagg

SEQ ID NO: 6147 - RNA, 23 nt, synthetic construct
  source 1..23: mol_type = other RNA
  modified_base 2: mod_base = OTHER; note = thymine
  modified_base 5: mod_base = OTHER; note = thymine
atggtgatgtggtgctcagccag

SEQ ID NO: 6148 - RNA, 23 nt, synthetic construct
  source 1..23: mol_type = other RNA
  modified_base 2: mod_base = OTHER; note = thymine
attggtgatgtggtgctcagcca

SEQ ID NO: 6149 - RNA, 23 nt, synthetic construct
  source 1..23: mol_type = other RNA
  modified_base 7: mod_base = OTHER; note = thymine
  modified_base 12: mod_base = OTHER; note = thymine
agttggtgatgtggtgctcagcc

SEQ ID NO: 6150 - RNA, 23 nt, synthetic construct
  source 1..23: mol_type = other RNA
  modified_base 5: mod_base = OTHER; note = thymine
aggttggtgatgtggtgctcagc

SEQ ID NO: 6151 - RNA, 23 nt, synthetic construct
  source 1..23: mol_type = other RNA
  modified_base 5: mod_base = OTHER; note = thymine
  modified_base 12: mod_base = OTHER; note = thymine
aaggttggtgatgtggtgctcag

SEQ ID NO: 6152 - RNA, 23 nt, synthetic construct
  source 1..23: mol_type = other RNA
  modified_base 7: mod_base = OTHER; note = thymine
acaggttggtgatgtggtgctca

SEQ ID NO: 6153 - RNA, 23 nt, synthetic construct
  source 1..23: mol_type = other RNA
  modified_base 7: mod_base = OTHER; note = thymine
accaggttggtgatgtggtgctc

SEQ ID NO: 6154 - RNA, 23 nt, synthetic construct
  source 1..23: mol_type = other RNA
aagcccaggttggtgatgtggtg

SEQ ID NO: 6155 - RNA, 23 nt, synthetic construct
  source 1..23: mol_type = other RNA
  modified_base 12: mod_base = OTHER; note = thymine
acagcccaggttggtgatgtggt

SEQ ID NO: 6156 - RNA, 23 nt, synthetic construct
  source 1..23: mol_type = other RNA
  modified_base 12: mod_base = OTHER; note = thymine
accagcccaggttggtgatgtgg

SEQ ID NO: 6157 - RNA, 23 nt, synthetic construct
  source 1..23: mol_type = other RNA
  modified_base 2: mod_base = OTHER; note = thymine
atgccagcccaggttggtgatgt

SEQ ID NO: 6158 - RNA, 23 nt, synthetic construct
  source 1..23: mol_type = other RNA
aatgccagcccaggttggtgatg

SEQ ID NO: 6159 - RNA, 23 nt, synthetic construct
  source 1..23: mol_type = other RNA
  modified_base 2: mod_base = OTHER; note = thymine
atagagggcagagttaaggtatg

SEQ ID NO: 6160 - RNA, 23 nt, synthetic construct
  source 1..23: mol_type = other RNA
actagagggcagagttaaggtat

SEQ ID NO: 6161 - RNA, 23 nt, synthetic construct
  source 1..23: mol_type = other RNA
aactagagggcagagttaaggta

SEQ ID NO: 6162 - RNA, 23 nt, synthetic construct
  source 1..23: mol_type = other RNA
  modified_base 5: mod_base = OTHER; note = thymine
acactagagggcagagttaaggt

SEQ ID NO: 6163 - RNA, 23 nt, synthetic construct
  source 1..23: mol_type = other RNA
accactagagggcagagttaagg

SEQ ID NO: 6164 - RNA, 23 nt, synthetic construct
  source 1..23: mol_type = other RNA
  modified_base 7: mod_base = OTHER; note = thymine
agccactagagggcagagttaag

SEQ ID NO: 6165 - RNA, 23 nt, synthetic construct
  source 1..23: mol_type = other RNA
  modified_base 5: mod_base = OTHER; note = thymine
aagtttcaggacaccagacttct

SEQ ID NO: 6166 - RNA, 23 nt, synthetic construct
  source 1..23: mol_type = other RNA
  modified_base 5: mod_base = OTHER; note = thymine
  modified_base 7: mod_base = OTHER; note = thymine
acagtttcaggacaccagacttc

SEQ ID NO: 6167 - RNA, 23 nt, synthetic construct
  source 1..23: mol_type = other RNA
  modified_base 7: mod_base = OTHER; note = thymine
agcagtttcaggacaccagactt

SEQ ID NO: 6168 - RNA, 23 nt, synthetic construct
  source 1..23: mol_type = other RNA
  modified_base 2: mod_base = OTHER; note = thymine
  modified_base 7: mod_base = OTHER; note = thymine
atgcagtttcaggacaccagact

SEQ ID NO: 6169 - RNA, 23 nt, synthetic construct
  source 1..23: mol_type = other RNA
  modified_base 2: mod_base = OTHER; note = thymine
attgcagtttcaggacaccagac

SEQ ID NO: 6170 - RNA, 23 nt, synthetic construct
  source 1..23: mol_type = other RNA
agttgcagtttcaggacaccaga

SEQ ID NO: 6171 - RNA, 23 nt, synthetic construct
  source 1..23: mol_type = other RNA
  modified_base 5: mod_base = OTHER; note = thymine
  modified_base 12: mod_base = OTHER; note = thymine
aagttgcagtttcaggacaccag

SEQ ID NO: 6172 - RNA, 23 nt, synthetic construct
  source 1..23: mol_type = other RNA
  modified_base 2: mod_base = OTHER; note = thymine
  modified_base 5: mod_base = OTHER; note = thymine
  modified_base 12: mod_base = OTHER; note = thymine
atagttgcagtttcaggacacca

SEQ ID NO: 6173 - RNA, 23 nt, synthetic construct
  source 1..23: mol_type = other RNA
  modified_base 7: mod_base = OTHER; note = thymine
  modified_base 12: mod_base = OTHER; note = thymine
actagttgcagtttcaggacacc

SEQ ID NO: 6174 - RNA, 23 nt, synthetic construct
  source 1..23: mol_type = other RNA
  modified_base 2: mod_base = OTHER; note = thymine
  modified_base 7: mod_base = OTHER; note = thymine
atctagttgcagtttcaggacac

SEQ ID NO: 6175 - RNA, 23 nt, synthetic construct
  source 1..23: mol_type = other RNA
  modified_base 5: mod_base = OTHER; note = thymine
agtctagttgcagtttcaggaca

SEQ ID NO: 6176 - RNA, 23 nt, synthetic construct
  source 1..23: mol_type = other RNA
aagtctagttgcagtttcaggac

SEQ ID NO: 6177 - RNA, 23 nt, synthetic construct
  source 1..23: mol_type = other RNA
  modified_base 5: mod_base = OTHER; note = thymine
  modified_base 7: mod_base = OTHER; note = thymine
acagtctagttgcagtttcagga

SEQ ID NO: 6178 - RNA, 23 nt, synthetic construct
  source 1..23: mol_type = other RNA
  modified_base 12: mod_base = OTHER; note = thymine
agcagtctagttgcagtttcagg

SEQ ID NO: 6179 - RNA, 23 nt, synthetic construct
  source 1..23: mol_type = other RNA
  modified_base 2: mod_base = OTHER; note = thymine
  modified_base 7: mod_base = OTHER; note = thymine
  modified_base 12: mod_base = OTHER; note = thymine
atgcagtctagttgcagtttcag

SEQ ID NO: 6180 - RNA, 23 nt, synthetic construct
  source 1..23: mol_type = other RNA
actgcagtctagttgcagtttca

SEQ ID NO: 6181 - RNA, 23 nt, synthetic construct
  source 1..23: mol_type = other RNA
  modified_base 2: mod_base = OTHER; note = thymine
atctgcagtctagttgcagtttc

SEQ ID NO: 6182 - RNA, 23 nt, synthetic construct
  source 1..23: mol_type = other RNA
aggtctgcagtctagttgcagtt

SEQ ID NO: 6183 - RNA, 23 nt, synthetic construct
  source 1..23: mol_type = other RNA
  modified_base 12: mod_base = OTHER; note = thymine
accagtaactgtgctgttgcctt

SEQ ID NO: 6184 - RNA, 23 nt, synthetic construct
  source 1..23: mol_type = other RNA
  modified_base 2: mod_base = OTHER; note = thymine
  modified_base 7: mod_base = OTHER; note = thymine
atccagtaactgtgctgttgcct

SEQ ID NO: 6185 - RNA, 23 nt, synthetic construct
  source 1..23: mol_type = other RNA
  modified_base 12: mod_base = OTHER; note = thymine
agtccagtaactgtgctgttgcc

SEQ ID NO: 6186 - RNA, 23 nt, synthetic construct
  source 1..23: mol_type = other RNA
  modified_base 2: mod_base = OTHER; note = thymine
atgtccagtaactgtgctgttgc

SEQ ID NO: 6187 - RNA, 23 nt, synthetic construct
  source 1..23: mol_type = other RNA
  modified_base 2: mod_base = OTHER; note = thymine
  modified_base 5: mod_base = OTHER; note = thymine
attgtccagtaactgtgctgttg

SEQ ID NO: 6188 - RNA, 23 nt, synthetic construct
  source 1..23: mol_type = other RNA
agttgtccagtaactgtgctgtt

SEQ ID NO: 6189 - RNA, 23 nt, synthetic construct
  source 1..23: mol_type = other RNA
  modified_base 5: mod_base = OTHER; note = thymine
  modified_base 7: mod_base = OTHER; note = thymine
  modified_base 12: mod_base = OTHER; note = thymine
aggttgtccagtaactgtgctgt

SEQ ID NO: 6190 - RNA, 23 nt, synthetic construct
  source 1..23: mol_type = other RNA
  modified_base 12: mod_base = OTHER; note = thymine
aggtgtcctgctgtgtccaagag

SEQ ID NO: 6191 - RNA, 23 nt, synthetic construct
  source 1..23: mol_type = other RNA
  modified_base 2: mod_base = OTHER; note = thymine
  modified_base 5: mod_base = OTHER; note = thymine
  modified_base 7: mod_base = OTHER; note = thymine
atggtgtcctgctgtgtccaaga

SEQ ID NO: 6192 - RNA, 23 nt, synthetic construct
  source 1..23: mol_type = other RNA
actggtgtcctgctgtgtccaag

SEQ ID NO: 6193 - RNA, 23 nt, synthetic construct
  source 1..23: mol_type = other RNA
  modified_base 7: mod_base = OTHER; note = thymine
  modified_base 12: mod_base = OTHER; note = thymine
agctggtgtcctgctgtgtccaa

SEQ ID NO: 6194 - RNA, 23 nt, synthetic construct
  source 1..23: mol_type = other RNA
  modified_base 2: mod_base = OTHER; note = thymine
  modified_base 5: mod_base = OTHER; note = thymine
atgctggtgtcctgctgtgtcca

SEQ ID NO: 6195 - RNA, 23 nt, synthetic construct
  source 1..23: mol_type = other RNA
actgctggtgtcctgctgtgtcc

SEQ ID NO: 6196 - RNA, 23 nt, synthetic construct
  source 1..23: mol_type = other RNA
  modified_base 7: mod_base = OTHER; note = thymine
  modified_base 12: mod_base = OTHER; note = thymine
agctgctggtgtcctgctgtgtc

SEQ ID NO: 6197 - RNA, 23 nt, synthetic construct
  source 1..23: mol_type = other RNA
aaagggctgctggtgtcctgctg

SEQ ID NO: 6198 - RNA, 23 nt, synthetic construct
  source 1..23: mol_type = other RNA
aaggaagggctgctggtgtcctg

SEQ ID NO: 6199 - RNA, 23 nt, synthetic construct
  source 1..23: mol_type = other RNA
  modified_base 2: mod_base = OTHER; note = thymine
  modified_base 12: mod_base = OTHER; note = thymine
ataggaagggctgctggtgtcct

SEQ ID NO: 6200 - RNA, 23 nt, synthetic construct
  source 1..23: mol_type = other RNA
actaggaagggctgctggtgtcc

SEQ ID NO: 6201 - RNA, 23 nt, synthetic construct
  source 1..23: mol_type = other RNA
  modified_base 5: mod_base = OTHER; note = thymine
actctaggaagggctgctggtgt

SEQ ID NO: 6202 - RNA, 23 nt, synthetic construct
  source 1..23: mol_type = other RNA
agctctaggaagggctgctggtg

SEQ ID NO: 6203 - RNA, 23 nt, synthetic construct
  source 1..23: mol_type = other RNA
  modified_base 5: mod_base = OTHER; note = thymine
  modified_base 7: mod_base = OTHER; note = thymine
aagctctaggaagggctgctggt

SEQ ID NO: 6204 - RNA, 23 nt, synthetic construct
  source 1..23: mol_type = other RNA
  modified_base 2: mod_base = OTHER; note = thymine
  modified_base 7: mod_base = OTHER; note = thymine
ataagctctaggaagggctgctg

SEQ ID NO: 6205 - RNA, 23 nt, synthetic construct
  source 1..23: mol_type = other RNA
  modified_base 2: mod_base = OTHER; note = thymine
attaagctctaggaagggctgct

SEQ ID NO: 6206 - RNA, 23 nt, synthetic construct
  source 1..23: mol_type = other RNA
acttaagctctaggaagggctgc

SEQ ID NO: 6207 - RNA, 23 nt, synthetic construct
  source 1..23: mol_type = other RNA
  modified_base 2: mod_base = OTHER; note = thymine
  modified_base 5: mod_base = OTHER; note = thymine
  modified_base 12: mod_base = OTHER; note = thymine
atcttaagctctaggaagggctg

SEQ ID NO: 6208 - RNA, 23 nt, synthetic construct
  source 1..23: mol_type = other RNA
  modified_base 5: mod_base = OTHER; note = thymine
aatcttaagctctaggaagggct

SEQ ID NO: 6209 - RNA, 23 nt, synthetic construct
  source 1..23: mol_type = other RNA
  modified_base 7: mod_base = OTHER; note = thymine
  modified_base 12: mod_base = OTHER; note = thymine
agatcttaagctctaggaagggc

SEQ ID NO: 6210 - RNA, 23 nt, synthetic construct
  source 1..23: mol_type = other RNA
  modified_base 7: mod_base = OTHER; note = thymine
agttcctggaagtctacgtaatg

SEQ ID NO: 6211 - RNA, 23 nt, synthetic construct
  source 1..23: mol_type = other RNA
  modified_base 5: mod_base = OTHER; note = thymine
aagttcctggaagtctacgtaat

SEQ ID NO: 6212 - RNA, 23 nt, synthetic construct
  source 1..23: mol_type = other RNA
  modified_base 5: mod_base = OTHER; note = thymine
acagttcctggaagtctacgtaa

SEQ ID NO: 6213 - RNA, 23 nt, synthetic construct
  source 1..23: mol_type = other RNA
  modified_base 7: mod_base = OTHER; note = thymine
accagttcctggaagtctacgta

SEQ ID NO: 6214 - RNA, 23 nt, synthetic construct
  source 1..23: mol_type = other RNA
  modified_base 2: mod_base = OTHER; note = thymine
  modified_base 12: mod_base = OTHER; note = thymine
atcccagttcctggaagtctacg

SEQ ID NO: 6215 - RNA, 23 nt, synthetic construct
  source 1..23: mol_type = other RNA
aatcccagttcctggaagtctac

SEQ ID NO: 6216 - RNA, 23 nt, synthetic construct
  source 1..23: mol_type = other RNA
acatcccagttcctggaagtcta

SEQ ID NO: 6217 - RNA, 23 nt, synthetic construct
  source 1..23: mol_type = other RNA
  modified_base 5: mod_base = OTHER; note = thymine
  modified_base 12: mod_base = OTHER; note = thymine
accatcccagttcctggaagtct

SEQ ID NO: 6218 - RNA, 23 nt, synthetic construct
  source 1..23: mol_type = other RNA
  modified_base 12: mod_base = OTHER; note = thymine
agccatcccagttcctggaagtc

SEQ ID NO: 6219 - RNA, 23 nt, synthetic construct
  source 1..23: mol_type = other RNA
  modified_base 2: mod_base = OTHER; note = thymine
atcgggctgcagtatccagtccc

SEQ ID NO: 6220 - RNA, 23 nt, synthetic construct
  source 1..23: mol_type = other RNA
actcgggctgcagtatccagtcc

SEQ ID NO: 6221 - RNA, 23 nt, synthetic construct
  source 1..23: mol_type = other RNA
acctcgggctgcagtatccagtc

SEQ ID NO: 6222 - RNA, 23 nt, synthetic construct
  source 1..23: mol_type = other RNA
  modified_base 2: mod_base = OTHER; note = thymine
  modified_base 7: mod_base = OTHER; note = thymine
atgcagtaattcagctggtaccc

SEQ ID NO: 6223 - RNA, 23 nt, synthetic construct
  source 1..23: mol_type = other RNA
  modified_base 12: mod_base = OTHER; note = thymine
actgcagtaattcagctggtacc

SEQ ID NO: 6224 - RNA, 23 nt, synthetic construct
  source 1..23: mol_type = other RNA
  modified_base 12: mod_base = OTHER; note = thymine
aactgcagtaattcagctggtac

SEQ ID NO: 6225 - RNA, 23 nt, synthetic construct
  source 1..23: mol_type = other RNA
  modified_base 5: mod_base = OTHER; note = thymine
acactgcagtaattcagctggta

SEQ ID NO: 6226 - RNA, 23 nt, synthetic construct
  source 1..23: mol_type = other RNA
accactgcagtaattcagctggt

SEQ ID NO: 6227 - RNA, 23 nt, synthetic construct
  source 1..23: mol_type = other RNA
  modified_base 7: mod_base = OTHER; note = thymine
  modified_base 12: mod_base = OTHER; note = thymine
acccactgcagtaattcagctgg

SEQ ID NO: 6228 - RNA, 23 nt, synthetic construct
  source 1..23: mol_type = other RNA
agcccactgcagtaattcagctg

SEQ ID NO: 6229 - RNA, 23 nt, synthetic construct
  source 1..23: mol_type = other RNA
  modified_base 2: mod_base = OTHER; note = thymine
atgcccactgcagtaattcagct

SEQ ID NO: 6230 - RNA, 23 nt, synthetic construct
  source 1..23: mol_type = other RNA
actgcccactgcagtaattcagc

SEQ ID NO: 6231 - RNA, 23 nt, synthetic construct
  source 1..23: mol_type = other RNA
aactgcccactgcagtaattcag

SEQ ID NO: 6232 - RNA, 23 nt, synthetic construct
  source 1..23: mol_type = other RNA
aggaaagaggcagcaatgcctgg

SEQ ID NO: 6233 - RNA, 23 nt, synthetic construct
  source 1..23: mol_type = other RNA
  modified_base 2: mod_base = OTHER; note = thymine
atggaaagaggcagcaatgcctg

SEQ ID NO: 6234 - RNA, 23 nt, synthetic construct
  source 1..23: mol_type = other RNA
aatggaaagaggcagcaatgcct

SEQ ID NO: 6235 - RNA, 23 nt, synthetic construct
  source 1..23: mol_type = other RNA
aaatggaaagaggcagcaatgcc

SEQ ID NO: 6236 - RNA, 23 nt, synthetic construct
  source 1..23: mol_type = other RNA
  modified_base 5: mod_base = OTHER; note = thymine
agaatggaaagaggcagcaatgc

SEQ ID NO: 6237 - RNA, 23 nt, synthetic construct
  source 1..23: mol_type = other RNA
aagaatggaaagaggcagcaatg

SEQ ID NO: 6238 - RNA, 23 nt, synthetic construct
  source 1..23: mol_type = other RNA
  modified_base 7: mod_base = OTHER; note = thymine
acagaatggaaagaggcagcaat

SEQ ID NO: 6239 - RNA, 23 nt, synthetic construct
  source 1..23: mol_type = other RNA
agcagaatggaaagaggcagcaa

SEQ ID NO: 6240 - RNA, 23 nt, synthetic construct
  source 1..23: mol_type = other RNA
aggcagaatggaaagaggcagca

SEQ ID NO: 6241 - RNA, 23 nt, synthetic construct
  source 1..23: mol_type = other RNA
acggcagaatggaaagaggcagc

SEQ ID NO: 6242 - RNA, 23 nt, synthetic construct
  source 1..23: mol_type = other RNA
aacggcagaatggaaagaggcag

SEQ ID NO: 6243 - RNA, 23 nt, synthetic construct
  source 1..23: mol_type = other RNA
  modified_base 12: mod_base = OTHER; note = thymine
agacggcagaatggaaagaggca

SEQ ID NO: 6244 - RNA, 23 nt, synthetic construct
  source 1..23: mol_type = other RNA
aagacggcagaatggaaagaggc

SEQ ID NO: 6245 - RNA, 23 nt, synthetic construct
  source 1..23: mol_type = other RNA
aaagacggcagaatggaaagagg

SEQ ID NO: 6246 - RNA, 23 nt, synthetic construct
  source 1..23: mol_type = other RNA
agaagacggcagaatggaaagag

SEQ ID NO: 6247 - RNA, 23 nt, synthetic construct
  source 1..23: mol_type = other RNA
  modified_base 2: mod_base = OTHER; note = thymine
atgaagacggcagaatggaaaga

SEQ ID NO: 6248 - RNA, 23 nt, synthetic construct
  source 1..23: mol_type = other RNA
actgaagacggcagaatggaaag

SEQ ID NO: 6249 - RNA, 23 nt, synthetic construct
  source 1..23: mol_type = other RNA
agctgaagacggcagaatggaaa

SEQ ID NO: 6250 - RNA, 23 nt, synthetic construct
  source 1..23: mol_type = other RNA
  modified_base 5: mod_base = OTHER; note = thymine
aggctgaagacggcagaatggaa

SEQ ID NO: 6251 - RNA, 23 nt, synthetic construct
  source 1..23: mol_type = other RNA
aaggctgaagacggcagaatgga

SEQ ID NO: 6252 - RNA, 23 nt, synthetic construct
  source 1..23: mol_type = other RNA
aaggaggctgaagacggcagaat

SEQ ID NO: 6253 - RNA, 23 nt, synthetic construct
  source 1..23: mol_type = other RNA
  modified_base 2: mod_base = OTHER; note = thymine
atttgaggaggctgaagacggca

SEQ ID NO: 6254 - RNA, 23 nt, synthetic construct
  source 1..23: mol_type = other RNA
  modified_base 5: mod_base = OTHER; note = thymine
actttgaggaggctgaagacggc

SEQ ID NO: 6255 - RNA, 23 nt, synthetic construct
  source 1..23: mol_type = other RNA
  modified_base 5: mod_base = OTHER; note = thymine
agctttgaggaggctgaagacgg

SEQ ID NO: 6256 - RNA, 23 nt, synthetic construct
  source 1..23: mol_type = other RNA
  modified_base 5: mod_base = OTHER; note = thymine
  modified_base 7: mod_base = OTHER; note = thymine
aggctttgaggaggctgaagacg

SEQ ID NO: 6257 - RNA, 23 nt, synthetic construct
  source 1..23: mol_type = other RNA
  modified_base 2: mod_base = OTHER; note = thymine
  modified_base 7: mod_base = OTHER; note = thymine
atggctttgaggaggctgaagac

SEQ ID NO: 6258 - RNA, 23 nt, synthetic construct
  source 1..23: mol_type = other RNA
agttggctttgaggaggctgaag

SEQ ID NO: 6259 - RNA, 23 nt, synthetic construct
  source 1..23: mol_type = other RNA
  modified_base 2: mod_base = OTHER; note = thymine
  modified_base 5: mod_base = OTHER; note = thymine
atgttggctttgaggaggctgaa

SEQ ID NO: 6260 - RNA, 23 nt, synthetic construct
  source 1..23: mol_type = other RNA
  modified_base 2: mod_base = OTHER; note = thymine
  modified_base 5: mod_base = OTHER; note = thymine
  modified_base 12: mod_base = OTHER; note = thymine
attgttggctttgaggaggctga

SEQ ID NO: 6261 - RNA, 23 nt, synthetic construct
  source 1..23: mol_type = other RNA
  modified_base 7: mod_base = OTHER; note = thymine
  modified_base 12: mod_base = OTHER; note = thymine
aattgttggctttgaggaggctg

SEQ ID NO: 6262 - RNA, 23 nt, synthetic construct
  source 1..23: mol_type = other RNA
  modified_base 5: mod_base = OTHER; note = thymine
  modified_base 7: mod_base = OTHER; note = thymine
  modified_base 12: mod_base = OTHER; note = thymine
agattgttggctttgaggaggct

SEQ ID NO: 6263 - RNA, 23 nt, synthetic construct
  source 1..23: mol_type = other RNA
  modified_base 5: mod_base = OTHER; note = thymine
aggattgttggctttgaggaggc

SEQ ID NO: 6264 - RNA, 23 nt, synthetic construct
  source 1..23: mol_type = other RNA
  modified_base 7: mod_base = OTHER; note = thymine
aaggattgttggctttgaggagg

SEQ ID NO: 6265 - RNA, 23 nt, synthetic construct
  source 1..23: mol_type = other RNA
  modified_base 7: mod_base = OTHER; note = thymine
aaaggattgttggctttgaggag

SEQ ID NO: 6266 - RNA, 23 nt, synthetic construct
  source 1..23: mol_type = other RNA
  modified_base 12: mod_base = OTHER; note = thymine
acaaggattgttggctttgagga

SEQ ID NO: 6267 - RNA, 23 nt, synthetic construct
  source 1..23: mol_type = other RNA
  modified_base 12: mod_base = OTHER; note = thymine
aaggccaaggattgttggctttg

SEQ ID NO: 6268 - RNA, 23 nt, synthetic construct
  source 1..23: mol_type = other RNA
acaggccaaggattgttggcttt

SEQ ID NO: 6269 - RNA, 23 nt, synthetic construct
  source 1..23: mol_type = other RNA
agcaggccaaggattgttggctt

SEQ ID NO: 6270 - RNA, 23 nt, synthetic construct
  source 1..23: mol_type = other RNA
aggcaggccaaggattgttggct

SEQ ID NO: 6271 - RNA, 23 nt, synthetic construct
  source 1..23: mol_type = other RNA
actggcaggccaaggattgttgg

SEQ ID NO: 6272 - RNA, 23 nt, synthetic construct
  source 1..23: mol_type = other RNA
aactggcaggccaaggattgttg

SEQ ID NO: 6273 - RNA, 23 nt, synthetic construct
  source 1..23: mol_type = other RNA
aaggaggtactggcaggccaagg

SEQ ID NO: 6274 - RNA, 23 nt, synthetic construct
  source 1..23: mol_type = other RNA
  modified_base 2: mod_base = OTHER; note = thymine
atcgggcagtagggacacaacag

SEQ ID NO: 6275 - RNA, 23 nt, synthetic construct
  source 1..23: mol_type = other RNA
  modified_base 2: mod_base = OTHER; note = thymine
attcgggcagtagggacacaaca

SEQ ID NO: 6276 - RNA, 23 nt, synthetic construct
  source 1..23: mol_type = other RNA
  modified_base 12: mod_base = OTHER; note = thymine
acttcgggcagtagggacacaac

SEQ ID NO: 6277 - RNA, 23 nt, synthetic construct
  source 1..23: mol_type = other RNA
  modified_base 5: mod_base = OTHER; note = thymine
accttcgggcagtagggacacaa

SEQ ID NO: 6278 - RNA, 23 nt, synthetic construct
  source 1..23: mol_type = other RNA
  modified_base 5: mod_base = OTHER; note = thymine
agccttcgggcagtagggacaca

SEQ ID NO: 6279 - RNA, 23 nt, synthetic construct
  source 1..23: mol_type = other RNA
aatccaggtagaggagagagagg

SEQ ID NO: 6280 - RNA, 23 nt, synthetic construct
  source 1..23: mol_type = other RNA
agatccaggtagaggagagagag

SEQ ID NO: 6281 - RNA, 23 nt, synthetic construct
  source 1..23: mol_type = other RNA
  modified_base 2: mod_base = OTHER; note = thymine
  modified_base 5: mod_base = OTHER; note = thymine
atgatccaggtagaggagagaga

SEQ ID NO: 6282 - RNA, 23 nt, synthetic construct
  source 1..23: mol_type = other RNA
  modified_base 12: mod_base = OTHER; note = thymine
aatgatccaggtagaggagagag

SEQ ID NO: 6283 - RNA, 23 nt, synthetic construct
  source 1..23: mol_type = other RNA
  modified_base 2: mod_base = OTHER; note = thymine
  modified_base 7: mod_base = OTHER; note = thymine
atatgatccaggtagaggagaga

SEQ ID NO: 6284 - RNA, 23 nt, synthetic construct
  source 1..23: mol_type = other RNA
  modified_base 2: mod_base = OTHER; note = thymine
  modified_base 5: mod_base = OTHER; note = thymine
attatgatccaggtagaggagag

SEQ ID NO: 6285 - RNA, 23 nt, synthetic construct
  source 1..23: mol_type = other RNA
aattatgatccaggtagaggaga

SEQ ID NO: 6286 - RNA, 23 nt, synthetic construct
  source 1..23: mol_type = other RNA
  modified_base 5: mod_base = OTHER; note = thymine
  modified_base 7: mod_base = OTHER; note = thymine
acattatgatccaggtagaggag

SEQ ID NO: 6287 - RNA, 23 nt, synthetic construct
  source 1..23: mol_type = other RNA
  modified_base 5: mod_base = OTHER; note = thymine
accattatgatccaggtagagga

SEQ ID NO: 6288 - RNA, 23 nt, synthetic construct
  source 1..23: mol_type = other RNA
  modified_base 7: mod_base = OTHER; note = thymine
  modified_base 12: mod_base = OTHER; note = thymine
agccattatgatccaggtagagg

SEQ ID NO: 6289 - RNA, 23 nt, synthetic construct
  source 1..23: mol_type = other RNA
  modified_base 2: mod_base = OTHER; note = thymine
  modified_base 7: mod_base = OTHER; note = thymine
atgccattatgatccaggtagag

SEQ ID NO: 6290 - RNA, 23 nt, synthetic construct
  source 1..23: mol_type = other RNA
  modified_base 2: mod_base = OTHER; note = thymine
attgccattatgatccaggtaga

SEQ ID NO: 6291 - RNA, 23 nt, synthetic construct
  source 1..23: mol_type = other RNA
  modified_base 12: mod_base = OTHER; note = thymine
aattgccattatgatccaggtag

SEQ ID NO: 6292 - RNA, 23 nt, synthetic construct
  source 1..23: mol_type = other RNA
  modified_base 5: mod_base = OTHER; note = thymine
acattgccattatgatccaggta

SEQ ID NO: 6293 - RNA, 23 nt, synthetic construct
  source 1..23: mol_type = other RNA
  modified_base 5: mod_base = OTHER; note = thymine
  modified_base 12: mod_base = OTHER; note = thymine
aacattgccattatgatccaggt

SEQ ID NO: 6294 - RNA, 23 nt, synthetic construct
  source 1..23: mol_type = other RNA
  modified_base 7: mod_base = OTHER; note = thymine
  modified_base 12: mod_base = OTHER; note = thymine
acacattgccattatgatccagg

SEQ ID NO: 6295 - RNA, 23 nt, synthetic construct
  source 1..23: mol_type = other RNA
  modified_base 7: mod_base = OTHER; note = thymine
accacattgccattatgatccag

SEQ ID NO: 6296 - RNA, 23 nt, synthetic construct
  source 1..23: mol_type = other RNA
aaccacattgccattatgatcca

SEQ ID NO: 6297 - RNA, 23 nt, synthetic construct
  source 1..23: mol_type = other RNA
agaccacattgccattatgatcc

SEQ ID NO: 6298 - RNA, 23 nt, synthetic construct
  source 1..23: mol_type = other RNA
  modified_base 2: mod_base = OTHER; note = thymine
atgaccacattgccattatgatc

SEQ ID NO: 6299 - RNA, 23 nt, synthetic construct
  source 1..23: mol_type = other RNA
  modified_base 2: mod_base = OTHER; note = thymine
  modified_base 12: mod_base = OTHER; note = thymine
attgaccacattgccattatgat

SEQ ID NO: 6300 - RNA, 23 nt, synthetic construct
  source 1..23: mol_type = other RNA
  modified_base 12: mod_base = OTHER; note = thymine
acttgaccacattgccattatga

SEQ ID NO: 6301 - RNA, 23 nt, synthetic construct
  source 1..23: mol_type = other RNA
  modified_base 2: mod_base = OTHER; note = thymine
  modified_base 5: mod_base = OTHER; note = thymine
atcttgaccacattgccattatg

SEQ ID NO: 6302 - RNA, 23 nt, synthetic construct
  source 1..23: mol_type = other RNA
  modified_base 5: mod_base = OTHER; note = thymine
agtcttgaccacattgccattat

SEQ ID NO: 6303 - RNA, 23 nt, synthetic construct
  source 1..23: mol_type = other RNA
  modified_base 7: mod_base = OTHER; note = thymine
acgtcttgaccacattgccatta

SEQ ID NO: 6304 - RNA, 23 nt, synthetic construct
  source 1..23: mol_type = other RNA
  modified_base 5: mod_base = OTHER; note = thymine
  modified_base 7: mod_base = OTHER; note = thymine
accgtcttgaccacattgccatt

SEQ ID NO: 6305 - RNA, 23 nt, synthetic construct
  source 1..23: mol_type = other RNA
  modified_base 2: mod_base = OTHER; note = thymine
atccgtcttgaccacattgccat

SEQ ID NO: 6306 - RNA, 23 nt, synthetic construct
  source 1..23: mol_type = other RNA
  modified_base 7: mod_base = OTHER; note = thymine
aatccgtcttgaccacattgcca

SEQ ID NO: 6307 - RNA, 23 nt, synthetic construct
  source 1..23: mol_type = other RNA
acatccgtcttgaccacattgcc

SEQ ID NO: 6308 - RNA, 23 nt, synthetic construct
  source 1..23: mol_type = other RNA
  modified_base 5: mod_base = OTHER; note = thymine
  modified_base 12: mod_base = OTHER; note = thymine
aacatccgtcttgaccacattgc

SEQ ID NO: 6309 - RNA, 23 nt, synthetic construct
  source 1..23: mol_type = other RNA
  modified_base 12: mod_base = OTHER; note = thymine
acacatccgtcttgaccacattg

SEQ ID NO: 6310 - RNA, 23 nt, synthetic construct
  source 1..23: mol_type = other RNA
  modified_base 7: mod_base = OTHER; note = thymine
agcacatccgtcttgaccacatt

SEQ ID NO: 6311 - RNA, 23 nt, synthetic construct
  source 1..23: mol_type = other RNA
  modified_base 12: mod_base = OTHER; note = thymine
aggcacatccgtcttgaccacat

SEQ ID NO: 6312 - RNA, 23 nt, synthetic construct
  source 1..23: mol_type = other RNA
  modified_base 2: mod_base = OTHER; note = thymine
atggcacatccgtcttgaccaca

SEQ ID NO: 6313 - RNA, 23 nt, synthetic construct
  source 1..23: mol_type = other RNA
actggcacatccgtcttgaccac

SEQ ID NO: 6314 - RNA, 23 nt, synthetic construct
  source 1..23: mol_type = other RNA
  modified_base 2: mod_base = OTHER; note = thymine
atctggcacatccgtcttgacca

SEQ ID NO: 6315 - RNA, 23 nt, synthetic construct
  source 1..23: mol_type = other RNA
  modified_base 5: mod_base = OTHER; note = thymine
  modified_base 12: mod_base = OTHER; note = thymine
aatctggcacatccgtcttgacc

SEQ ID NO: 6316 - RNA, 23 nt, synthetic construct
  source 1..23: mol_type = other RNA
  modified_base 2: mod_base = OTHER; note = thymine
atatctggcacatccgtcttgac

SEQ ID NO: 6317 - RNA, 23 nt, synthetic construct
  source 1..23: mol_type = other RNA
  modified_base 5: mod_base = OTHER; note = thymine
  modified_base 7: mod_base = OTHER; note = thymine
aatatctggcacatccgtcttga

SEQ ID NO: 6318 - RNA, 23 nt, synthetic construct
  source 1..23: mol_type = other RNA
acatatctggcacatccgtcttg

SEQ ID NO: 6319 - RNA, 23 nt, synthetic construct
  source 1..23: mol_type = other RNA
  modified_base 5: mod_base = OTHER; note = thymine
  modified_base 7: mod_base = OTHER; note = thymine
accatatctggcacatccgtctt

SEQ ID NO: 6320 - RNA, 23 nt, synthetic construct
  source 1..23: mol_type = other RNA
aaccatatctggcacatccgtct

SEQ ID NO: 6321 - RNA, 23 nt, synthetic construct
  source 1..23: mol_type = other RNA
  modified_base 7: mod_base = OTHER; note = thymine
acaccatatctggcacatccgtc

SEQ ID NO: 6322 - RNA, 23 nt, synthetic construct
  source 1..23: mol_type = other RNA
aaccaccatatctggcacatccg

SEQ ID NO: 6323 - RNA, 23 nt, synthetic construct
  source 1..23: mol_type = other RNA
  modified_base 12: mod_base = OTHER; note = thymine
acaccaccatatctggcacatcc

SEQ ID NO: 6324 - RNA, 23 nt, synthetic construct
  source 1..23: mol_type = other RNA
accaccaccatatctggcacatc

SEQ ID NO: 6325 - RNA, 23 nt, synthetic construct
  source 1..23: mol_type = other RNA
  modified_base 2: mod_base = OTHER; note = thymine
  modified_base 12: mod_base = OTHER; note = thymine
atccaccaccatatctggcacat

SEQ ID NO: 6326 - RNA, 23 nt, synthetic construct
  source 1..23: mol_type = other RNA
actccaccaccatatctggcaca

SEQ ID NO: 6327 - RNA, 23 nt, synthetic construct
  source 1..23: mol_type = other RNA
  modified_base 5: mod_base = OTHER; note = thymine
agcctccaccaccatatctggca

SEQ ID NO: 6328 - RNA, 23 nt, synthetic construct
  source 1..23: mol_type = other RNA
  modified_base 12: mod_base = OTHER; note = thymine
agccacaggcctccaccaccata

SEQ ID NO: 6329 - RNA, 23 nt, synthetic construct
  source 1..23: mol_type = other RNA
aagccacaggcctccaccaccat

SEQ ID NO: 6330 - RNA, 23 nt, synthetic construct
  source 1..23: mol_type = other RNA
  modified_base 2: mod_base = OTHER; note = thymine
atagctgcagccacaggcctcca

SEQ ID NO: 6331 - RNA, 23 nt, synthetic construct
  source 1..23: mol_type = other RNA
  modified_base 2: mod_base = OTHER; note = thymine
  modified_base 5: mod_base = OTHER; note = thymine
atgctagctgcagccacaggcct

SEQ ID NO: 6332 - RNA, 23 nt, synthetic construct
  source 1..23: mol_type = other RNA
  modified_base 2: mod_base = OTHER; note = thymine
attgctagctgcagccacaggcc

SEQ ID NO: 6333 - RNA, 23 nt, synthetic construct
  source 1..23: mol_type = other RNA
  modified_base 7: mod_base = OTHER; note = thymine
acttgctagctgcagccacaggc

SEQ ID NO: 6334 - RNA, 23 nt, synthetic construct
  source 1..23: mol_type = other RNA
  modified_base 2: mod_base = OTHER; note = thymine
  modified_base 5: mod_base = OTHER; note = thymine
  modified_base 12: mod_base = OTHER; note = thymine
atcttgctagctgcagccacagg

SEQ ID NO: 6335 - RNA, 23 nt, synthetic construct
  source 1..23: mol_type = other RNA
  modified_base 5: mod_base = OTHER; note = thymine
actcttgctagctgcagccacag

SEQ ID NO: 6336 - RNA, 23 nt, synthetic construct
  source 1..23: mol_type = other RNA
  modified_base 7: mod_base = OTHER; note = thymine
acctcttgctagctgcagccaca

SEQ ID NO: 6337 - RNA, 23 nt, synthetic construct
  source 1..23: mol_type = other RNA
  modified_base 2: mod_base = OTHER; note = thymine
  modified_base 5: mod_base = OTHER; note = thymine
  modified_base 7: mod_base = OTHER; note = thymine
atcctcttgctagctgcagccac

SEQ ID NO: 6338 - RNA, 23 nt, synthetic construct
  source 1..23: mol_type = other RNA
  modified_base 12: mod_base = OTHER; note = thymine
agtcctcttgctagctgcagcca

SEQ ID NO: 6339 - RNA, 23 nt, synthetic construct
  source 1..23: mol_type = other RNA
  modified_base 7: mod_base = OTHER; note = thymine
aggtcctcttgctagctgcagcc

SEQ ID NO: 6340 - RNA, 23 nt, synthetic construct
  source 1..23: mol_type = other RNA
  modified_base 5: mod_base = OTHER; note = thymine
aaggtcctcttgctagctgcagc

SEQ ID NO: 6341 - RNA, 23 nt, synthetic construct
  source 1..23: mol_type = other RNA
  modified_base 12: mod_base = OTHER; note = thymine
acaggtcctcttgctagctgcag

SEQ ID NO: 6342 - RNA, 23 nt, synthetic construct
  source 1..23: mol_type = other RNA
  modified_base 7: mod_base = OTHER; note = thymine
  modified_base 12: mod_base = OTHER; note = thymine
accaggtcctcttgctagctgca

SEQ ID NO: 6343 - RNA, 23 nt, synthetic construct
  source 1..23: mol_type = other RNA
  modified_base 2: mod_base = OTHER; note = thymine
  modified_base 5: mod_base = OTHER; note = thymine
  modified_base 7: mod_base = OTHER; note = thymine
atggtctcttcactccaaagccc

SEQ ID NO: 6344 - RNA, 23 nt, synthetic construct
  source 1..23: mol_type = other RNA
  modified_base 2: mod_base = OTHER; note = thymine
attggtctcttcactccaaagcc

SEQ ID NO: 6345 - RNA, 23 nt, synthetic construct
  source 1..23: mol_type = other RNA
  modified_base 7: mod_base = OTHER; note = thymine
  modified_base 12: mod_base = OTHER; note = thymine
acttggtctcttcactccaaagc

SEQ ID NO: 6346 - RNA, 23 nt, synthetic construct
  source 1..23: mol_type = other RNA
  modified_base 5: mod_base = OTHER; note = thymine
aatcttggtctcttcactccaaa

SEQ ID NO: 6347 - RNA, 23 nt, synthetic construct
  source 1..23: mol_type = other RNA
  modified_base 7: mod_base = OTHER; note = thymine
  modified_base 12: mod_base = OTHER; note = thymine
acatcttggtctcttcactccaa

SEQ ID NO: 6348 - RNA, 23 nt, synthetic construct
  source 1..23: mol_type = other RNA
  modified_base 2: mod_base = OTHER; note = thymine
  modified_base 5: mod_base = OTHER; note = thymine
  modified_base 7: mod_base = OTHER; note = thymine
atcatcttggtctcttcactcca

SEQ ID NO: 6349 - RNA, 23 nt, synthetic construct
  source 1..23: mol_type = other RNA
  modified_base 5: mod_base = OTHER; note = thymine
aacttcatcttggtctcttcact

SEQ ID NO: 6350 - RNA, 23 nt, synthetic construct
  source 1..23: mol_type = other RNA
  modified_base 7: mod_base = OTHER; note = thymine
  modified_base 12: mod_base = OTHER; note = thymine
aaaacttcatcttggtctcttca

SEQ ID NO: 6351 - RNA, 23 nt, synthetic construct
  source 1..23: mol_type = other RNA
  modified_base 7: mod_base = OTHER; note = thymine
agaaacttcatcttggtctcttc

SEQ ID NO: 6352 - RNA, 23 nt, synthetic construct
  source 1..23: mol_type = other RNA
  modified_base 12: mod_base = OTHER; note = thymine
aggaaacttcatcttggtctctt

SEQ ID NO: 6353 - RNA, 23 nt, synthetic construct
  source 1..23: mol_type = other RNA
agggaaacttcatcttggtctct

SEQ ID NO: 6354 - RNA, 23 nt, synthetic construct
  source 1..23: mol_type = other RNA
  modified_base 2: mod_base = OTHER; note = thymine
atgggaaacttcatcttggtctc

SEQ ID NO: 6355 - RNA, 23 nt, synthetic construct
  source 1..23: mol_type = other RNA
  modified_base 12: mod_base = OTHER; note = thymine
actgggaaacttcatcttggtct

SEQ ID NO: 6356 - RNA, 23 nt, synthetic construct
  source 1..23: mol_type = other RNA
  modified_base 12: mod_base = OTHER; note = thymine
acctgggaaacttcatcttggtc

SEQ ID NO: 6357 - RNA, 23 nt, synthetic construct
  source 1..23: mol_type = other RNA
  modified_base 5: mod_base = OTHER; note = thymine
agcctgggaaacttcatcttggt

SEQ ID NO: 6358 - RNA, 23 nt, synthetic construct
  source 1..23: mol_type = other RNA
  modified_base 2: mod_base = OTHER; note = thymine
atgcctgggaaacttcatcttgg

SEQ ID NO: 6359 - RNA, 23 nt, synthetic construct
  source 1..23: mol_type = other RNA
  modified_base 7: mod_base = OTHER; note = thymine
agtgcctgggaaacttcatcttg

SEQ ID NO: 6360 - RNA, 23 nt, synthetic construct
  source 1..23: mol_type = other RNA
  modified_base 2: mod_base = OTHER; note = thymine
atgtgcctgggaaacttcatctt

SEQ ID NO: 6361 - RNA, 23 nt, synthetic construct
  source 1..23: mol_type = other RNA
  modified_base 5: mod_base = OTHER; note = thymine
actgtgcctgggaaacttcatct

SEQ ID NO: 6362 - RNA, 23 nt, synthetic construct
  source 1..23: mol_type = other RNA
  modified_base 5: mod_base = OTHER; note = thymine
  modified_base 7: mod_base = OTHER; note = thymine
accctgtgcctgggaaacttcat

SEQ ID NO: 6363 - RNA, 23 nt, synthetic construct
  source 1..23: mol_type = other RNA
  modified_base 12: mod_base = OTHER; note = thymine
agccctgtgcctgggaaacttca

SEQ ID NO: 6364 - RNA, 23 nt, synthetic construct
  source 1..23: mol_type = other RNA
aatgccctgtgcctgggaaactt

SEQ ID NO: 6365 - RNA, 23 nt, synthetic construct
  source 1..23: mol_type = other RNA
agatgccctgtgcctgggaaact

SEQ ID NO: 6366 - RNA, 23 nt, synthetic construct
  source 1..23: mol_type = other RNA
  modified_base 5: mod_base = OTHER; note = thymine
  modified_base 12: mod_base = OTHER; note = thymine
aagatgccctgtgcctgggaaac

SEQ ID NO: 6367 - RNA, 23 nt, synthetic construct
  source 1..23: mol_type = other RNA
acagatgccctgtgcctgggaaa

SEQ ID NO: 6368 - RNA, 23 nt, synthetic construct
  source 1..23: mol_type = other RNA
  modified_base 12: mod_base = OTHER; note = thymine
agccaggtggttgttgggttggg

SEQ ID NO: 6369 - RNA, 23 nt, synthetic construct
  source 1..23: mol_type = other RNA
  modified_base 2: mod_base = OTHER; note = thymine
  modified_base 12: mod_base = OTHER; note = thymine
atgccaggtggttgttgggttgg

SEQ ID NO: 6370 - RNA, 23 nt, synthetic construct
  source 1..23: mol_type = other RNA
  modified_base 2: mod_base = OTHER; note = thymine
attgccaggtggttgttgggttg

SEQ ID NO: 6371 - RNA, 23 nt, synthetic construct
  source 1..23: mol_type = other RNA
aattgccaggtggttgttgggtt

SEQ ID NO: 6372 - RNA, 23 nt, synthetic construct
  source 1..23: mol_type = other RNA
  modified_base 2: mod_base = OTHER; note = thymine
  modified_base 5: mod_base = OTHER; note = thymine
  modified_base 12: mod_base = OTHER; note = thymine
atattgccaggtggttgttgggt

SEQ ID NO: 6373 - RNA, 23 nt, synthetic construct
  source 1..23: mol_type = other RNA
  modified_base 5: mod_base = OTHER; note = thymine
aatattgccaggtggttgttggg

SEQ ID NO: 6374 - RNA, 23 nt, synthetic construct
  source 1..23: mol_type = other RNA
  modified_base 7: mod_base = OTHER; note = thymine
acatattgccaggtggttgttgg

SEQ ID NO: 6375 - RNA, 23 nt, synthetic construct
  source 1..23: mol_type = other RNA
  modified_base 2: mod_base = OTHER; note = thymine
  modified_base 5: mod_base = OTHER; note = thymine
  modified_base 7: mod_base = OTHER; note = thymine
atcatattgccaggtggttgttg

SEQ ID NO: 6376 - RNA, 23 nt, synthetic construct
  source 1..23: mol_type = other RNA
agtcatattgccaggtggttgtt

SEQ ID NO: 6377 - RNA, 23 nt, synthetic construct
  source 1..23: mol_type = other RNA
  modified_base 7: mod_base = OTHER; note = thymine
aagtcatattgccaggtggttgt

SEQ ID NO: 6378 - RNA, 23 nt, synthetic construct
  source 1..23: mol_type = other RNA
  modified_base 5: mod_base = OTHER; note = thymine
agagtcatattgccaggtggttg

SEQ ID NO: 6379 - RNA, 23 nt, synthetic construct
  source 1..23: mol_type = other RNA
  modified_base 2: mod_base = OTHER; note = thymine
  modified_base 12: mod_base = OTHER; note = thymine
atgagtcatattgccaggtggtt

SEQ ID NO: 6380 - RNA, 23 nt, synthetic construct
  source 1..23: mol_type = other RNA
  modified_base 7: mod_base = OTHER; note = thymine
  modified_base 12: mod_base = OTHER; note = thymine
agtgagtcatattgccaggtggt

SEQ ID NO: 6381 - RNA, 23 nt, synthetic construct
  source 1..23: mol_type = other RNA
aagtgagtcatattgccaggtgg

SEQ ID NO: 6382 - RNA, 23 nt, synthetic construct
  source 1..23: mol_type = other RNA
  modified_base 5: mod_base = OTHER; note = thymine
  modified_base 12: mod_base = OTHER; note = thymine
aaagtgagtcatattgccaggtg

SEQ ID NO: 6383 - RNA, 23 nt, synthetic construct
  source 1..23: mol_type = other RNA
acaagtgagtcatattgccaggt

SEQ ID NO: 6384 - RNA, 23 nt, synthetic construct
  source 1..23: mol_type = other RNA
  modified_base 2: mod_base = OTHER; note = thymine
  modified_base 7: mod_base = OTHER; note = thymine
atcaagtgagtcatattgccagg

SEQ ID NO: 6385 - RNA, 23 nt, synthetic construct
  source 1..23: mol_type = other RNA
  modified_base 12: mod_base = OTHER; note = thymine
agtcaagtgagtcatattgccag

SEQ ID NO: 6386 - RNA, 23 nt, synthetic construct
  source 1..23: mol_type = other RNA
aggtcaagtgagtcatattgcca

SEQ ID NO: 6387 - RNA, 23 nt, synthetic construct
  source 1..23: mol_type = other RNA
  modified_base 7: mod_base = OTHER; note = thymine
agaaagtgcccatttgggtccca

SEQ ID NO: 6388 - RNA, 23 nt, synthetic construct
  source 1..23: mol_type = other RNA
aaagaaagtgcccatttgggtcc

SEQ ID NO: 6389 - RNA, 23 nt, synthetic construct
  source 1..23: mol_type = other RNA
acaagaaagtgcccatttgggtc

SEQ ID NO: 6390 - RNA, 23 nt, synthetic construct
  source 1..23: mol_type = other RNA
aacaagaaagtgcccatttgggt

SEQ ID NO: 6391 - RNA, 23 nt, synthetic construct
  source 1..23: mol_type = other RNA
  modified_base 12: mod_base = OTHER; note = thymine
agacaagaaagtgcccatttggg

SEQ ID NO: 6392 - RNA, 23 nt, synthetic construct
  source 1..23: mol_type = other RNA
aagacaagaaagtgcccatttgg

SEQ ID NO: 6393 - RNA, 23 nt, synthetic construct
  source 1..23: mol_type = other RNA
  modified_base 2: mod_base = OTHER; note = thymine
atcagacaagaaagtgcccattt

SEQ ID NO: 6394 - RNA, 23 nt, synthetic construct
  source 1..23: mol_type = other RNA
actcagacaagaaagtgcccatt

SEQ ID NO: 6395 - RNA, 23 nt, synthetic construct
  source 1..23: mol_type = other RNA
  modified_base 2: mod_base = OTHER; note = thymine
atctcagacaagaaagtgcccat

SEQ ID NO: 6396 - RNA, 23 nt, synthetic construct
  source 1..23: mol_type = other RNA
  modified_base 5: mod_base = OTHER; note = thymine
agtctcagacaagaaagtgccca

SEQ ID NO: 6397 - RNA, 23 nt, synthetic construct
  source 1..23: mol_type = other RNA
aagtctcagacaagaaagtgccc

SEQ ID NO: 6398 - RNA, 23 nt, synthetic construct
  source 1..23: mol_type = other RNA
  modified_base 5: mod_base = OTHER; note = thymine
  modified_base 7: mod_base = OTHER; note = thymine
agagtctcagacaagaaagtgcc

SEQ ID NO: 6399 - RNA, 23 nt, synthetic construct
  source 1..23: mol_type = other RNA
  modified_base 7: mod_base = OTHER; note = thymine
acagagtctcagacaagaaagtg

SEQ ID NO: 6400 - RNA, 23 nt, synthetic construct
  source 1..23: mol_type = other RNA
accagagtctcagacaagaaagt

SEQ ID NO: 6401 - RNA, 23 nt, synthetic construct
  source 1..23: mol_type = other RNA
agccagagtctcagacaagaaag

SEQ ID NO: 6402 - RNA, 23 nt, synthetic construct
  source 1..23: mol_type = other RNA
  modified_base 12: mod_base = OTHER; note = thymine
aagccagagtctcagacaagaaa

SEQ ID NO: 6403 - RNA, 23 nt, synthetic construct
  source 1..23: mol_type = other RNA
aaagccagagtctcagacaagaa

SEQ ID NO: 6404 - RNA, 23 nt, synthetic construct
  source 1..23: mol_type = other RNA
  modified_base 5: mod_base = OTHER; note = thymine
aacatcagccaacctggaataag

SEQ ID NO: 6405 - RNA, 23 nt, synthetic construct
  source 1..23: mol_type = other RNA
acacatcagccaacctggaataa

SEQ ID NO: 6406 - RNA, 23 nt, synthetic construct
  source 1..23: mol_type = other RNA
  modified_base 7: mod_base = OTHER; note = thymine
aacacatcagccaacctggaata

SEQ ID NO: 6407 - RNA, 23 nt, synthetic construct
  source 1..23: mol_type = other RNA
acaacacatcagccaacctggaa

SEQ ID NO: 6408 - RNA, 23 nt, synthetic construct
  source 1..23: mol_type = other RNA
accaacacatcagccaacctgga

SEQ ID NO: 6409 - RNA, 23 nt, synthetic construct
  source 1..23: mol_type = other RNA
  modified_base 7: mod_base = OTHER; note = thymine
aaggacttagggcaggaaatcat

SEQ ID NO: 6410 - RNA, 23 nt, synthetic construct
  source 1..23: mol_type = other RNA
aacaggacttagggcaggaaatc

SEQ ID NO: 6411 - RNA, 23 nt, synthetic construct
  source 1..23: mol_type = other RNA
  modified_base 7: mod_base = OTHER; note = thymine
acctagtccctgacatcttctca

SEQ ID NO: 6412 - RNA, 23 nt, synthetic construct
  source 1..23: mol_type = other RNA
  modified_base 5: mod_base = OTHER; note = thymine
  modified_base 12: mod_base = OTHER; note = thymine
accctagtccctgacatcttctc

SEQ ID NO: 6413 - RNA, 23 nt, synthetic construct
  source 1..23: mol_type = other RNA
  modified_base 2: mod_base = OTHER; note = thymine
atccctagtccctgacatcttct

SEQ ID NO: 6414 - RNA, 23 nt, synthetic construct
  source 1..23: mol_type = other RNA
  modified_base 7: mod_base = OTHER; note = thymine
actccctagtccctgacatcttc

SEQ ID NO: 6415 - RNA, 23 nt, synthetic construct
  source 1..23: mol_type = other RNA
acctccctagtccctgacatctt

SEQ ID NO: 6416 - RNA, 23 nt, synthetic construct
  source 1..23: mol_type = other RNA
  modified_base 5: mod_base = OTHER; note = thymine
  modified_base 12: mod_base = OTHER; note = thymine
accctccctagtccctgacatct

SEQ ID NO: 6417 - RNA, 23 nt, synthetic construct
  source 1..23: mol_type = other RNA
acatctatctgcttcctcctccc

SEQ ID NO: 6418 - RNA, 23 nt, synthetic construct
  source 1..23: mol_type = other RNA
  modified_base 5: mod_base = OTHER; note = thymine
  modified_base 7: mod_base = OTHER; note = thymine
accatctatctgcttcctcctcc

SEQ ID NO: 6419 - RNA, 23 nt, synthetic construct
  source 1..23: mol_type = other RNA
  modified_base 12: mod_base = OTHER; note = thymine
aaccatctatctgcttcctcctc

SEQ ID NO: 6420 - RNA, 23 nt, synthetic construct
  source 1..23: mol_type = other RNA
  modified_base 7: mod_base = OTHER; note = thymine
agaccatctatctgcttcctcct

SEQ ID NO: 6421 - RNA, 23 nt, synthetic construct
  source 1..23: mol_type = other RNA
  modified_base 12: mod_base = OTHER; note = thymine
aggaccatctatctgcttcctcc

SEQ ID NO: 6422 - RNA, 23 nt, synthetic construct
  source 1..23: mol_type = other RNA
  modified_base 2: mod_base = OTHER; note = thymine
atggaccatctatctgcttcctc

SEQ ID NO: 6423 - RNA, 23 nt, synthetic construct
  source 1..23: mol_type = other RNA
  modified_base 12: mod_base = OTHER; note = thymine
actggaccatctatctgcttcct

SEQ ID NO: 6424 - RNA, 23 nt, synthetic construct
  source 1..23: mol_type = other RNA
agctggaccatctatctgcttcc

SEQ ID NO: 6425 - RNA, 23 nt, synthetic construct
  source 1..23: mol_type = other RNA
  modified_base 2: mod_base = OTHER; note = thymine
  modified_base 5: mod_base = OTHER; note = thymine
  modified_base 12: mod_base = OTHER; note = thymine
atgctggaccatctatctgcttc

SEQ ID NO: 6426 - RNA, 23 nt, synthetic construct
  source 1..23: mol_type = other RNA
actgctggaccatctatctgctt

SEQ ID NO: 6427 - RNA, 23 nt, synthetic construct
  source 1..23: mol_type = other RNA
  modified_base 7: mod_base = OTHER; note = thymine
acctgctggaccatctatctgct

SEQ ID NO: 6428 - RNA, 23 nt, synthetic construct
  source 1..23: mol_type = other RNA
  modified_base 5: mod_base = OTHER; note = thymine
agcctgctggaccatctatctgc

SEQ ID NO: 6429 - RNA, 23 nt, synthetic construct
  source 1..23: mol_type = other RNA
aagcctgctggaccatctatctg

SEQ ID NO: 6430 - RNA, 23 nt, synthetic construct
  source 1..23: mol_type = other RNA
  modified_base 7: mod_base = OTHER; note = thymine
aaagcctgctggaccatctatct

SEQ ID NO: 6431 - RNA, 23 nt, synthetic construct
  source 1..23: mol_type = other RNA
acaagcctgctggaccatctatc

SEQ ID NO: 6432 - RNA, 23 nt, synthetic construct
  source 1..23: mol_type = other RNA
  modified_base 2: mod_base = OTHER; note = thymine
  modified_base 12: mod_base = OTHER; note = thymine
atcaagcctgctggaccatctat

SEQ ID NO: 6433 - RNA, 23 nt, synthetic construct
  source 1..23: mol_type = other RNA
  modified_base 2: mod_base = OTHER; note = thymine
attcaagcctgctggaccatcta

SEQ ID NO: 6434 - RNA, 23 nt, synthetic construct
  source 1..23: mol_type = other RNA
acttcaagcctgctggaccatct

SEQ ID NO: 6435 - RNA, 23 nt, synthetic construct
  source 1..23: mol_type = other RNA
  modified_base 5: mod_base = OTHER; note = thymine
  modified_base 12: mod_base = OTHER; note = thymine
agcttcaagcctgctggaccatc

SEQ ID NO: 6436 - RNA, 23 nt, synthetic construct
  source 1..23: mol_type = other RNA
  modified_base 2: mod_base = OTHER; note = thymine
  modified_base 5: mod_base = OTHER; note = thymine
atgcttcaagcctgctggaccat

SEQ ID NO: 6437 - RNA, 23 nt, synthetic construct
  source 1..23: mol_type = other RNA
  modified_base 7: mod_base = OTHER; note = thymine
actgcttcaagcctgctggacca

SEQ ID NO: 6438 - RNA, 23 nt, synthetic construct
  source 1..23: mol_type = other RNA
  modified_base 12: mod_base = OTHER; note = thymine
acccatctccctcttgaccttcc

SEQ ID NO: 6439 - RNA, 23 nt, synthetic construct
  source 1..23: mol_type = other RNA
  modified_base 7: mod_base = OTHER; note = thymine
agcccatctccctcttgaccttc

SEQ ID NO: 6440 - RNA, 23 nt, synthetic construct
  source 1..23: mol_type = other RNA
  modified_base 2: mod_base = OTHER; note = thymine
atgcccatctccctcttgacctt

SEQ ID NO: 6441 - RNA, 23 nt, synthetic construct
  source 1..23: mol_type = other RNA
  modified_base 2: mod_base = OTHER; note = thymine
attgcccatctccctcttgacct

SEQ ID NO: 6442 - RNA, 23 nt, synthetic construct
  source 1..23: mol_type = other RNA
  modified_base 12: mod_base = OTHER; note = thymine
acttgcccatctccctcttgacc

SEQ ID NO: 6443 - RNA, 23 nt, synthetic construct
  source 1..23: mol_type = other RNA
  modified_base 2: mod_base = OTHER; note = thymine
ataagcatcctccctcagcgcct

SEQ ID NO: 6444 - RNA, 23 nt, synthetic construct
  source 1..23: mol_type = other RNA
  modified_base 12: mod_base = OTHER; note = thymine
actaagcatcctccctcagcgcc

SEQ ID NO: 6445 - RNA, 23 nt, synthetic construct
  source 1..23: mol_type = other RNA
  modified_base 7: mod_base = OTHER; note = thymine
agaacttcttaggcttagtgcct

SEQ ID NO: 6446 - RNA, 23 nt, synthetic construct
  source 1..23: mol_type = other RNA
  modified_base 7: mod_base = OTHER; note = thymine
aggaacttcttaggcttagtgcc

SEQ ID NO: 6447 - RNA, 23 nt, synthetic construct
  source 1..23: mol_type = other RNA
  modified_base 2: mod_base = OTHER; note = thymine
  modified_base 12: mod_base = OTHER; note = thymine
atgtctcccagtgggtcctgtcc

SEQ ID NO: 6448 - RNA, 23 nt, synthetic construct
  source 1..23: mol_type = other RNA
  modified_base 2: mod_base = OTHER; note = thymine
  modified_base 5: mod_base = OTHER; note = thymine
  modified_base 7: mod_base = OTHER; note = thymine
attgtctcccagtgggtcctgtc

SEQ ID NO: 6449 - RNA, 23 nt, synthetic construct
  source 1..23: mol_type = other RNA
acttgtctcccagtgggtcctgt

SEQ ID NO: 6450 - RNA, 23 nt, synthetic construct
  source 1..23: mol_type = other RNA
  modified_base 5: mod_base = OTHER; note = thymine
  modified_base 7: mod_base = OTHER; note = thymine
agcttgtctcccagtgggtcctg

SEQ ID NO: 6451 - RNA, 23 nt, synthetic construct
  source 1..23: mol_type = other RNA
  modified_base 2: mod_base = OTHER; note = thymine
  modified_base 5: mod_base = OTHER; note = thymine
atgcttgtctcccagtgggtcct

SEQ ID NO: 6452 - RNA, 23 nt, synthetic construct
  source 1..23: mol_type = other RNA
  modified_base 7: mod_base = OTHER; note = thymine
aatgcttgtctcccagtgggtcc

SEQ ID NO: 6453 - RNA, 23 nt, synthetic construct
  source 1..23: mol_type = other RNA
  modified_base 7: mod_base = OTHER; note = thymine
  modified_base 12: mod_base = OTHER; note = thymine
aaatgcttgtctcccagtgggtc

SEQ ID NO: 6454 - RNA, 23 nt, synthetic construct
  source 1..23: mol_type = other RNA
  modified_base 5: mod_base = OTHER; note = thymine
aaaatgcttgtctcccagtgggt

SEQ ID NO: 6455 - RNA, 23 nt, synthetic construct
  source 1..23: mol_type = other RNA
  modified_base 2: mod_base = OTHER; note = thymine
  modified_base 12: mod_base = OTHER; note = thymine
ataaatgcttgtctcccagtggg

SEQ ID NO: 6456 - RNA, 23 nt, synthetic construct
  source 1..23: mol_type = other RNA
  modified_base 7: mod_base = OTHER; note = thymine
aataaatgcttgtctcccagtgg

SEQ ID NO: 6457 - RNA, 23 nt, synthetic construct
  source 1..23: mol_type = other RNA
  modified_base 2: mod_base = OTHER; note = thymine
  modified_base 12: mod_base = OTHER; note = thymine
atataaatgcttgtctcccagtg

SEQ ID NO: 6458 - RNA, 23 nt, synthetic construct
  source 1..23: mol_type = other RNA
  modified_base 5: mod_base = OTHER; note = thymine
  modified_base 12: mod_base = OTHER; note = thymine
agtataaatgcttgtctcccagt

SEQ ID NO: 6459 - RNA, 23 nt, synthetic construct
  source 1..23: mol_type = other RNA
  modified_base 5: mod_base = OTHER; note = thymine
  modified_base 7: mod_base = OTHER; note = thymine
aaagtataaatgcttgtctccca

SEQ ID NO: 6460 - RNA, 23 nt, synthetic construct
  source 1..23: mol_type = other RNA
  modified_base 12: mod_base = OTHER; note = thymine
aaaagtataaatgcttgtctccc

SEQ ID NO: 6461 - RNA, 23 nt, synthetic construct
  source 1..23: mol_type = other RNA
  modified_base 7: mod_base = OTHER; note = thymine
agaaagtataaatgcttgtctcc

SEQ ID NO: 6462 - RNA, 23 nt, synthetic construct
  source 1..23: mol_type = other RNA
  modified_base 12: mod_base = OTHER; note = thymine
aaaagaaagtataaatgcttgtc

SEQ ID NO: 6463 - RNA, 23 nt, synthetic construct
  source 1..23: mol_type = other RNA
  modified_base 5: mod_base = OTHER; note = thymine
accctcacagctcatgtctggct

SEQ ID NO: 6464 - RNA, 23 nt, synthetic construct
  source 1..23: mol_type = other RNA
  modified_base 7: mod_base = OTHER; note = thymine
atgtgcttgaccctcacagctca

SEQ ID NO: 6465 - RNA, 23 nt, synthetic construct
  source 1..23: mol_type = other RNA
  modified_base 7: mod_base = OTHER; note = thymine
aatagctgtgcttgaccctcaca

SEQ ID NO: 6466 - RNA, 23 nt, synthetic construct
  source 1..23: mol_type = other RNA
atggatagctgtgcttgaccctc

SEQ ID NO: 6467 - RNA, 23 nt, synthetic construct
  source 1..23: mol_type = other RNA
  modified_base 7: mod_base = OTHER; note = thymine
atctgatggatagctgtgcttga

SEQ ID NO: 6468 - RNA, 23 nt, synthetic construct
  source 1..23: mol_type = other RNA
  modified_base 5: mod_base = OTHER; note = thymine
  modified_base 7: mod_base = OTHER; note = thymine
atcatctgatggatagctgtgct

SEQ ID NO: 6469 - RNA, 23 nt, synthetic construct
  source 1..23: mol_type = other RNA
  modified_base 7: mod_base = OTHER; note = thymine
agatcatctgatggatagctgtg

SEQ ID NO: 6470 - RNA, 23 nt, synthetic construct
  source 1..23: mol_type = other RNA
  modified_base 7: mod_base = OTHER; note = thymine
agtagatcatctgatggatagct

SEQ ID NO: 6471 - RNA, 23 nt, synthetic construct
  source 1..23: mol_type = other RNA
atcaggaaggctgaaagtagatc

SEQ ID NO: 6472 - RNA, 23 nt, synthetic construct
  source 1..23: mol_type = other RNA
  modified_base 7: mod_base = OTHER; note = thymine
atcggatggcagttgctccgtct

SEQ ID NO: 6473 - RNA, 23 nt, synthetic construct
  source 1..23: mol_type = other RNA
  modified_base 7: mod_base = OTHER; note = thymine
agagcctcggatggcagttgctc

SEQ ID NO: 6474 - RNA, 23 nt, synthetic construct
  source 1..23: mol_type = other RNA
agcaccagagctcgttctgcttg

SEQ ID NO: 6475 - RNA, 23 nt, synthetic construct
  source 1..23: mol_type = other RNA
atggctagctccagcaccagagc

SEQ ID NO: 6476 - RNA, 23 nt, synthetic construct
  source 1..23: mol_type = other RNA
  modified_base 7: mod_base = OTHER; note = thymine
attggctagctccagcaccagag

SEQ ID NO: 6477 - RNA, 23 nt, synthetic construct
  source 1..23: mol_type = other RNA
  modified_base 7: mod_base = OTHER; note = thymine
atttgctgcttggctagctccag

SEQ ID NO: 6478 - RNA, 23 nt, synthetic construct
  source 1..23: mol_type = other RNA
  modified_base 5: mod_base = OTHER; note = thymine
  modified_base 7: mod_base = OTHER; note = thymine
atattctgggacgactggtcagg

SEQ ID NO: 6479 - RNA, 23 nt, synthetic construct
  source 1..23: mol_type = other RNA
  modified_base 7: mod_base = OTHER; note = thymine
atgagttattctgggacgactgg

SEQ ID NO: 6480 - RNA, 23 nt, synthetic construct
  source 1..23: mol_type = other RNA
  modified_base 5: mod_base = OTHER; note = thymine
aggatgagttattctgggacgac

SEQ ID NO: 6481 - RNA, 23 nt, synthetic construct
  source 1..23: mol_type = other RNA
  modified_base 7: mod_base = OTHER; note = thymine
agaggatgagttattctgggacg

SEQ ID NO: 6482 - RNA, 23 nt, synthetic construct
  source 1..23: mol_type = other RNA
aggaggatgagttattctgggac

SEQ ID NO: 6483 - RNA, 23 nt, synthetic construct
  source 1..23: mol_type = other RNA
  modified_base 7: mod_base = OTHER; note = thymine
attccctggagccacactccctg

SEQ ID NO: 6484 - RNA, 23 nt, synthetic construct
  source 1..23: mol_type = other RNA
agtagcaaagctgatgacctcct

SEQ ID NO: 6485 - RNA, 23 nt, synthetic construct
  source 1..23: mol_type = other RNA
  modified_base 7: mod_base = OTHER; note = thymine
atggagtctgtgacagtagcaaa

SEQ ID NO: 6486 - RNA, 23 nt, synthetic construct
  source 1..23: mol_type = other RNA
  modified_base 7: mod_base = OTHER; note = thymine
ataggctgaagtggagtctgtga

SEQ ID NO: 6487 - RNA, 23 nt, synthetic construct
  source 1..23: mol_type = other RNA
  modified_base 5: mod_base = OTHER; note = thymine
  modified_base 7: mod_base = OTHER; note = thymine
aagctgtaggctgaagtggagtc

SEQ ID NO: 6488 - RNA, 23 nt, synthetic construct
  source 1..23: mol_type = other RNA
  modified_base 5: mod_base = OTHER; note = thymine
atcctcaagcaaagagtgccagg

SEQ ID NO: 6489 - RNA, 23 nt, synthetic construct
  source 1..23: mol_type = other RNA
atcggaagatcctcaagcaaaga

SEQ ID NO: 6490 - RNA, 23 nt, synthetic construct
  source 1..23: mol_type = other RNA
  modified_base 7: mod_base = OTHER; note = thymine
aggtgatgtggtgctcagccagg

SEQ ID NO: 6491 - RNA, 23 nt, synthetic construct
  source 1..23: mol_type = other RNA
  modified_base 5: mod_base = OTHER; note = thymine
atggtgatgtggtgctcagccag

SEQ ID NO: 6492 - RNA, 23 nt, synthetic construct
  source 1..23: mol_type = other RNA
  modified_base 7: mod_base = OTHER; note = thymine
agttggtgatgtggtgctcagcc

SEQ ID NO: 6493 - RNA, 23 nt, synthetic construct
  source 1..23: mol_type = other RNA
  modified_base 7: mod_base = OTHER; note = thymine
atgcagtttcaggacaccagact

SEQ ID NO: 6494 - RNA, 23 nt, synthetic construct
  source 1..23: mol_type = other RNA
  modified_base 7: mod_base = OTHER; note = thymine
atctagttgcagtttcaggacac

SEQ ID NO: 6495 - RNA, 23 nt, synthetic construct
  source 1..23: mol_type = other RNA
  modified_base 7: mod_base = OTHER; note = thymine
atgcagtctagttgcagtttcag

SEQ ID NO: 6496 - RNA, 23 nt, synthetic construct
  source 1..23: mol_type = other RNA
atctgcagtctagttgcagtttc

SEQ ID NO: 6497 - RNA, 23 nt, synthetic construct
  source 1..23: mol_type = other RNA
  modified_base 7: mod_base = OTHER; note = thymine
atccagtaactgtgctgttgcct

SEQ ID NO: 6498 - RNA, 23 nt, synthetic construct
  source 1..23: mol_type = other RNA
atgtccagtaactgtgctgttgc

SEQ ID NO: 6499 - RNA, 23 nt, synthetic construct
  source 1..23: mol_type = other RNA
  modified_base 5: mod_base = OTHER; note = thymine
  modified_base 7: mod_base = OTHER; note = thymine
aggttgtccagtaactgtgctgt

SEQ ID NO: 6500 - RNA, 23 nt, synthetic construct
  source 1..23: mol_type = other RNA
  modified_base 5: mod_base = OTHER; note = thymine
  modified_base 7: mod_base = OTHER; note = thymine
atggtgtcctgctgtgtccaaga

SEQ ID NO: 6501 - RNA, 23 nt, synthetic construct
  source 1..23: mol_type = other RNA
  modified_base 7: mod_base = OTHER; note = thymine
agctggtgtcctgctgtgtccaa

SEQ ID NO: 6502 - RNA, 23 nt, synthetic construct
  source 1..23: mol_type = other RNA
  modified_base 7: mod_base = OTHER; note = thymine
agctgctggtgtcctgctgtgtc

SEQ ID NO: 6503 - RNA, 23 nt, synthetic construct
  source 1..23: mol_type = other RNA
  modified_base 7: mod_base = OTHER; note = thymine
ataagctctaggaagggctgctg

SEQ ID NO: 6504 - RNA, 23 nt, synthetic construct
  source 1..23: mol_type = other RNA
  modified_base 7: mod_base = OTHER; note = thymine
agatcttaagctctaggaagggc

SEQ ID NO: 6505 - RNA, 23 nt, synthetic construct
  source 1..23: mol_type = other RNA
  modified_base 7: mod_base = OTHER; note = thymine
atgcagtaattcagctggtaccc

SEQ ID NO: 6506 - RNA, 23 nt, synthetic construct
  source 1..23: mol_type = other RNA
aactgcagtaattcagctggtac

SEQ ID NO: 6507 - RNA, 23 nt, synthetic construct
  source 1..23: mol_type = other RNA
atgcccactgcagtaattcagct

SEQ ID NO: 6508 - RNA, 23 nt, synthetic construct
  source 1..23: mol_type = other RNA
  modified_base 7: mod_base = OTHER; note = thymine
atggctttgaggaggctgaagac

SEQ ID NO: 6509 - RNA, 23 nt, synthetic construct
  source 1..23: mol_type = other RNA
  modified_base 7: mod_base = OTHER; note = thymine
aattgttggctttgaggaggctg

SEQ ID NO: 6510 - RNA, 23 nt, synthetic construct
  source 1..23: mol_type = other RNA
  modified_base 5: mod_base = OTHER; note = thymine
  modified_base 7: mod_base = OTHER; note = thymine
agattgttggctttgaggaggct

SEQ ID NO: 6511 - RNA, 23 nt, synthetic construct
  source 1..23: mol_type = other RNA
  modified_base 7: mod_base = OTHER; note = thymine
atatgatccaggtagaggagaga

SEQ ID NO: 6512 - RNA, 23 nt, synthetic construct
  source 1..23: mol_type = other RNA
  modified_base 5: mod_base = OTHER; note = thymine
attatgatccaggtagaggagag

SEQ ID NO: 6513 - RNA, 23 nt, synthetic construct
  source 1..23: mol_type = other RNA
  modified_base 7: mod_base = OTHER; note = thymine
atgccattatgatccaggtagag

SEQ ID NO: 6514 - RNA, 23 nt, synthetic construct
  source 1..23: mol_type = other RNA
atgaccacattgccattatgatc

SEQ ID NO: 6515 - RNA, 23 nt, synthetic construct
  source 1..23: mol_type = other RNA
  modified_base 5: mod_base = OTHER; note = thymine
atcttgaccacattgccattatg

SEQ ID NO: 6516 - RNA, 23 nt, synthetic construct
  source 1..23: mol_type = other RNA
aggcacatccgtcttgaccacat

SEQ ID NO: 6517 - RNA, 23 nt, synthetic construct
  source 1..23: mol_type = other RNA
agccacaggcctccaccaccata

SEQ ID NO: 6518 - RNA, 23 nt, synthetic construct
  source 1..23: mol_type = other RNA
attgctagctgcagccacaggcc

SEQ ID NO: 6519 - RNA, 23 nt, synthetic construct
  source 1..23: mol_type = other RNA
  modified_base 5: mod_base = OTHER; note = thymine
  modified_base 7: mod_base = OTHER; note = thymine
atcctcttgctagctgcagccac

SEQ ID NO: 6520 - RNA, 23 nt, synthetic construct
  source 1..23: mol_type = other RNA
  modified_base 7: mod_base = OTHER; note = thymine
accaggtcctcttgctagctgca

SEQ ID NO: 6521 - RNA, 23 nt, synthetic construct
  source 1..23: mol_type = other RNA
  modified_base 5: mod_base = OTHER; note = thymine
  modified_base 7: mod_base = OTHER; note = thymine
atggtctcttcactccaaagccc

SEQ ID NO: 6522 - RNA, 23 nt, synthetic construct
  source 1..23: mol_type = other RNA
  modified_base 7: mod_base = OTHER; note = thymine
acttggtctcttcactccaaagc

SEQ ID NO: 6523 - RNA, 23 nt, synthetic construct
  source 1..23: mol_type = other RNA
  modified_base 5: mod_base = OTHER; note = thymine
  modified_base 7: mod_base = OTHER; note = thymine
atcatcttggtctcttcactcca

SEQ ID NO: 6524 - RNA, 23 nt, synthetic construct
  source 1..23: mol_type = other RNA
  modified_base 7: mod_base = OTHER; note = thymine
agtgagtcatattgccaggtggt

SEQ ID NO: 6525 - RNA, 23 nt, synthetic construct
  source 1..23: mol_type = other RNA
  modified_base 5: mod_base = OTHER; note = thymine
aaagtgagtcatattgccaggtg

SEQ ID NO: 6526 - RNA, 23 nt, synthetic construct
  source 1..23: mol_type = other RNA
  modified_base 7: mod_base = OTHER; note = thymine
atcaagtgagtcatattgccagg

SEQ ID NO: 6527 - RNA, 23 nt, synthetic construct
  source 1..23: mol_type = other RNA
atccctagtccctgacatcttct

SEQ ID NO: 6528 - RNA, 23 nt, synthetic construct
  source 1..23: mol_type = other RNA
aggaccatctatctgcttcctcc

SEQ ID NO: 6529 - RNA, 23 nt, synthetic construct
  source 1..23: mol_type = other RNA
  modified_base 5: mod_base = OTHER; note = thymine
agcttcaagcctgctggaccatc

SEQ ID NO: 6530 - RNA, 23 nt, synthetic construct
  source 1..23: mol_type = other RNA
atgcccatctccctcttgacctt

SEQ ID NO: 6531 - RNA, 23 nt, synthetic construct
  source 1..23: mol_type = other RNA
ataagcatcctccctcagcgcct

SEQ ID NO: 6532 - RNA, 23 nt, synthetic construct
  source 1..23: mol_type = other RNA
  modified_base 5: mod_base = OTHER; note = thymine
  modified_base 7: mod_base = OTHER; note = thymine
attgtctcccagtgggtcctgtc

SEQ ID NO: 6533 - RNA, 23 nt, synthetic construct
  source 1..23: mol_type = other RNA
  modified_base 7: mod_base = OTHER; note = thymine
aaatgcttgtctcccagtgggtc

SEQ ID NO: 6534 - RNA, 23 nt, synthetic construct
  source 1..23: mol_type = other RNA
aaaagtataaatgcttgtctccc

SEQ ID NO: 6535 - RNA, 23 nt, synthetic construct
  source 1..23: mol_type = other RNA
actgatggatagctgtgcttgct

SEQ ID NO: 6536 - RNA, 23 nt, synthetic construct
  source 1..23: mol_type = other RNA
acaggaaggctgaaagtagatct

SEQ ID NO: 6537 - RNA, 23 nt, synthetic construct
  source 1..23: mol_type = other RNA
accaggatttgctgcttggctct

SEQ ID NO: 6538 - RNA, 23 nt, synthetic construct
  source 1..23: mol_type = other RNA
actcaagcaaagagtgccaggct

SEQ ID NO: 6539 - RNA, 23 nt, synthetic construct
  source 1..23: mol_type = other RNA
acctcaagcaaagagtgccagct

SEQ ID NO: 6540 - RNA, 23 nt, synthetic construct
  source 1..23: mol_type = other RNA
  modified_base 12: mod_base = OTHER; note = thymine
acggaagatcctcaagcaaagct

SEQ ID NO: 6541 - RNA, 23 nt, synthetic construct
  source 1..23: mol_type = other RNA
  modified_base 2: mod_base = OTHER; note = thymine
atcggaagatcctcaagcaaact

SEQ ID NO: 6542 - RNA, 23 nt, synthetic construct
  source 1..23: mol_type = other RNA
aatcggaagatcctcaagcaact

SEQ ID NO: 6543 - RNA, 23 nt, synthetic construct
  source 1..23: mol_type = other RNA
  modified_base 12: mod_base = OTHER; note = thymine
acatcggaagatcctcaagcact

SEQ ID NO: 6544 - RNA, 23 nt, synthetic construct
  source 1..23: mol_type = other RNA
  modified_base 5: mod_base = OTHER; note = thymine
accatcggaagatcctcaagcct

SEQ ID NO: 6545 - RNA, 23 nt, synthetic construct
  source 1..23: mol_type = other RNA
  modified_base 7: mod_base = OTHER; note = thymine
acaggttggtgatgtggtgctct

SEQ ID NO: 6546 - RNA, 23 nt, synthetic construct
  source 1..23: mol_type = other RNA
  modified_base 5: mod_base = OTHER; note = thymine
acagttcctggaagtctacgtct

SEQ ID NO: 6547 - RNA, 23 nt, synthetic construct
  source 1..23: mol_type = other RNA
  modified_base 7: mod_base = OTHER; note = thymine
accagttcctggaagtctacgct

SEQ ID NO: 6548 - RNA, 23 nt, synthetic construct
  source 1..23: mol_type = other RNA
acatcccagttcctggaagtcct

SEQ ID NO: 6549 - RNA, 23 nt, synthetic construct
  source 1..23: mol_type = other RNA
  modified_base 7: mod_base = OTHER; note = thymine
acagaatggaaagaggcagcact

SEQ ID NO: 6550 - RNA, 23 nt, synthetic construct
  source 1..23: mol_type = other RNA
agcagaatggaaagaggcagcct

SEQ ID NO: 6551 - RNA, 23 nt, synthetic construct
  source 1..23: mol_type = other RNA
aggcagaatggaaagaggcagct

SEQ ID NO: 6552 - RNA, 23 nt, synthetic construct
  source 1..23: mol_type = other RNA
actgaagacggcagaatggaact

SEQ ID NO: 6553 - RNA, 23 nt, synthetic construct
  source 1..23: mol_type = other RNA
  modified_base 7: mod_base = OTHER; note = thymine
aaaggattgttggctttgaggct

SEQ ID NO: 6554 - RNA, 23 nt, synthetic construct
  source 1..23: mol_type = other RNA
  modified_base 12: mod_base = OTHER; note = thymine
acaaggattgttggctttgagct

SEQ ID NO: 6555 - RNA, 23 nt, synthetic construct
  source 1..23: mol_type = other RNA
  modified_base 12: mod_base = OTHER; note = thymine
acttcgggcagtagggacacact

SEQ ID NO: 6556 - RNA, 23 nt, synthetic construct
  source 1..23: mol_type = other RNA
  modified_base 5: mod_base = OTHER; note = thymine
accttcgggcagtagggacacct

SEQ ID NO: 6557 - RNA, 23 nt, synthetic construct
  source 1..23: mol_type = other RNA
  modified_base 5: mod_base = OTHER; note = thymine
  modified_base 7: mod_base = OTHER; note = thymine
acattatgatccaggtagaggct

SEQ ID NO: 6558 - RNA, 23 nt, synthetic construct
  source 1..23: mol_type = other RNA
  modified_base 5: mod_base = OTHER; note = thymine
accattatgatccaggtagagct

SEQ ID NO: 6559 - RNA, 23 nt, synthetic construct
  source 1..23: mol_type = other RNA
  modified_base 7: mod_base = OTHER; note = thymine
accacattgccattatgatccct

SEQ ID NO: 6560 - RNA, 23 nt, synthetic construct
  source 1..23: mol_type = other RNA
aaccacattgccattatgatcct

SEQ ID NO: 6561 - RNA, 23 nt, synthetic construct
  source 1..23: mol_type = other RNA
  modified_base 7: mod_base = OTHER; note = thymine
acgtcttgaccacattgccatct

SEQ ID NO: 6562 - RNA, 23 nt, synthetic construct
  source 1..23: mol_type = other RNA
  modified_base 2: mod_base = OTHER; note = thymine
atccgtcttgaccacattgccct

SEQ ID NO: 6563 - RNA, 23 nt, synthetic construct
  source 1..23: mol_type = other RNA
  modified_base 7: mod_base = OTHER; note = thymine
aatccgtcttgaccacattgcct

SEQ ID NO: 6564 - RNA, 23 nt, synthetic construct
  source 1..23: mol_type = other RNA
actccaccaccatatctggcact

SEQ ID NO: 6565 - RNA, 23 nt, synthetic construct
  source 1..23: mol_type = other RNA
  modified_base 7: mod_base = OTHER; note = thymine
acctcttgctagctgcagccact

SEQ ID NO: 6566 - RNA, 23 nt, synthetic construct
  source 1..23: mol_type = other RNA
  modified_base 7: mod_base = OTHER; note = thymine
  modified_base 12: mod_base = OTHER; note = thymine
acatcttggtctcttcactccct

SEQ ID NO: 6567 - RNA, 23 nt, synthetic construct
  source 1..23: mol_type = other RNA
  modified_base 7: mod_base = OTHER; note = thymine
  modified_base 12: mod_base = OTHER; note = thymine
aaaacttcatcttggtctcttct

SEQ ID NO: 6568 - RNA, 23 nt, synthetic construct
  source 1..23: mol_type = other RNA
  modified_base 7: mod_base = OTHER; note = thymine
aacacatcagccaacctggaact

SEQ ID NO: 6569 - RNA, 23 nt, synthetic construct
  source 1..23: mol_type = other RNA
acaacacatcagccaacctggct

SEQ ID NO: 6570 - RNA, 23 nt, synthetic construct
  source 1..23: mol_type = other RNA
accaacacatcagccaacctgct

SEQ ID NO: 6571 - RNA, 23 nt, synthetic construct
  source 1..23: mol_type = other RNA
  modified_base 7: mod_base = OTHER; note = thymine
actgcttcaagcctgctggacct

SEQ ID NO: 6572 - RNA, 23 nt, synthetic construct
  source 1..23: mol_type = other RNA
  modified_base 5: mod_base = OTHER; note = thymine
  modified_base 7: mod_base = OTHER; note = thymine
aaagtataaatgcttgtctccct

SEQ ID NO: 6573 - RNA, 21 nt, synthetic construct
  source 1..21: mol_type = other RNA
  modified_base 1: mod_base = OTHER; note = 2'-O-methylguanosine-3'-phosphorothioate
  modified_base 2: mod_base = OTHER; note = 2'-O-methylcytidine-3'-phosphorothioate
  modified_base 3: mod_base = OTHER; note = 2'-O-methylcytidine-3'-phosphate
  modified_base 4: mod_base = OTHER; note = 2'-O-methyladenosine-3'-phosphate
  modified_base 5: mod_base = OTHER; note = 2'-O-methylguanosine-3'-phosphate
  modified_base 6: mod_base = OTHER; note = 2'-O-methyladenosine-3'-phosphate
  modified_base 7: mod_base = OTHER; note = 2'-O-methylcytidine-3'-phosphate
  modified_base 8: mod_base = OTHER; note = 2'-O-methyladenosine-3'-phosphate
  modified_base 9: mod_base = OTHER; note = 2'-fluorouridine-3'-phosphate
  modified_base 10: mod_base = OTHER; note = 2'-fluoroguanosine-3'-phosphate
  modified_base 11: mod_base = OTHER; note = 2'-fluoroadenosine-3'-phosphate
  modified_base 12: mod_base = OTHER; note = 2'-O-methylguanosine-3'-phosphate
  modified_base 13: mod_base = OTHER; note = 2'-O-methylcytidine-3'-phosphate
  modified_base 14: mod_base = OTHER; note = 2'-O-methyluridine-3'-phosphate
  modified_base 15: mod_base = OTHER; note = 2'-O-methylguanosine-3'-phosphate
  modified_base 16: mod_base = OTHER; note = 2'-O-methyluridine-3'-phosphate
  modified_base 17: mod_base = OTHER; note = 2'-O-methylguanosine-3'-phosphate
  modified_base 18: mod_base = OTHER; note = 2'-O-methyladenosine-3'-phosphate
  modified_base 19: mod_base = OTHER; note = 2'-O-methylguanosine-3'-phosphate
  modified_base 20: mod_base = OTHER; note = 2'-O-methylguanosine-3'-phosphate
  modified_base 21: mod_base = OTHER; note = 2'-O-methyluridine-3'-phosphate N-[tris(GalNAc-alkyl)-amidodecanoyl)]-4-hydroxyprolinol (Hyp-(GalNAc-alkyl)3)
gccagacatgagctgtgaggt

SEQ ID NO: 6574 - RNA, 21 nt, synthetic construct
  source 1..21: mol_type = other RNA
  modified_base 1: mod_base = OTHER; note = 2'-O-methylcytidine-3'-phosphorothioate
  modified_base 2: mod_base = OTHER; note = 2'-O-methylcytidine-3'-phosphorothioate
  modified_base 3: mod_base = OTHER; note = 2'-O-methyladenosine-3'-phosphate
  modified_base 4: mod_base = OTHER; note = 2'-O-methylguanosine-3'-phosphate
  modified_base 5: mod_base = OTHER; note = 2'-O-methyladenosine-3'-phosphate
  modified_base 6: mod_base = OTHER; note = 2'-O-methylcytidine-3'-phosphate
  modified_base 7: mod_base = OTHER; note = 2'-O-methyladenosine-3'-phosphate
  modified_base 8: mod_base = OTHER; note = 2'-O-methyluridine-3'-phosphate
  modified_base 9: mod_base = OTHER; note = 2'-fluoroguanosine-3'-phosphate
  modified_base 10: mod_base = OTHER; note = 2'-fluoroadenosine-3'-phosphate
  modified_base 11: mod_base = OTHER; note = 2'-fluoroguanosine-3'-phosphate
  modified_base 12: mod_base = OTHER; note = 2'-O-methylcytidine-3'-phosphate
  modified_base 13: mod_base = OTHER; note = 2'-O-methyluridine-3'-phosphate
  modified_base 14: mod_base = OTHER; note = 2'-O-methylguanosine-3'-phosphate
  modified_base 15: mod_base = OTHER; note = 2'-O-methyluridine-3'-phosphate
  modified_base 16: mod_base = OTHER; note = 2'-O-methylguanosine-3'-phosphate
  modified_base 17: mod_base = OTHER; note = 2'-O-methyladenosine-3'-phosphate
  modified_base 18: mod_base = OTHER; note = 2'-O-methylguanosine-3'-phosphate
  modified_base 19: mod_base = OTHER; note = 2'-O-methylguanosine-3'-phosphate
  modified_base 20: mod_base = OTHER; note = 2'-O-methylguanosine-3'-phosphate
  modified_base 21: mod_base = OTHER; note = 2'-O-methyluridine-3'-phosphate N-[tris(GalNAc-alkyl)-amidodecanoyl)]-4-hydroxyprolinol (Hyp-(GalNAc-alkyl)3)
ccagacatgagctgtgagggt

SEQ ID NO: 6575 - RNA, 21 nt, synthetic construct
  source 1..21: mol_type = other RNA
  modified_base 1: mod_base = OTHER; note = 2'-O-methyladenosine-3'-phosphorothioate
  modified_base 2: mod_base = OTHER; note = 2'-O-methylguanosine-3'-phosphorothioate
  modified_base 3: mod_base = OTHER; note = 2'-O-methyladenosine-3'-phosphate
  modified_base 4: mod_base = OTHER; note = 2'-O-methylcytidine-3'-phosphate
  modified_base 5: mod_base = OTHER; note = 2'-O-methyladenosine-3'-phosphate
  modified_base 6: mod_base = OTHER; note = 2'-O-methyluridine-3'-phosphate
  modified_base 7: mod_base = OTHER; note = 2'-O-methylguanosine-3'-phosphate
  modified_base 8: mod_base = OTHER; note = 2'-O-methyladenosine-3'-phosphate
  modified_base 9: mod_base = OTHER; note = 2'-fluoroguanosine-3'-phosphate
  modified_base 10: mod_base = OTHER; note = 2'-fluorocytidine-3'-phosphate
  modified_base 11: mod_base = OTHER; note = 2'-fluorouridine-3'-phosphate
  modified_base 12: mod_base = OTHER; note = 2'-O-methylguanosine-3'-phosphate
  modified_base 13: mod_base = OTHER; note = 2'-O-methyluridine-3'-phosphate
  modified_base 14: mod_base = OTHER; note = 2'-O-methylguanosine-3'-phosphate
  modified_base 15: mod_base = OTHER; note = 2'-O-methyladenosine-3'-phosphate
  modified_base 16: mod_base = OTHER; note = 2'-O-methylguanosine-3'-phosphate
  modified_base 17: mod_base = OTHER; note = 2'-O-methylguanosine-3'-phosphate
  modified_base 18: mod_base = OTHER; note = 2'-O-methylguanosine-3'-phosphate
  modified_base 19: mod_base = OTHER; note = 2'-O-methyluridine-3'-phosphate
  modified_base 20: mod_base = OTHER; note = 2'-O-methylcytidine-3'-phosphate
  modified_base 21: mod_base = OTHER; note = 2'-O-methyluridine-3'-phosphate N-[tris(GalNAc-alkyl)-amidodecanoyl)]-4-hydroxyprolinol (Hyp-(GalNAc-alkyl)3)
agacatgagctgtgagggtct

SEQ ID NO: 6576 - RNA, 21 nt, synthetic construct
  source 1..21: mol_type = other RNA
  modified_base 1: mod_base = OTHER; note = 2'-O-methylguanosine-3'-phosphorothioate
  modified_base 2: mod_base = OTHER; note = 2'-O-methyladenosine-3'-phosphorothioate
  modified_base 3: mod_base = OTHER; note = 2'-O-methylcytidine-3'-phosphate
  modified_base 4: mod_base = OTHER; note = 2'-O-methyladenosine-3'-phosphate
  modified_base 5: mod_base = OTHER; note = 2'-O-methyluridine-3'-phosphate
  modified_base 6: mod_base = OTHER; note = 2'-O-methylguanosine-3'-phosphate
  modified_base 7: mod_base = OTHER; note = 2'-O-methyladenosine-3'-phosphate
  modified_base 8: mod_base = OTHER; note = 2'-O-methylguanosine-3'-phosphate
  modified_base 9: mod_base = OTHER; note = 2'-fluorocytidine-3'-phosphate
  modified_base 10: mod_base = OTHER; note = 2'-fluorouridine-3'-phosphate
  modified_base 11: mod_base = OTHER; note = 2'-fluoroguanosine-3'-phosphate
  modified_base 12: mod_base = OTHER; note = 2'-O-methyluridine-3'-phosphate
  modified_base 13: mod_base = OTHER; note = 2'-O-methylguanosine-3'-phosphate
  modified_base 14: mod_base = OTHER; note = 2'-O-methyladenosine-3'-phosphate
  modified_base 15: mod_base = OTHER; note = 2'-O-methylguanosine-3'-phosphate
  modified_base 16: mod_base = OTHER; note = 2'-O-methylguanosine-3'-phosphate
  modified_base 17: mod_base = OTHER; note = 2'-O-methylguanosine-3'-phosphate
  modified_base 18: mod_base = OTHER; note = 2'-O-methyluridine-3'-phosphate
  modified_base 19: mod_base = OTHER; note = 2'-O-methylcytidine-3'-phosphate
  modified_base 20: mod_base = OTHER; note = 2'-O-methyladenosine-3'-phosphate
  modified_base 21: mod_base = OTHER; note = 2'-O-methyluridine-3'-phosphate N-[tris(GalNAc-alkyl)-amidodecanoyl)]-4-hydroxyprolinol (Hyp-(GalNAc-alkyl)3)
gacatgagctgtgagggtcat

SEQ ID NO: 6577 - RNA, 21 nt, synthetic construct
  source 1..21: mol_type = other RNA
  modified_base 1: mod_base = OTHER; note = 2'-O-methyladenosine-3'-phosphorothioate
  modified_base 2: mod_base = OTHER; note = 2'-O-methylcytidine-3'-phosphorothioate
  modified_base 3: mod_base = OTHER; note = 2'-O-methyladenosine-3'-phosphate
  modified_base 4: mod_base = OTHER; note = 2'-O-methyluridine-3'-phosphate
  modified_base 5: mod_base = OTHER; note = 2'-O-methylguanosine-3'-phosphate
  modified_base 6: mod_base = OTHER; note = 2'-O-methyladenosine-3'-phosphate
  modified_base 7: mod_base = OTHER; note = 2'-O-methylguanosine-3'-phosphate
  modified_base 8: mod_base = OTHER; note = 2'-O-methylcytidine-3'-phosphate
  modified_base 9: mod_base = OTHER; note = 2'-fluorouridine-3'-phosphate
  modified_base 10: mod_base = OTHER; note = 2'-fluoroguanosine-3'-phosphate
  modified_base 11: mod_base = OTHER; note = 2'-fluorouridine-3'-phosphate
  modified_base 12: mod_base = OTHER; note = 2'-O-methylguanosine-3'-phosphate
  modified_base 13: mod_base = OTHER; note = 2'-O-methyladenosine-3'-phosphate
  modified_base 14: mod_base = OTHER; note = 2'-O-methylguanosine-3'-phosphate
  modified_base 15: mod_base = OTHER; note = 2'-O-methylguanosine-3'-phosphate
  modified_base 16: mod_base = OTHER; note = 2'-O-methylguanosine-3'-phosphate
  modified_base 17: mod_base = OTHER; note = 2'-O-methyluridine-3'-phosphate
  modified_base 18: mod_base = OTHER; note = 2'-O-methylcytidine-3'-phosphate
  modified_base 19: mod_base = OTHER; note = 2'-O-methyladenosine-3'-phosphate
  modified_base 20: mod_base = OTHER; note = 2'-O-methyladenosine-3'-phosphate
  modified_base 21: mod_base = OTHER; note = 2'-O-methyluridine-3'-phosphate N-[tris(GalNAc-alkyl)-amidodecanoyl)]-4-hydroxyprolinol (Hyp-(GalNAc-alkyl)3)
acatgagctgtgagggtcaat

SEQ ID NO: 6578 - RNA, 21 nt, synthetic construct
  source 1..21: mol_type = other RNA
  modified_base 1: mod_base = OTHER; note = 2'-O-methylcytidine-3'-phosphorothioate
  modified_base 2: mod_base = OTHER; note = 2'-O-methyladenosine-3'-phosphorothioate
  modified_base 3: mod_base = OTHER; note = 2'-O-methyluridine-3'-phosphate
  modified_base 4: mod_base = OTHER; note = 2'-O-methylguanosine-3'-phosphate
  modified_base 5: mod_base = OTHER; note = 2'-O-methyladenosine-3'-phosphate
  modified_base 6: mod_base = OTHER; note = 2'-O-methylguanosine-3'-phosphate
  modified_base 7: mod_base = OTHER; note = 2'-O-methylcytidine-3'-phosphate
  modified_base 8: mod_base = OTHER; note = 2'-O-methyluridine-3'-phosphate
  modified_base 9: mod_base = OTHER; note = 2'-fluoroguanosine-3'-phosphate
  modified_base 10: mod_base = OTHER; note = 2'-fluorouridine-3'-phosphate
  modified_base 11: mod_base = OTHER; note = 2'-fluoroguanosine-3'-phosphate
  modified_base 12: mod_base = OTHER; note = 2'-O-methyladenosine-3'-phosphate
  modified_base 13: mod_base = OTHER; note = 2'-O-methylguanosine-3'-phosphate
  modified_base 14: mod_base = OTHER; note = 2'-O-methylguanosine-3'-phosphate
  modified_base 15: mod_base = OTHER; note = 2'-O-methylguanosine-3'-phosphate
  modified_base 16: mod_base = OTHER; note = 2'-O-methyluridine-3'-phosphate
  modified_base 17: mod_base = OTHER; note = 2'-O-methylcytidine-3'-phosphate
  modified_base 18: mod_base = OTHER; note = 2'-O-methyladenosine-3'-phosphate
  modified_base 19: mod_base = OTHER; note = 2'-O-methyladenosine-3'-phosphate
  modified_base 20: mod_base = OTHER; note = 2'-O-methylguanosine-3'-phosphate
  modified_base 21: mod_base = OTHER; note = 2'-O-methyluridine-3'-phosphate N-[tris(GalNAc-alkyl)-amidodecanoyl)]-4-hydroxyprolinol (Hyp-(GalNAc-alkyl)3)
catgagctgtgagggtcaagt

SEQ ID NO: 6579 - RNA, 21 nt, synthetic construct
  source 1..21: mol_type = other RNA
  modified_base 1: mod_base = OTHER; note = 2'-O-methyladenosine-3'-phosphorothioate
  modified_base 2: mod_base = OTHER; note = 2'-O-methyluridine-3'-phosphorothioate
  modified_base 3: mod_base = OTHER; note = 2'-O-methylguanosine-3'-phosphate
  modified_base 4: mod_base = OTHER; note = 2'-O-methyladenosine-3'-phosphate
  modified_base 5: mod_base = OTHER; note = 2'-O-methylguanosine-3'-phosphate
  modified_base 6: mod_base = OTHER; note = 2'-O-methylcytidine-3'-phosphate
  modified_base 7: mod_base = OTHER; note = 2'-O-methyluridine-3'-phosphate
  modified_base 8: mod_base = OTHER; note = 2'-O-methylguanosine-3'-phosphate
  modified_base 9: mod_base = OTHER; note = 2'-fluorouridine-3'-phosphate
  modified_base 10: mod_base = OTHER; note = 2'-fluoroguanosine-3'-phosphate
  modified_base 11: mod_base = OTHER; note = 2'-fluoroadenosine-3'-phosphate
  modified_base 12: mod_base = OTHER; note = 2'-O-methylguanosine-3'-phosphate
  modified_base 13: mod_base = OTHER; note = 2'-O-methylguanosine-3'-phosphate
  modified_base 14: mod_base = OTHER; note = 2'-O-methylguanosine-3'-phosphate
  modified_base 15: mod_base = OTHER; note = 2'-O-methyluridine-3'-phosphate
  modified_base 16: mod_base = OTHER; note = 2'-O-methylcytidine-3'-phosphate
  modified_base 17: mod_base = OTHER; note = 2'-O-methyladenosine-3'-phosphate
  modified_base 18: mod_base = OTHER; note = 2'-O-methyladenosine-3'-phosphate
  modified_base 19: mod_base = OTHER; note = 2'-O-methylguanosine-3'-phosphate
  modified_base 20: mod_base = OTHER; note = 2'-O-methylcytidine-3'-phosphate
  modified_base 21: mod_base = OTHER; note = 2'-O-methyluridine-3'-phosphate N-[tris(GalNAc-alkyl)-amidodecanoyl)]-4-hydroxyprolinol (Hyp-(GalNAc-alkyl)3)
atgagctgtgagggtcaagct

SEQ ID NO: 6580 - RNA, 21 nt, synthetic construct
  source 1..21: mol_type = other RNA
  modified_base 1: mod_base = OTHER; note = 2'-O-methyluridine-3'-phosphorothioate
  modified_base 2: mod_base = OTHER; note = 2'-O-methylguanosine-3'-phosphorothioate
  modified_base 3: mod_base = OTHER; note = 2'-O-methyladenosine-3'-phosphate
  modified_base 4: mod_base = OTHER; note = 2'-O-methylguanosine-3'-phosphate
  modified_base 5: mod_base = OTHER; note = 2'-O-methylcytidine-3'-phosphate
  modified_base 6: mod_base = OTHER; note = 2'-O-methyluridine-3'-phosphate
  modified_base 7: mod_base = OTHER; note = 2'-O-methylguanosine-3'-phosphate
  modified_base 8: mod_base = OTHER; note = 2'-O-methyluridine-3'-phosphate
  modified_base 9: mod_base = OTHER; note = 2'-fluoroguanosine-3'-phosphate
  modified_base 10: mod_base = OTHER; note = 2'-fluoroadenosine-3'-phosphate
  modified_base 11: mod_base = OTHER; note = 2'-fluoroguanosine-3'-phosphate
  modified_base 12: mod_base = OTHER; note = 2'-O-methylguanosine-3'-phosphate
  modified_base 13: mod_base = OTHER; note = 2'-O-methylguanosine-3'-phosphate
  modified_base 14: mod_base = OTHER; note = 2'-O-methyluridine-3'-phosphate
  modified_base 15: mod_base = OTHER; note = 2'-O-methylcytidine-3'-phosphate
  modified_base 16: mod_base = OTHER; note = 2'-O-methyladenosine-3'-phosphate
  modified_base 17: mod_base = OTHER; note = 2'-O-methyladenosine-3'-phosphate
  modified_base 18: mod_base = OTHER; note = 2'-O-methylguanosine-3'-phosphate
  modified_base 19: mod_base = OTHER; note = 2'-O-methylcytidine-3'-phosphate
  modified_base 20: mod_base = OTHER; note = 2'-O-methyladenosine-3'-phosphate
  modified_base 21: mod_base = OTHER; note = 2'-O-methyluridine-3'-phosphate N-[tris(GalNAc-alkyl)-amidodecanoyl)]-4-hydroxyprolinol (Hyp-(GalNAc-alkyl)3)
tgagctgtgagggtcaagcat

SEQ ID NO: 6581 - RNA, 21 nt, synthetic construct
  source 1..21: mol_type = other RNA
  modified_base 1: mod_base = OTHER; note = 2'-O-methylguanosine-3'-phosphorothioate
  modified_base 2: mod_base = OTHER; note = 2'-O-methyladenosine-3'-phosphorothioate
  modified_base 3: mod_base = OTHER; note = 2'-O-methylguanosine-3'-phosphate
  modified_base 4: mod_base = OTHER; note = 2'-O-methylcytidine-3'-phosphate
  modified_base 5: mod_base = OTHER; note = 2'-O-methyluridine-3'-phosphate
  modified_base 6: mod_base = OTHER; note = 2'-O-methylguanosine-3'-phosphate
  modified_base 7: mod_base = OTHER; note = 2'-O-methyluridine-3'-phosphate
  modified_base 8: mod_base = OTHER; note = 2'-O-methylguanosine-3'-phosphate
  modified_base 9: mod_base = OTHER; note = 2'-fluoroadenosine-3'-phosphate
  modified_base 10: mod_base = OTHER; note = 2'-fluoroguanosine-3'-phosphate
  modified_base 11: mod_base = OTHER; note = 2'-fluoroguanosine-3'-phosphate
  modified_base 12: mod_base = OTHER; note = 2'-O-methylguanosine-3'-phosphate
  modified_base 13: mod_base = OTHER; note = 2'-O-methyluridine-3'-phosphate
  modified_base 14: mod_base = OTHER; note = 2'-O-methylcytidine-3'-phosphate
  modified_base 15: mod_base = OTHER; note = 2'-O-methyladenosine-3'-phosphate
  modified_base 16: mod_base = OTHER; note = 2'-O-methyladenosine-3'-phosphate
  modified_base 17: mod_base = OTHER; note = 2'-O-methylguanosine-3'-phosphate
  modified_base 18: mod_base = OTHER; note = 2'-O-methylcytidine-3'-phosphate
  modified_base 19: mod_base = OTHER; note = 2'-O-methyladenosine-3'-phosphate
  modified_base 20: mod_base = OTHER; note = 2'-O-methylcytidine-3'-phosphate
  modified_base 21: mod_base = OTHER; note = 2'-O-methyluridine-3'-phosphate N-[tris(GalNAc-alkyl)-amidodecanoyl)]-4-hydroxyprolinol (Hyp-(GalNAc-alkyl)3)
gagctgtgagggtcaagcact

SEQ ID NO: 6582 - RNA, 21 nt, synthetic construct
  source 1..21: mol_type = other RNA
  modified_base 1: mod_base = OTHER; note = 2'-O-methyladenosine-3'-phosphorothioate
  modified_base 2: mod_base = OTHER; note = 2'-O-methylguanosine-3'-phosphorothioate
  modified_base 3: mod_base = OTHER; note = 2'-O-methylcytidine-3'-phosphate
  modified_base 4: mod_base = OTHER; note = 2'-O-methyluridine-3'-phosphate
  modified_base 5: mod_base = OTHER; note = 2'-O-methylguanosine-3'-phosphate
  modified_base 6: mod_base = OTHER; note = 2'-O-methyluridine-3'-phosphate
  modified_base 7: mod_base = OTHER; note = 2'-O-methylguanosine-3'-phosphate
  modified_base 8: mod_base = OTHER; note = 2'-O-methyladenosine-3'-phosphate
  modified_base 9: mod_base = OTHER; note = 2'-fluoroguanosine-3'-phosphate
  modified_base 10: mod_base = OTHER; note = 2'-fluoroguanosine-3'-phosphate
  modified_base 11: mod_base = OTHER; note = 2'-fluoroguanosine-3'-phosphate
  modified_base 12: mod_base = OTHER; note = 2'-O-methyluridine-3'-phosphate
  modified_base 13: mod_base = OTHER; note = 2'-O-methylcytidine-3'-phosphate
  modified_base 14: mod_base = OTHER; note = 2'-O-methyladenosine-3'-phosphate
  modified_base 15: mod_base = OTHER; note = 2'-O-methyladenosine-3'-phosphate
  modified_base 16: mod_base = OTHER; note = 2'-O-methylguanosine-3'-phosphate
  modified_base 17: mod_base = OTHER; note = 2'-O-methylcytidine-3'-phosphate
  modified_base 18: mod_base = OTHER; note = 2'-O-methyladenosine-3'-phosphate
  modified_base 19: mod_base = OTHER; note = 2'-O-methylcytidine-3'-phosphate
  modified_base 20: mod_base = OTHER; note = 2'-O-methyladenosine-3'-phosphate
  modified_base 21: mod_base = OTHER; note = 2'-O-methyluridine-3'-phosphate N-[tris(GalNAc-alkyl)-amidodecanoyl)]-4-hydroxyprolinol (Hyp-(GalNAc-alkyl)3)
agctgtgagggtcaagcacat

SEQ ID NO: 6583 - RNA, 21 nt, synthetic construct
  source 1..21: mol_type = other RNA
  modified_base 1: mod_base = OTHER; note = 2'-O-methylguanosine-3'-phosphorothioate
  modified_base 2: mod_base = OTHER; note = 2'-O-methylcytidine-3'-phosphorothioate
  modified_base 3: mod_base = OTHER; note = 2'-O-methyluridine-3'-phosphate
  modified_base 4: mod_base = OTHER; note = 2'-O-methylguanosine-3'-phosphate
  modified_base 5: mod_base = OTHER; note = 2'-O-methyluridine-3'-phosphate
  modified_base 6: mod_base = OTHER; note = 2'-O-methylguanosine-3'-phosphate
  modified_base 7: mod_base = OTHER; note = 2'-O-methyladenosine-3'-phosphate
  modified_base 8: mod_base = OTHER; note = 2'-O-methylguanosine-3'-phosphate
  modified_base 9: mod_base = OTHER; note = 2'-fluoroguanosine-3'-phosphate
  modified_base 10: mod_base = OTHER; note = 2'-fluoroguanosine-3'-phosphate
  modified_base 11: mod_base = OTHER; note = 2'-fluorouridine-3'-phosphate
  modified_base 12: mod_base = OTHER; note = 2'-O-methylcytidine-3'-phosphate
  modified_base 13: mod_base = OTHER; note = 2'-O-methyladenosine-3'-phosphate
  modified_base 14: mod_base = OTHER; note = 2'-O-methyladenosine-3'-phosphate
  modified_base 15: mod_base = OTHER; note = 2'-O-methylguanosine-3'-phosphate
  modified_base 16: mod_base = OTHER; note = 2'-O-methylcytidine-3'-phosphate
  modified_base 17: mod_base = OTHER; note = 2'-O-methyladenosine-3'-phosphate
  modified_base 18: mod_base = OTHER; note = 2'-O-methylcytidine-3'-phosphate
  modified_base 19: mod_base = OTHER; note = 2'-O-methyladenosine-3'-phosphate
  modified_base 20: mod_base = OTHER; note = 2'-O-methylguanosine-3'-phosphate
  modified_base 21: mod_base = OTHER; note = 2'-O-methyluridine-3'-phosphate N-[tris(GalNAc-alkyl)-amidodecanoyl)]-4-hydroxyprolinol (Hyp-(GalNAc-alkyl)3)
gctgtgagggtcaagcacagt

SEQ ID NO: 6584 - RNA, 21 nt, synthetic construct
  source 1..21: mol_type = other RNA
  modified_base 1: mod_base = OTHER; note = 2'-O-methylcytidine-3'-phosphorothioate
  modified_base 2: mod_base = OTHER; note = 2'-O-methyluridine-3'-phosphorothioate
  modified_base 3: mod_base = OTHER; note = 2'-O-methylguanosine-3'-phosphate
  modified_base 4: mod_base = OTHER; note = 2'-O-methyluridine-3'-phosphate
  modified_base 5: mod_base = OTHER; note = 2'-O-methylguanosine-3'-phosphate
  modified_base 6: mod_base = OTHER; note = 2'-O-methyladenosine-3'-phosphate
  modified_base 7: mod_base = OTHER; note = 2'-O-methylguanosine-3'-phosphate
  modified_base 8: mod_base = OTHER; note = 2'-O-methylguanosine-3'-phosphate
  modified_base 9: mod_base = OTHER; note = 2'-fluoroguanosine-3'-phosphate
  modified_base 10: mod_base = OTHER; note = 2'-fluorouridine-3'-phosphate
  modified_base 11: mod_base = OTHER; note = 2'-fluorocytidine-3'-phosphate
  modified_base 12: mod_base = OTHER; note = 2'-O-methyladenosine-3'-phosphate
  modified_base 13: mod_base = OTHER; note = 2'-O-methyladenosine-3'-phosphate
  modified_base 14: mod_base = OTHER; note = 2'-O-methylguanosine-3'-phosphate
  modified_base 15: mod_base = OTHER; note = 2'-O-methylcytidine-3'-phosphate
  modified_base 16: mod_base = OTHER; note = 2'-O-methyladenosine-3'-phosphate
  modified_base 17: mod_base = OTHER; note = 2'-O-methylcytidine-3'-phosphate
  modified_base 18: mod_base = OTHER; note = 2'-O-methyladenosine-3'-phosphate
  modified_base 19: mod_base = OTHER; note = 2'-O-methylguanosine-3'-phosphate
  modified_base 20: mod_base = OTHER; note = 2'-O-methylcytidine-3'-phosphate
  modified_base 21: mod_base = OTHER; note = 2'-O-methyluridine-3'-phosphate N-[tris(GalNAc-alkyl)-amidodecanoyl)]-4-hydroxyprolinol (Hyp-(GalNAc-alkyl)3)
ctgtgagggtcaagcacagct

SEQ ID NO: 6585 - RNA, 21 nt, synthetic construct
  source 1..21: mol_type = other RNA
  modified_base 1: mod_base = OTHER; note = 2'-O-methyluridine-3'-phosphorothioate
  modified_base 2: mod_base = OTHER; note = 2'-O-methylguanosine-3'-phosphorothioate
  modified_base 3: mod_base = OTHER; note = 2'-O-methyluridine-3'-phosphate
  modified_base 4: mod_base = OTHER; note = 2'-O-methylguanosine-3'-phosphate
  modified_base 5: mod_base = OTHER; note = 2'-O-methyladenosine-3'-phosphate
  modified_base 6: mod_base = OTHER; note = 2'-O-methylguanosine-3'-phosphate
  modified_base 7: mod_base = OTHER; note = 2'-O-methylguanosine-3'-phosphate
  modified_base 8: mod_base = OTHER; note = 2'-O-methylguanosine-3'-phosphate
  modified_base 9: mod_base = OTHER; note = 2'-fluorouridine-3'-phosphate
  modified_base 10: mod_base = OTHER; note = 2'-fluorocytidine-3'-phosphate
  modified_base 11: mod_base = OTHER; note = 2'-fluoroadenosine-3'-phosphate
  modified_base 12: mod_base = OTHER; note = 2'-O-methyladenosine-3'-phosphate
  modified_base 13: mod_base = OTHER; note = 2'-O-methylguanosine-3'-phosphate
  modified_base 14: mod_base = OTHER; note = 2'-O-methylcytidine-3'-phosphate
  modified_base 15: mod_base = OTHER; note = 2'-O-methyladenosine-3'-phosphate
  modified_base 16: mod_base = OTHER; note = 2'-O-methylcytidine-3'-phosphate
  modified_base 17: mod_base = OTHER; note = 2'-O-methyladenosine-3'-phosphate
  modified_base 18: mod_base = OTHER; note = 2'-O-methylguanosine-3'-phosphate
  modified_base 19: mod_base = OTHER; note = 2'-O-methylcytidine-3'-phosphate
  modified_base 20: mod_base = OTHER; note = 2'-O-methyluridine-3'-phosphate
  modified_base 21: mod_base = OTHER; note = 2'-O-methyluridine-3'-phosphate N-[tris(GalNAc-alkyl)-amidodecanoyl)]-4-hydroxyprolinol (Hyp-(GalNAc-alkyl)3)
tgtgagggtcaagcacagctt

SEQ ID NO: 6586 - RNA, 21 nt, synthetic construct
  source 1..21: mol_type = other RNA
  modified_base 1: mod_base = OTHER; note = 2'-O-methylguanosine-3'-phosphorothioate
  modified_base 2: mod_base = OTHER; note = 2'-O-methyluridine-3'-phosphorothioate
  modified_base 3: mod_base = OTHER; note = 2'-O-methylguanosine-3'-phosphate
  modified_base 4: mod_base = OTHER; note = 2'-O-methyladenosine-3'-phosphate
  modified_base 5: mod_base = OTHER; note = 2'-O-methylguanosine-3'-phosphate
  modified_base 6: mod_base = OTHER; note = 2'-O-methylguanosine-3'-phosphate
  modified_base 7: mod_base = OTHER; note = 2'-O-methylguanosine-3'-phosphate
  modified_base 8: mod_base = OTHER; note = 2'-O-methyluridine-3'-phosphate
  modified_base 9: mod_base = OTHER; note = 2'-fluorocytidine-3'-phosphate
  modified_base 10: mod_base = OTHER; note = 2'-fluoroadenosine-3'-phosphate
  modified_base 11: mod_base = OTHER; note = 2'-fluoroadenosine-3'-phosphate
  modified_base 12: mod_base = OTHER; note = 2'-O-methylguanosine-3'-phosphate
  modified_base 13: mod_base = OTHER; note = 2'-O-methylcytidine-3'-phosphate
  modified_base 14: mod_base = OTHER; note = 2'-O-methyladenosine-3'-phosphate
  modified_base 15: mod_base = OTHER; note = 2'-O-methylcytidine-3'-phosphate
  modified_base 16: mod_base = OTHER; note = 2'-O-methyladenosine-3'-phosphate
  modified_base 17: mod_base = OTHER; note = 2'-O-methylguanosine-3'-phosphate
  modified_base 18: mod_base = OTHER; note = 2'-O-methylcytidine-3'-phosphate
  modified_base 19: mod_base = OTHER; note = 2'-O-methyluridine-3'-phosphate
  modified_base 20: mod_base = OTHER; note = 2'-O-methyladenosine-3'-phosphate
  modified_base 21: mod_base = OTHER; note = 2'-O-methyluridine-3'-phosphate N-[tris(GalNAc-alkyl)-amidodecanoyl)]-4-hydroxyprolinol (Hyp-(GalNAc-alkyl)3)
gtgagggtcaagcacagctat

SEQ ID NO: 6587 - RNA, 21 nt, synthetic construct
  source 1..21: mol_type = other RNA
  modified_base 1: mod_base = OTHER; note = 2'-O-methyluridine-3'-phosphorothioate
  modified_base 2: mod_base = OTHER; note = 2'-O-methylguanosine-3'-phosphorothioate
  modified_base 3: mod_base = OTHER; note = 2'-O-methyladenosine-3'-phosphate
  modified_base 4: mod_base = OTHER; note = 2'-O-methylguanosine-3'-phosphate
  modified_base 5: mod_base = OTHER; note = 2'-O-methylguanosine-3'-phosphate
  modified_base 6: mod_base = OTHER; note = 2'-O-methylguanosine-3'-phosphate
  modified_base 7: mod_base = OTHER; note = 2'-O-methyluridine-3'-phosphate
  modified_base 8: mod_base = OTHER; note = 2'-O-methylcytidine-3'-phosphate
  modified_base 9: mod_base = OTHER; note = 2'-fluoroadenosine-3'-phosphate
  modified_base 10: mod_base = OTHER; note = 2'-fluoroadenosine-3'-phosphate
  modified_base 11: mod_base = OTHER; note = 2'-fluoroguanosine-3'-phosphate
  modified_base 12: mod_base = OTHER; note = 2'-O-methylcytidine-3'-phosphate
  modified_base 13: mod_base = OTHER; note = 2'-O-methyladenosine-3'-phosphate
  modified_base 14: mod_base = OTHER; note = 2'-O-methylcytidine-3'-phosphate
  modified_base 15: mod_base = OTHER; note = 2'-O-methyladenosine-3'-phosphate
  modified_base 16: mod_base = OTHER; note = 2'-O-methylguanosine-3'-phosphate
  modified_base 17: mod_base = OTHER; note = 2'-O-methylcytidine-3'-phosphate
  modified_base 18: mod_base = OTHER; note = 2'-O-methyluridine-3'-phosphate
  modified_base 19: mod_base = OTHER; note = 2'-O-methyladenosine-3'-phosphate
  modified_base 20: mod_base = OTHER; note = 2'-O-methyluridine-3'-phosphate
  modified_base 21: mod_base = OTHER; note = 2'-O-methyluridine-3'-phosphate N-[tris(GalNAc-alkyl)-amidodecanoyl)]-4-hydroxyprolinol (Hyp-(GalNAc-alkyl)3)
tgagggtcaagcacagctatt

SEQ ID NO: 6588 - RNA, 21 nt, synthetic construct
  source 1..21: mol_type = other RNA
  modified_base 1: mod_base = OTHER; note = 2'-O-methylguanosine-3'-phosphorothioate
  modified_base 2: mod_base = OTHER; note = 2'-O-methyladenosine-3'-phosphorothioate
  modified_base 3: mod_base = OTHER; note = 2'-O-methylguanosine-3'-phosphate
  modified_base 4: mod_base = OTHER; note = 2'-O-methylguanosine-3'-phosphate
  modified_base 5: mod_base = OTHER; note = 2'-O-methylguanosine-3'-phosphate
  modified_base 6: mod_base = OTHER; note = 2'-O-methyluridine-3'-phosphate
  modified_base 7: mod_base = OTHER; note = 2'-O-methylcytidine-3'-phosphate
  modified_base 8: mod_base = OTHER; note = 2'-O-methyladenosine-3'-phosphate
  modified_base 9: mod_base = OTHER; note = 2'-fluoroadenosine-3'-phosphate
  modified_base 10: mod_base = OTHER; note = 2'-fluoroguanosine-3'-phosphate
  modified_base 11: mod_base = OTHER; note = 2'-fluorocytidine-3'-phosphate
  modified_base 12: mod_base = OTHER; note = 2'-O-methyladenosine-3'-phosphate
  modified_base 13: mod_base = OTHER; note = 2'-O-methylcytidine-3'-phosphate
  modified_base 14: mod_base = OTHER; note = 2'-O-methyladenosine-3'-phosphate
  modified_base 15: mod_base = OTHER; note = 2'-O-methylguanosine-3'-phosphate
  modified_base 16: mod_base = OTHER; note = 2'-O-methylcytidine-3'-phosphate
  modified_base 17: mod_base = OTHER; note = 2'-O-methyluridine-3'-phosphate
  modified_base 18: mod_base = OTHER; note = 2'-O-methyladenosine-3'-phosphate
  modified_base 19: mod_base = OTHER; note = 2'-O-methyluridine-3'-phosphate
  modified_base 20: mod_base = OTHER; note = 2'-O-methylcytidine-3'-phosphate
  modified_base 21: mod_base = OTHER; note = 2'-O-methyluridine-3'-phosphate N-[tris(GalNAc-alkyl)-amidodecanoyl)]-4-hydroxyprolinol (Hyp-(GalNAc-alkyl)3)
gagggtcaagcacagctatct

SEQ ID NO: 6589 - RNA, 21 nt, synthetic construct
  source 1..21: mol_type = other RNA
  modified_base 1: mod_base = OTHER; note = 2'-O-methyladenosine-3'-phosphorothioate
  modified_base 2: mod_base = OTHER; note = 2'-O-methylguanosine-3'-phosphorothioate
  modified_base 3: mod_base = OTHER; note = 2'-O-methylguanosine-3'-phosphate
  modified_base 4: mod_base = OTHER; note = 2'-O-methylguanosine-3'-phosphate
  modified_base 5: mod_base = OTHER; note = 2'-O-methyluridine-3'-phosphate
  modified_base 6: mod_base = OTHER; note = 2'-O-methylcytidine-3'-phosphate
  modified_base 7: mod_base = OTHER; note = 2'-O-methyladenosine-3'-phosphate
  modified_base 8: mod_base = OTHER; note = 2'-O-methyladenosine-3'-phosphate
  modified_base 9: mod_base = OTHER; note = 2'-fluoroguanosine-3'-phosphate
  modified_base 10: mod_base = OTHER; note = 2'-fluorocytidine-3'-phosphate
  modified_base 11: mod_base = OTHER; note = 2'-fluoroadenosine-3'-phosphate
  modified_base 12: mod_base = OTHER; note = 2'-O-methylcytidine-3'-phosphate
  modified_base 13: mod_base = OTHER; note = 2'-O-methyladenosine-3'-phosphate
  modified_base 14: mod_base = OTHER; note = 2'-O-methylguanosine-3'-phosphate
  modified_base 15: mod_base = OTHER; note = 2'-O-methylcytidine-3'-phosphate
  modified_base 16: mod_base = OTHER; note = 2'-O-methyluridine-3'-phosphate
  modified_base 17: mod_base = OTHER; note = 2'-O-methyladenosine-3'-phosphate
  modified_base 18: mod_base = OTHER; note = 2'-O-methyluridine-3'-phosphate
  modified_base 19: mod_base = OTHER; note = 2'-O-methylcytidine-3'-phosphate
  modified_base 20: mod_base = OTHER; note = 2'-O-methylcytidine-3'-phosphate
  modified_base 21: mod_base = OTHER; note = 2'-O-methyluridine-3'-phosphate N-[tris(GalNAc-alkyl)-amidodecanoyl)]-4-hydroxyprolinol (Hyp-(GalNAc-alkyl)3)
agggtcaagcacagctatcct

SEQ ID NO: 6590 - RNA, 21 nt, synthetic construct
  source 1..21: mol_type = other RNA
  modified_base 1: mod_base = OTHER; note = 2'-O-methylguanosine-3'-phosphorothioate
  modified_base 2: mod_base = OTHER; note = 2'-O-methylguanosine-3'-phosphorothioate
  modified_base 3: mod_base = OTHER; note = 2'-O-methylguanosine-3'-phosphate
  modified_base 4: mod_base = OTHER; note = 2'-O-methyluridine-3'-phosphate
  modified_base 5: mod_base = OTHER; note = 2'-O-methylcytidine-3'-phosphate
  modified_base 6: mod_base = OTHER; note = 2'-O-methyladenosine-3'-phosphate
  modified_base 7: mod_base = OTHER; note = 2'-O-methyladenosine-3'-phosphate
  modified_base 8: mod_base = OTHER; note = 2'-O-methylguanosine-3'-phosphate
  modified_base 9: mod_base = OTHER; note = 2'-fluorocytidine-3'-phosphate
  modified_base 10: mod_base = OTHER; note = 2'-fluoroadenosine-3'-phosphate
  modified_base 11: mod_base = OTHER; note = 2'-fluorocytidine-3'-phosphate
  modified_base 12: mod_base = OTHER; note = 2'-O-methyladenosine-3'-phosphate
  modified_base 13: mod_base = OTHER; note = 2'-O-methylguanosine-3'-phosphate
  modified_base 14: mod_base = OTHER; note = 2'-O-methylcytidine-3'-phosphate
  modified_base 15: mod_base = OTHER; note = 2'-O-methyluridine-3'-phosphate
  modified_base 16: mod_base = OTHER; note = 2'-O-methyladenosine-3'-phosphate
  modified_base 17: mod_base = OTHER; note = 2'-O-methyluridine-3'-phosphate
  modified_base 18: mod_base = OTHER; note = 2'-O-methylcytidine-3'-phosphate
  modified_base 19: mod_base = OTHER; note = 2'-O-methylcytidine-3'-phosphate
  modified_base 20: mod_base = OTHER; note = 2'-O-methyladenosine-3'-phosphate
  modified_base 21: mod_base = OTHER; note = 2'-O-methyluridine-3'-phosphate N-[tris(GalNAc-alkyl)-amidodecanoyl)]-4-hydroxyprolinol (Hyp-(GalNAc-alkyl)3)
gggtcaagcacagctatccat

SEQ ID NO: 6591 - RNA, 21 nt, synthetic construct
  source 1..21: mol_type = other RNA
  modified_base 1: mod_base = OTHER; note = 2'-O-methylcytidine-3'-phosphorothioate
  modified_base 2: mod_base = OTHER; note = 2'-O-methyladenosine-3'-phosphorothioate
  modified_base 3: mod_base = OTHER; note = 2'-O-methyladenosine-3'-phosphate
  modified_base 4: mod_base = OTHER; note = 2'-O-methylguanosine-3'-phosphate
  modified_base 5: mod_base = OTHER; note = 2'-O-methylcytidine-3'-phosphate
  modified_base 6: mod_base = OTHER; note = 2'-O-methyladenosine-3'-phosphate
  modified_base 7: mod_base = OTHER; note = 2'-O-methylcytidine-3'-phosphate
  modified_base 8: mod_base = OTHER; note = 2'-O-methyladenosine-3'-phosphate
  modified_base 9: mod_base = OTHER; note = 2'-fluoroguanosine-3'-phosphate
  modified_base 10: mod_base = OTHER; note = 2'-fluorocytidine-3'-phosphate
  modified_base 11: mod_base = OTHER; note = 2'-fluorouridine-3'-phosphate
  modified_base 12: mod_base = OTHER; note = 2'-O-methyladenosine-3'-phosphate
  modified_base 13: mod_base = OTHER; note = 2'-O-methyluridine-3'-phosphate
  modified_base 14: mod_base = OTHER; note = 2'-O-methylcytidine-3'-phosphate
  modified_base 15: mod_base = OTHER; note = 2'-O-methylcytidine-3'-phosphate
  modified_base 16: mod_base = OTHER; note = 2'-O-methyladenosine-3'-phosphate
  modified_base 17: mod_base = OTHER; note = 2'-O-methyluridine-3'-phosphate
  modified_base 18: mod_base = OTHER; note = 2'-O-methylcytidine-3'-phosphate
  modified_base 19: mod_base = OTHER; note = 2'-O-methyladenosine-3'-phosphate
  modified_base 20: mod_base = OTHER; note = 2'-O-methylguanosine-3'-phosphate
  modified_base 21: mod_base = OTHER; note = 2'-O-methyluridine-3'-phosphate N-[tris(GalNAc-alkyl)-amidodecanoyl)]-4-hydroxyprolinol (Hyp-(GalNAc-alkyl)3)
caagcacagctatccatcagt

SEQ ID NO: 6592 - RNA, 21 nt, synthetic construct
  source 1..21: mol_type = other RNA
  modified_base 1: mod_base = OTHER; note = 2'-O-methyladenosine-3'-phosphorothioate
  modified_base 2: mod_base = OTHER; note = 2'-O-methyladenosine-3'-phosphorothioate
  modified_base 3: mod_base = OTHER; note = 2'-O-methylguanosine-3'-phosphate
  modified_base 4: mod_base = OTHER; note = 2'-O-methylcytidine-3'-phosphate
  modified_base 5: mod_base = OTHER; note = 2'-O-methyladenosine-3'-phosphate
  modified_base 6: mod_base = OTHER; note = 2'-O-methylcytidine-3'-phosphate
  modified_base 7: mod_base = OTHER; note = 2'-O-methyladenosine-3'-phosphate
  modified_base 8: mod_base = OTHER; note = 2'-O-methylguanosine-3'-phosphate
  modified_base 9: mod_base = OTHER; note = 2'-fluorocytidine-3'-phosphate
  modified_base 10: mod_base = OTHER; note = 2'-fluorouridine-3'-phosphate
  modified_base 11: mod_base = OTHER; note = 2'-fluoroadenosine-3'-phosphate
  modified_base 12: mod_base = OTHER; note = 2'-O-methyluridine-3'-phosphate
  modified_base 13: mod_base = OTHER; note = 2'-O-methylcytidine-3'-phosphate
  modified_base 14: mod_base = OTHER; note = 2'-O-methylcytidine-3'-phosphate
  modified_base 15: mod_base = OTHER; note = 2'-O-methyladenosine-3'-phosphate
  modified_base 16: mod_base = OTHER; note = 2'-O-methyluridine-3'-phosphate
  modified_base 17: mod_base = OTHER; note = 2'-O-methylcytidine-3'-phosphate
  modified_base 18: mod_base = OTHER; note = 2'-O-methyladenosine-3'-phosphate
  modified_base 19: mod_base = OTHER; note = 2'-O-methylguanosine-3'-phosphate
  modified_base 20: mod_base = OTHER; note = 2'-O-methyladenosine-3'-phosphate
  modified_base 21: mod_base = OTHER; note = 2'-O-methyluridine-3'-phosphate N-[tris(GalNAc-alkyl)-amidodecanoyl)]-4-hydroxyprolinol (Hyp-(GalNAc-alkyl)3)
aagcacagctatccatcagat

SEQ ID NO: 6593 - RNA, 21 nt, synthetic construct
  source 1..21: mol_type = other RNA
  modified_base 1: mod_base = OTHER; note = 2'-O-methylguanosine-3'-phosphorothioate
  modified_base 2: mod_base = OTHER; note = 2'-O-methylcytidine-3'-phosphorothioate
  modified_base 3: mod_base = OTHER; note = 2'-O-methyladenosine-3'-phosphate
  modified_base 4: mod_base = OTHER; note = 2'-O-methylcytidine-3'-phosphate
  modified_base 5: mod_base = OTHER; note = 2'-O-methyladenosine-3'-phosphate
  modified_base 6: mod_base = OTHER; note = 2'-O-methylguanosine-3'-phosphate
  modified_base 7: mod_base = OTHER; note = 2'-O-methylcytidine-3'-phosphate
  modified_base 8: mod_base = OTHER; note = 2'-O-methyluridine-3'-phosphate
  modified_base 9: mod_base = OTHER; note = 2'-fluoroadenosine-3'-phosphate
  modified_base 10: mod_base = OTHER; note = 2'-fluorouridine-3'-phosphate
  modified_base 11: mod_base = OTHER; note = 2'-fluorocytidine-3'-phosphate
  modified_base 12: mod_base = OTHER; note = 2'-O-methylcytidine-3'-phosphate
  modified_base 13: mod_base = OTHER; note = 2'-O-methyladenosine-3'-phosphate
  modified_base 14: mod_base = OTHER; note = 2'-O-methyluridine-3'-phosphate
  modified_base 15: mod_base = OTHER; note = 2'-O-methylcytidine-3'-phosphate
  modified_base 16: mod_base = OTHER; note = 2'-O-methyladenosine-3'-phosphate
  modified_base 17: mod_base = OTHER; note = 2'-O-methylguanosine-3'-phosphate
  modified_base 18: mod_base = OTHER; note = 2'-O-methyladenosine-3'-phosphate
  modified_base 19: mod_base = OTHER; note = 2'-O-methyluridine-3'-phosphate
  modified_base 20: mod_base = OTHER; note = 2'-O-methylguanosine-3'-phosphate
  modified_base 21: mod_base = OTHER; note = 2'-O-methyluridine-3'-phosphate N-[tris(GalNAc-alkyl)-amidodecanoyl)]-4-hydroxyprolinol (Hyp-(GalNAc-alkyl)3)
gcacagctatccatcagatgt

SEQ ID NO: 6594 - RNA, 21 nt, synthetic construct
  source 1..21: mol_type = other RNA
  modified_base 1: mod_base = OTHER; note = 2'-O-methylcytidine-3'-phosphorothioate
  modified_base 2: mod_base = OTHER; note = 2'-O-methyladenosine-3'-phosphorothioate
  modified_base 3: mod_base = OTHER; note = 2'-O-methylcytidine-3'-phosphate
  modified_base 4: mod_base = OTHER; note = 2'-O-methyladenosine-3'-phosphate
  modified_base 5: mod_base = OTHER; note = 2'-O-methylguanosine-3'-phosphate
  modified_base 6: mod_base = OTHER; note = 2'-O-methylcytidine-3'-phosphate
  modified_base 7: mod_base = OTHER; note = 2'-O-methyluridine-3'-phosphate
  modified_base 8: mod_base = OTHER; note = 2'-O-methyladenosine-3'-phosphate
  modified_base 9: mod_base = OTHER; note = 2'-fluorouridine-3'-phosphate
  modified_base 10: mod_base = OTHER; note = 2'-fluorocytidine-3'-phosphate
  modified_base 11: mod_base = OTHER; note = 2'-fluorocytidine-3'-phosphate
  modified_base 12: mod_base = OTHER; note = 2'-O-methyladenosine-3'-phosphate
  modified_base 13: mod_base = OTHER; note = 2'-O-methyluridine-3'-phosphate
  modified_base 14: mod_base = OTHER; note = 2'-O-methylcytidine-3'-phosphate
  modified_base 15: mod_base = OTHER; note = 2'-O-methyladenosine-3'-phosphate
  modified_base 16: mod_base = OTHER; note = 2'-O-methylguanosine-3'-phosphate
  modified_base 17: mod_base = OTHER; note = 2'-O-methyladenosine-3'-phosphate
  modified_base 18: mod_base = OTHER; note = 2'-O-methyluridine-3'-phosphate
  modified_base 19: mod_base = OTHER; note = 2'-O-methylguanosine-3'-phosphate
  modified_base 20: mod_base = OTHER; note = 2'-O-methyladenosine-3'-phosphate
  modified_base 21: mod_base = OTHER; note = 2'-O-methyluridine-3'-phosphate N-[tris(GalNAc-alkyl)-amidodecanoyl)]-4-hydroxyprolinol (Hyp-(GalNAc-alkyl)3)
cacagctatccatcagatgat

SEQ ID NO: 6595 - RNA, 21 nt, synthetic construct
  source 1..21: mol_type = other RNA
  modified_base 1: mod_base = OTHER; note = 2'-O-methyladenosine-3'-phosphorothioate
  modified_base 2: mod_base = OTHER; note = 2'-O-methylcytidine-3'-phosphorothioate
  modified_base 3: mod_base = OTHER; note = 2'-O-methyladenosine-3'-phosphate
  modified_base 4: mod_base = OTHER; note = 2'-O-methylguanosine-3'-phosphate
  modified_base 5: mod_base = OTHER; note = 2'-O-methylcytidine-3'-phosphate
  modified_base 6: mod_base = OTHER; note = 2'-O-methyluridine-3'-phosphate
  modified_base 7: mod_base = OTHER; note = 2'-O-methyladenosine-3'-phosphate
  modified_base 8: mod_base = OTHER; note = 2'-O-methyluridine-3'-phosphate
  modified_base 9: mod_base = OTHER; note = 2'-fluorocytidine-3'-phosphate
  modified_base 10: mod_base = OTHER; note = 2'-fluorocytidine-3'-phosphate
  modified_base 11: mod_base = OTHER; note = 2'-fluoroadenosine-3'-phosphate
  modified_base 12: mod_base = OTHER; note = 2'-O-methyluridine-3'-phosphate
  modified_base 13: mod_base = OTHER; note = 2'-O-methylcytidine-3'-phosphate
  modified_base 14: mod_base = OTHER; note = 2'-O-methyladenosine-3'-phosphate
  modified_base 15: mod_base = OTHER; note = 2'-O-methylguanosine-3'-phosphate
  modified_base 16: mod_base = OTHER; note = 2'-O-methyladenosine-3'-phosphate
  modified_base 17: mod_base = OTHER; note = 2'-O-methyluridine-3'-phosphate
  modified_base 18: mod_base = OTHER; note = 2'-O-methylguanosine-3'-phosphate
  modified_base 19: mod_base = OTHER; note = 2'-O-methyladenosine-3'-phosphate
  modified_base 20: mod_base = OTHER; note = 2'-O-methyluridine-3'-phosphate
  modified_base 21: mod_base = OTHER; note = 2'-O-methyluridine-3'-phosphate N-[tris(GalNAc-alkyl)-amidodecanoyl)]-4-hydroxyprolinol (Hyp-(GalNAc-alkyl)3)
acagctatccatcagatgatt

SEQ ID NO: 6596 - RNA, 21 nt, synthetic construct
  source 1..21: mol_type = other RNA
  modified_base 1: mod_base = OTHER; note = 2'-O-methylcytidine-3'-phosphorothioate
  modified_base 2: mod_base = OTHER; note = 2'-O-methyladenosine-3'-phosphorothioate
  modified_base 3: mod_base = OTHER; note = 2'-O-methylguanosine-3'-phosphate
  modified_base 4: mod_base = OTHER; note = 2'-O-methylcytidine-3'-phosphate
  modified_base 5: mod_base = OTHER; note = 2'-O-methyluridine-3'-phosphate
  modified_base 6: mod_base = OTHER; note = 2'-O-methyladenosine-3'-phosphate
  modified_base 7: mod_base = OTHER; note = 2'-O-methyluridine-3'-phosphate
  modified_base 8: mod_base = OTHER; note = 2'-O-methylcytidine-3'-phosphate
  modified_base 9: mod_base = OTHER; note = 2'-fluorocytidine-3'-phosphate
  modified_base 10: mod_base = OTHER; note = 2'-fluoroadenosine-3'-phosphate
  modified_base 11: mod_base = OTHER; note = 2'-fluorouridine-3'-phosphate
  modified_base 12: mod_base = OTHER; note = 2'-O-methylcytidine-3'-phosphate
  modified_base 13: mod_base = OTHER; note = 2'-O-methyladenosine-3'-phosphate
  modified_base 14: mod_base = OTHER; note = 2'-O-methylguanosine-3'-phosphate
  modified_base 15: mod_base = OTHER; note = 2'-O-methyladenosine-3'-phosphate
  modified_base 16: mod_base = OTHER; note = 2'-O-methyluridine-3'-phosphate
  modified_base 17: mod_base = OTHER; note = 2'-O-methylguanosine-3'-phosphate
  modified_base 18: mod_base = OTHER; note = 2'-O-methyladenosine-3'-phosphate
  modified_base 19: mod_base = OTHER; note = 2'-O-methyluridine-3'-phosphate
  modified_base 20: mod_base = OTHER; note = 2'-O-methylcytidine-3'-phosphate
  modified_base 21: mod_base = OTHER; note = 2'-O-methyluridine-3'-phosphate N-[tris(GalNAc-alkyl)-amidodecanoyl)]-4-hydroxyprolinol (Hyp-(GalNAc-alkyl)3)
cagctatccatcagatgatct

SEQ ID NO: 6597 - RNA, 21 nt, synthetic construct
  source 1..21: mol_type = other RNA
  modified_base 1: mod_base = OTHER; note = 2'-O-methyladenosine-3'-phosphorothioate
  modified_base 2: mod_base = OTHER; note = 2'-O-methylguanosine-3'-phosphorothioate
  modified_base 3: mod_base = OTHER; note = 2'-O-methylcytidine-3'-phosphate
  modified_base 4: mod_base = OTHER; note = 2'-O-methyluridine-3'-phosphate
  modified_base 5: mod_base = OTHER; note = 2'-O-methyladenosine-3'-phosphate
  modified_base 6: mod_base = OTHER; note = 2'-O-methyluridine-3'-phosphate
  modified_base 7: mod_base = OTHER; note = 2'-O-methylcytidine-3'-phosphate
  modified_base 8: mod_base = OTHER; note = 2'-O-methylcytidine-3'-phosphate
  modified_base 9: mod_base = OTHER; note = 2'-fluoroadenosine-3'-phosphate
  modified_base 10: mod_base = OTHER; note = 2'-fluorouridine-3'-phosphate
  modified_base 11: mod_base = OTHER; note = 2'-fluorocytidine-3'-phosphate
  modified_base 12: mod_base = OTHER; note = 2'-O-methyladenosine-3'-phosphate
  modified_base 13: mod_base = OTHER; note = 2'-O-methylguanosine-3'-phosphate
  modified_base 14: mod_base = OTHER; note = 2'-O-methyladenosine-3'-phosphate
  modified_base 15: mod_base = OTHER; note = 2'-O-methyluridine-3'-phosphate
  modified_base 16: mod_base = OTHER; note = 2'-O-methylguanosine-3'-phosphate
  modified_base 17: mod_base = OTHER; note = 2'-O-methyladenosine-3'-phosphate
  modified_base 18: mod_base = OTHER; note = 2'-O-methyluridine-3'-phosphate
  modified_base 19: mod_base = OTHER; note = 2'-O-methylcytidine-3'-phosphate
  modified_base 20: mod_base = OTHER; note = 2'-O-methyluridine-3'-phosphate
  modified_base 21: mod_base = OTHER; note = 2'-O-methyluridine-3'-phosphate N-[tris(GalNAc-alkyl)-amidodecanoyl)]-4-hydroxyprolinol (Hyp-(GalNAc-alkyl)3)
agctatccatcagatgatctt

SEQ ID NO: 6598 - RNA, 21 nt, synthetic construct
  source 1..21: mol_type = other RNA
  modified_base 1: mod_base = OTHER; note = 2'-O-methylguanosine-3'-phosphorothioate
  modified_base 2: mod_base = OTHER; note = 2'-O-methylcytidine-3'-phosphorothioate
  modified_base 3: mod_base = OTHER; note = 2'-O-methyluridine-3'-phosphate
  modified_base 4: mod_base = OTHER; note = 2'-O-methyladenosine-3'-phosphate
  modified_base 5: mod_base = OTHER; note = 2'-O-methyluridine-3'-phosphate
  modified_base 6: mod_base = OTHER; note = 2'-O-methylcytidine-3'-phosphate
  modified_base 7: mod_base = OTHER; note = 2'-O-methylcytidine-3'-phosphate
  modified_base 8: mod_base = OTHER; note = 2'-O-methyladenosine-3'-phosphate
  modified_base 9: mod_base = OTHER; note = 2'-fluorouridine-3'-phosphate
  modified_base 10: mod_base = OTHER; note = 2'-fluorocytidine-3'-phosphate
  modified_base 11: mod_base = OTHER; note = 2'-fluoroadenosine-3'-phosphate
  modified_base 12: mod_base = OTHER; note = 2'-O-methylguanosine-3'-phosphate
  modified_base 13: mod_base = OTHER; note = 2'-O-methyladenosine-3'-phosphate
  modified_base 14: mod_base = OTHER; note = 2'-O-methyluridine-3'-phosphate
  modified_base 15: mod_base = OTHER; note = 2'-O-methylguanosine-3'-phosphate
  modified_base 16: mod_base = OTHER; note = 2'-O-methyladenosine-3'-phosphate
  modified_base 17: mod_base = OTHER; note = 2'-O-methyluridine-3'-phosphate
  modified_base 18: mod_base = OTHER; note = 2'-O-methylcytidine-3'-phosphate
  modified_base 19: mod_base = OTHER; note = 2'-O-methyluridine-3'-phosphate
  modified_base 20: mod_base = OTHER; note = 2'-O-methyladenosine-3'-phosphate
  modified_base 21: mod_base = OTHER; note = 2'-O-methyluridine-3'-phosphate N-[tris(GalNAc-alkyl)-amidodecanoyl)]-4-hydroxyprolinol (Hyp-(GalNAc-alkyl)3)
gctatccatcagatgatctat

SEQ ID NO: 6599 - RNA, 21 nt, synthetic construct
  source 1..21: mol_type = other RNA
  modified_base 1: mod_base = OTHER; note = 2'-O-methylcytidine-3'-phosphorothioate
  modified_base 2: mod_base = OTHER; note = 2'-O-methyluridine-3'-phosphorothioate
  modified_base 3: mod_base = OTHER; note = 2'-O-methyladenosine-3'-phosphate
  modified_base 4: mod_base = OTHER; note = 2'-O-methyluridine-3'-phosphate
  modified_base 5: mod_base = OTHER; note = 2'-O-methylcytidine-3'-phosphate
  modified_base 6: mod_base = OTHER; note = 2'-O-methylcytidine-3'-phosphate
  modified_base 7: mod_base = OTHER; note = 2'-O-methyladenosine-3'-phosphate
  modified_base 8: mod_base = OTHER; note = 2'-O-methyluridine-3'-phosphate
  modified_base 9: mod_base = OTHER; note = 2'-fluorocytidine-3'-phosphate
  modified_base 10: mod_base = OTHER; note = 2'-fluoroadenosine-3'-phosphate
  modified_base 11: mod_base = OTHER; note = 2'-fluoroguanosine-3'-phosphate
  modified_base 12: mod_base = OTHER; note = 2'-O-methyladenosine-3'-phosphate
  modified_base 13: mod_base = OTHER; note = 2'-O-methyluridine-3'-phosphate
  modified_base 14: mod_base = OTHER; note = 2'-O-methylguanosine-3'-phosphate
  modified_base 15: mod_base = OTHER; note = 2'-O-methyladenosine-3'-phosphate
  modified_base 16: mod_base = OTHER; note = 2'-O-methyluridine-3'-phosphate
  modified_base 17: mod_base = OTHER; note = 2'-O-methylcytidine-3'-phosphate
  modified_base 18: mod_base = OTHER; note = 2'-O-methyluridine-3'-phosphate
  modified_base 19: mod_base = OTHER; note = 2'-O-methyladenosine-3'-phosphate
  modified_base 20: mod_base = OTHER; note = 2'-O-methylcytidine-3'-phosphate
  modified_base 21: mod_base = OTHER; note = 2'-O-methyluridine-3'-phosphate N-[tris(GalNAc-alkyl)-amidodecanoyl)]-4-hydroxyprolinol (Hyp-(GalNAc-alkyl)3)
ctatccatcagatgatctact

SEQ ID NO: 6600 - RNA, 21 nt, synthetic construct
  source 1..21: mol_type = other RNA
  modified_base 1: mod_base = OTHER; note = 2'-O-methyluridine-3'-phosphorothioate
  modified_base 2: mod_base = OTHER; note = 2'-O-methyladenosine-3'-phosphorothioate
  modified_base 3: mod_base = OTHER; note = 2'-O-methyluridine-3'-phosphate
  modified_base 4: mod_base = OTHER; note = 2'-O-methylcytidine-3'-phosphate
  modified_base 5: mod_base = OTHER; note = 2'-O-methylcytidine-3'-phosphate
  modified_base 6: mod_base = OTHER; note = 2'-O-methyladenosine-3'-phosphate
  modified_base 7: mod_base = OTHER; note = 2'-O-methyluridine-3'-phosphate
  modified_base 8: mod_base = OTHER; note = 2'-O-methylcytidine-3'-phosphate
  modified_base 9: mod_base = OTHER; note = 2'-fluoroadenosine-3'-phosphate
  modified_base 10: mod_base = OTHER; note = 2'-fluoroguanosine-3'-phosphate
  modified_base 11: mod_base = OTHER; note = 2'-fluoroadenosine-3'-phosphate
  modified_base 12: mod_base = OTHER; note = 2'-O-methyluridine-3'-phosphate
  modified_base 13: mod_base = OTHER; note = 2'-O-methylguanosine-3'-phosphate
  modified_base 14: mod_base = OTHER; note = 2'-O-methyladenosine-3'-phosphate
  modified_base 15: mod_base = OTHER; note = 2'-O-methyluridine-3'-phosphate
  modified_base 16: mod_base = OTHER; note = 2'-O-methylcytidine-3'-phosphate
  modified_base 17: mod_base = OTHER; note = 2'-O-methyluridine-3'-phosphate
  modified_base 18: mod_base = OTHER; note = 2'-O-methyladenosine-3'-phosphate
  modified_base 19: mod_base = OTHER; note = 2'-O-methylcytidine-3'-phosphate
  modified_base 20: mod_base = OTHER; note = 2'-O-methyluridine-3'-phosphate
  modified_base 21: mod_base = OTHER; note = 2'-O-methyluridine-3'-phosphate N-[tris(GalNAc-alkyl)-amidodecanoyl)]-4-hydroxyprolinol (Hyp-(GalNAc-alkyl)3)
tatccatcagatgatctactt

SEQ ID NO: 6601 - RNA, 21 nt, synthetic construct
  source 1..21: mol_type = other RNA
  modified_base 1: mod_base = OTHER; note = 2'-O-methyladenosine-3'-phosphorothioate
  modified_base 2: mod_base = OTHER; note = 2'-O-methyluridine-3'-phosphorothioate
  modified_base 3: mod_base = OTHER; note = 2'-O-methylcytidine-3'-phosphate
  modified_base 4: mod_base = OTHER; note = 2'-O-methylcytidine-3'-phosphate
  modified_base 5: mod_base = OTHER; note = 2'-O-methyladenosine-3'-phosphate
  modified_base 6: mod_base = OTHER; note = 2'-O-methyluridine-3'-phosphate
  modified_base 7: mod_base = OTHER; note = 2'-O-methylcytidine-3'-phosphate
  modified_base 8: mod_base = OTHER; note = 2'-O-methyladenosine-3'-phosphate
  modified_base 9: mod_base = OTHER; note = 2'-fluoroguanosine-3'-phosphate
  modified_base 10: mod_base = OTHER; note = 2'-fluoroadenosine-3'-phosphate
  modified_base 11: mod_base = OTHER; note = 2'-fluorouridine-3'-phosphate
  modified_base 12: mod_base = OTHER; note = 2'-O-methylguanosine-3'-phosphate
  modified_base 13: mod_base = OTHER; note = 2'-O-methyladenosine-3'-phosphate
  modified_base 14: mod_base = OTHER; note = 2'-O-methyluridine-3'-phosphate
  modified_base 15: mod_base = OTHER; note = 2'-O-methylcytidine-3'-phosphate
  modified_base 16: mod_base = OTHER; note = 2'-O-methyluridine-3'-phosphate
  modified_base 17: mod_base = OTHER; note = 2'-O-methyladenosine-3'-phosphate
  modified_base 18: mod_base = OTHER; note = 2'-O-methylcytidine-3'-phosphate
  modified_base 19: mod_base = OTHER; note = 2'-O-methyluridine-3'-phosphate
  modified_base 20: mod_base = OTHER; note = 2'-O-methyluridine-3'-phosphate
  modified_base 21: mod_base = OTHER; note = 2'-O-methyluridine-3'-phosphate N-[tris(GalNAc-alkyl)-amidodecanoyl)]-4-hydroxyprolinol (Hyp-(GalNAc-alkyl)3)
atccatcagatgatctacttt

SEQ ID NO: 6602 - RNA, 21 nt, synthetic construct
  source 1..21: mol_type = other RNA
  modified_base 1: mod_base = OTHER; note = 2'-O-methyluridine-3'-phosphorothioate
  modified_base 2: mod_base = OTHER; note = 2'-O-methylcytidine-3'-phosphorothioate
  modified_base 3: mod_base = OTHER; note = 2'-O-methylcytidine-3'-phosphate
  modified_base 4: mod_base = OTHER; note = 2'-O-methyladenosine-3'-phosphate
  modified_base 5: mod_base = OTHER; note = 2'-O-methyluridine-3'-phosphate
  modified_base 6: mod_base = OTHER; note = 2'-O-methylcytidine-3'-phosphate
  modified_base 7: mod_base = OTHER; note = 2'-O-methyladenosine-3'-phosphate
  modified_base 8: mod_base = OTHER; note = 2'-O-methylguanosine-3'-phosphate
  modified_base 9: mod_base = OTHER; note = 2'-fluoroadenosine-3'-phosphate
  modified_base 10: mod_base = OTHER; note = 2'-fluorouridine-3'-phosphate
  modified_base 11: mod_base = OTHER; note = 2'-fluoroguanosine-3'-phosphate
  modified_base 12: mod_base = OTHER; note = 2'-O-methyladenosine-3'-phosphate
  modified_base 13: mod_base = OTHER; note = 2'-O-methyluridine-3'-phosphate
  modified_base 14: mod_base = OTHER; note = 2'-O-methylcytidine-3'-phosphate
  modified_base 15: mod_base = OTHER; note = 2'-O-methyluridine-3'-phosphate
  modified_base 16: mod_base = OTHER; note = 2'-O-methyladenosine-3'-phosphate
  modified_base 17: mod_base = OTHER; note = 2'-O-methylcytidine-3'-phosphate
  modified_base 18: mod_base = OTHER; note = 2'-O-methyluridine-3'-phosphate
  modified_base 19: mod_base = OTHER; note = 2'-O-methyluridine-3'-phosphate
  modified_base 20: mod_base = OTHER; note = 2'-O-methyluridine-3'-phosphate
  modified_base 21: mod_base = OTHER; note = 2'-O-methyluridine-3'-phosphate N-[tris(GalNAc-alkyl)-amidodecanoyl)]-4-hydroxyprolinol (Hyp-(GalNAc-alkyl)3)
tccatcagatgatctactttt

SEQ ID NO: 6603 - RNA, 21 nt, synthetic construct
  source 1..21: mol_type = other RNA
  modified_base 1: mod_base = OTHER; note = 2'-O-methylcytidine-3'-phosphorothioate
  modified_base 2: mod_base = OTHER; note = 2'-O-methylcytidine-3'-phosphorothioate
  modified_base 3: mod_base = OTHER; note = 2'-O-methyladenosine-3'-phosphate
  modified_base 4: mod_base = OTHER; note = 2'-O-methyluridine-3'-phosphate
  modified_base 5: mod_base = OTHER; note = 2'-O-methylcytidine-3'-phosphate
  modified_base 6: mod_base = OTHER; note = 2'-O-methyladenosine-3'-phosphate
  modified_base 7: mod_base = OTHER; note = 2'-O-methylguanosine-3'-phosphate
  modified_base 8: mod_base = OTHER; note = 2'-O-methyladenosine-3'-phosphate
  modified_base 9: mod_base = OTHER; note = 2'-fluorouridine-3'-phosphate
  modified_base 10: mod_base = OTHER; note = 2'-fluoroguanosine-3'-phosphate
  modified_base 11: mod_base = OTHER; note = 2'-fluoroadenosine-3'-phosphate
  modified_base 12: mod_base = OTHER; note = 2'-O-methyluridine-3'-phosphate
  modified_base 13: mod_base = OTHER; note = 2'-O-methylcytidine-3'-phosphate
  modified_base 14: mod_base = OTHER; note = 2'-O-methyluridine-3'-phosphate
  modified_base 15: mod_base = OTHER; note = 2'-O-methyladenosine-3'-phosphate
  modified_base 16: mod_base = OTHER; note = 2'-O-methylcytidine-3'-phosphate
  modified_base 17: mod_base = OTHER; note = 2'-O-methyluridine-3'-phosphate
  modified_base 18: mod_base = OTHER; note = 2'-O-methyluridine-3'-phosphate
  modified_base 19: mod_base = OTHER; note = 2'-O-methyluridine-3'-phosphate
  modified_base 20: mod_base = OTHER; note = 2'-O-methylcytidine-3'-phosphate
  modified_base 21: mod_base = OTHER; note = 2'-O-methyluridine-3'-phosphate N-[tris(GalNAc-alkyl)-amidodecanoyl)]-4-hydroxyprolinol (Hyp-(GalNAc-alkyl)3)
ccatcagatgatctactttct

SEQ ID NO: 6604 - RNA, 21 nt, synthetic construct
  source 1..21: mol_type = other RNA
  modified_base 1: mod_base = OTHER; note = 2'-O-methylcytidine-3'-phosphorothioate
  modified_base 2: mod_base = OTHER; note = 2'-O-methyladenosine-3'-phosphorothioate
  modified_base 3: mod_base = OTHER; note = 2'-O-methyluridine-3'-phosphate
  modified_base 4: mod_base = OTHER; note = 2'-O-methylcytidine-3'-phosphate
  modified_base 5: mod_base = OTHER; note = 2'-O-methyladenosine-3'-phosphate
  modified_base 6: mod_base = OTHER; note = 2'-O-methylguanosine-3'-phosphate
  modified_base 7: mod_base = OTHER; note = 2'-O-methyladenosine-3'-phosphate
  modified_base 8: mod_base = OTHER; note = 2'-O-methyluridine-3'-phosphate
  modified_base 9: mod_base = OTHER; note = 2'-fluoroguanosine-3'-phosphate
  modified_base 10: mod_base = OTHER; note = 2'-fluoroadenosine-3'-phosphate
  modified_base 11: mod_base = OTHER; note = 2'-fluorouridine-3'-phosphate
  modified_base 12: mod_base = OTHER; note = 2'-O-methylcytidine-3'-phosphate
  modified_base 13: mod_base = OTHER; note = 2'-O-methyluridine-3'-phosphate
  modified_base 14: mod_base = OTHER; note = 2'-O-methyladenosine-3'-phosphate
  modified_base 15: mod_base = OTHER; note = 2'-O-methylcytidine-3'-phosphate
  modified_base 16: mod_base = OTHER; note = 2'-O-methyluridine-3'-phosphate
  modified_base 17: mod_base = OTHER; note = 2'-O-methyluridine-3'-phosphate
  modified_base 18: mod_base = OTHER; note = 2'-O-methyluridine-3'-phosphate
  modified_base 19: mod_base = OTHER; note = 2'-O-methylcytidine-3'-phosphate
  modified_base 20: mod_base = OTHER; note = 2'-O-methyladenosine-3'-phosphate
  modified_base 21: mod_base = OTHER; note = 2'-O-methyluridine-3'-phosphate N-[tris(GalNAc-alkyl)-amidodecanoyl)]-4-hydroxyprolinol (Hyp-(GalNAc-alkyl)3)
catcagatgatctactttcat

SEQ ID NO: 6605 - RNA, 21 nt, synthetic construct
  source 1..21: mol_type = other RNA
  modified_base 1: mod_base = OTHER; note = 2'-O-methyladenosine-3'-phosphorothioate
  modified_base 2: mod_base = OTHER; note = 2'-O-methyluridine-3'-phosphorothioate
  modified_base 3: mod_base = OTHER; note = 2'-O-methylcytidine-3'-phosphate
  modified_base 4: mod_base = OTHER; note = 2'-O-methyladenosine-3'-phosphate
  modified_base 5: mod_base = OTHER; note = 2'-O-methylguanosine-3'-phosphate
  modified_base 6: mod_base = OTHER; note = 2'-O-methyladenosine-3'-phosphate
  modified_base 7: mod_base = OTHER; note = 2'-O-methyluridine-3'-phosphate
  modified_base 8: mod_base = OTHER; note = 2'-O-methylguanosine-3'-phosphate
  modified_base 9: mod_base = OTHER; note = 2'-fluoroadenosine-3'-phosphate
  modified_base 10: mod_base = OTHER; note = 2'-fluorouridine-3'-phosphate
  modified_base 11: mod_base = OTHER; note = 2'-fluorocytidine-3'-phosphate
  modified_base 12: mod_base = OTHER; note = 2'-O-methyluridine-3'-phosphate
  modified_base 13: mod_base = OTHER; note = 2'-O-methyladenosine-3'-phosphate
  modified_base 14: mod_base = OTHER; note = 2'-O-methylcytidine-3'-phosphate
  modified_base 15: mod_base = OTHER; note = 2'-O-methyluridine-3'-phosphate
  modified_base 16: mod_base = OTHER; note = 2'-O-methyluridine-3'-phosphate
  modified_base 17: mod_base = OTHER; note = 2'-O-methyluridine-3'-phosphate
  modified_base 18: mod_base = OTHER; note = 2'-O-methylcytidine-3'-phosphate
  modified_base 19: mod_base = OTHER; note = 2'-O-methyladenosine-3'-phosphate
  modified_base 20: mod_base = OTHER; note = 2'-O-methylguanosine-3'-phosphate
  modified_base 21: mod_base = OTHER; note = 2'-O-methyluridine-3'-phosphate N-[tris(GalNAc-alkyl)-amidodecanoyl)]-4-hydroxyprolinol (Hyp-(GalNAc-alkyl)3)
atcagatgatctactttcagt

SEQ ID NO: 6606 - RNA, 21 nt, synthetic construct
  source 1..21: mol_type = other RNA
  modified_base 1: mod_base = OTHER; note = 2'-O-methyluridine-3'-phosphorothioate
  modified_base 2: mod_base = OTHER; note = 2'-O-methylcytidine-3'-phosphorothioate
  modified_base 3: mod_base = OTHER; note = 2'-O-methyladenosine-3'-phosphate
  modified_base 4: mod_base = OTHER; note = 2'-O-methylguanosine-3'-phosphate
  modified_base 5: mod_base = OTHER; note = 2'-O-methyladenosine-3'-phosphate
  modified_base 6: mod_base = OTHER; note = 2'-O-methyluridine-3'-phosphate
  modified_base 7: mod_base = OTHER; note = 2'-O-methylguanosine-3'-phosphate
  modified_base 8: mod_base = OTHER; note = 2'-O-methyladenosine-3'-phosphate
  modified_base 9: mod_base = OTHER; note = 2'-fluorouridine-3'-phosphate
  modified_base 10: mod_base = OTHER; note = 2'-fluorocytidine-3'-phosphate
  modified_base 11: mod_base = OTHER; note = 2'-fluorouridine-3'-phosphate
  modified_base 12: mod_base = OTHER; note = 2'-O-methyladenosine-3'-phosphate
  modified_base 13: mod_base = OTHER; note = 2'-O-methylcytidine-3'-phosphate
  modified_base 14: mod_base = OTHER; note = 2'-O-methyluridine-3'-phosphate
  modified_base 15: mod_base = OTHER; note = 2'-O-methyluridine-3'-phosphate
  modified_base 16: mod_base = OTHER; note = 2'-O-methyluridine-3'-phosphate
  modified_base 17: mod_base = OTHER; note = 2'-O-methylcytidine-3'-phosphate
  modified_base 18: mod_base = OTHER; note = 2'-O-methyladenosine-3'-phosphate
  modified_base 19: mod_base = OTHER; note = 2'-O-methylguanosine-3'-phosphate
  modified_base 20: mod_base = OTHER; note = 2'-O-methylcytidine-3'-phosphate
  modified_base 21: mod_base = OTHER; note = 2'-O-methyluridine-3'-phosphate N-[tris(GalNAc-alkyl)-amidodecanoyl)]-4-hydroxyprolinol (Hyp-(GalNAc-alkyl)3)
tcagatgatctactttcagct

SEQ ID NO: 6607 - RNA, 21 nt, synthetic construct
  source 1..21: mol_type = other RNA
  modified_base 1: mod_base = OTHER; note = 2'-O-methylcytidine-3'-phosphorothioate
  modified_base 2: mod_base = OTHER; note = 2'-O-methyladenosine-3'-phosphorothioate
  modified_base 3: mod_base = OTHER; note = 2'-O-methylguanosine-3'-phosphate
  modified_base 4: mod_base = OTHER; note = 2'-O-methyladenosine-3'-phosphate
  modified_base 5: mod_base = OTHER; note = 2'-O-methyluridine-3'-phosphate
  modified_base 6: mod_base = OTHER; note = 2'-O-methylguanosine-3'-phosphate
  modified_base 7: mod_base = OTHER; note = 2'-O-methyladenosine-3'-phosphate
  modified_base 8: mod_base = OTHER; note = 2'-O-methyluridine-3'-phosphate
  modified_base 9: mod_base = OTHER; note = 2'-fluorocytidine-3'-phosphate
  modified_base 10: mod_base = OTHER; note = 2'-fluorouridine-3'-phosphate
  modified_base 11: mod_base = OTHER; note = 2'-fluoroadenosine-3'-phosphate
  modified_base 12: mod_base = OTHER; note = 2'-O-methylcytidine-3'-phosphate
  modified_base 13: mod_base = OTHER; note = 2'-O-methyluridine-3'-phosphate
  modified_base 14: mod_base = OTHER; note = 2'-O-methyluridine-3'-phosphate
  modified_base 15: mod_base = OTHER; note = 2'-O-methyluridine-3'-phosphate
  modified_base 16: mod_base = OTHER; note = 2'-O-methylcytidine-3'-phosphate
  modified_base 17: mod_base = OTHER; note = 2'-O-methyladenosine-3'-phosphate
  modified_base 18: mod_base = OTHER; note = 2'-O-methylguanosine-3'-phosphate
  modified_base 19: mod_base = OTHER; note = 2'-O-methylcytidine-3'-phosphate
  modified_base 20: mod_base = OTHER; note = 2'-O-methylcytidine-3'-phosphate
  modified_base 21: mod_base = OTHER; note = 2'-O-methyluridine-3'-phosphate N-[tris(GalNAc-alkyl)-amidodecanoyl)]-4-hydroxyprolinol (Hyp-(GalNAc-alkyl)3)
cagatgatctactttcagcct

SEQ ID NO: 6608 - RNA, 21 nt, synthetic construct
  source 1..21: mol_type = other RNA
  modified_base 1: mod_base = OTHER; note = 2'-O-methyladenosine-3'-phosphorothioate
  modified_base 2: mod_base = OTHER; note = 2'-O-methylguanosine-3'-phosphorothioate
  modified_base 3: mod_base = OTHER; note = 2'-O-methyladenosine-3'-phosphate
  modified_base 4: mod_base = OTHER; note = 2'-O-methyluridine-3'-phosphate
  modified_base 5: mod_base = OTHER; note = 2'-O-methylguanosine-3'-phosphate
  modified_base 6: mod_base = OTHER; note = 2'-O-methyladenosine-3'-phosphate
  modified_base 7: mod_base = OTHER; note = 2'-O-methyluridine-3'-phosphate
  modified_base 8: mod_base = OTHER; note = 2'-O-methylcytidine-3'-phosphate
  modified_base 9: mod_base = OTHER; note = 2'-fluorouridine-3'-phosphate
  modified_base 10: mod_base = OTHER; note = 2'-fluoroadenosine-3'-phosphate
  modified_base 11: mod_base = OTHER; note = 2'-fluorocytidine-3'-phosphate
  modified_base 12: mod_base = OTHER; note = 2'-O-methyluridine-3'-phosphate
  modified_base 13: mod_base = OTHER; note = 2'-O-methyluridine-3'-phosphate
  modified_base 14: mod_base = OTHER; note = 2'-O-methyluridine-3'-phosphate
  modified_base 15: mod_base = OTHER; note = 2'-O-methylcytidine-3'-phosphate
  modified_base 16: mod_base = OTHER; note = 2'-O-methyladenosine-3'-phosphate
  modified_base 17: mod_base = OTHER; note = 2'-O-methylguanosine-3'-phosphate
  modified_base 18: mod_base = OTHER; note = 2'-O-methylcytidine-3'-phosphate
  modified_base 19: mod_base = OTHER; note = 2'-O-methylcytidine-3'-phosphate
  modified_base 20: mod_base = OTHER; note = 2'-O-methyluridine-3'-phosphate
  modified_base 21: mod_base = OTHER; note = 2'-O-methyluridine-3'-phosphate N-[tris(GalNAc-alkyl)-amidodecanoyl)]-4-hydroxyprolinol (Hyp-(GalNAc-alkyl)3)
agatgatctactttcagcctt

SEQ ID NO: 6609 - RNA, 21 nt, synthetic construct
  source 1..21: mol_type = other RNA
  modified_base 1: mod_base = OTHER; note = 2'-O-methylguanosine-3'-phosphorothioate
  modified_base 2: mod_base = OTHER; note = 2'-O-methyladenosine-3'-phosphorothioate
  modified_base 3: mod_base = OTHER; note = 2'-O-methyluridine-3'-phosphate
  modified_base 4: mod_base = OTHER; note = 2'-O-methylguanosine-3'-phosphate
  modified_base 5: mod_base = OTHER; note = 2'-O-methyladenosine-3'-phosphate
  modified_base 6: mod_base = OTHER; note = 2'-O-methyluridine-3'-phosphate
  modified_base 7: mod_base = OTHER; note = 2'-O-methylcytidine-3'-phosphate
  modified_base 8: mod_base = OTHER; note = 2'-O-methyluridine-3'-phosphate
  modified_base 9: mod_base = OTHER; note = 2'-fluoroadenosine-3'-phosphate
  modified_base 10: mod_base = OTHER; note = 2'-fluorocytidine-3'-phosphate
  modified_base 11: mod_base = OTHER; note = 2'-fluorouridine-3'-phosphate
  modified_base 12: mod_base = OTHER; note = 2'-O-methyluridine-3'-phosphate
  modified_base 13: mod_base = OTHER; note = 2'-O-methyluridine-3'-phosphate
  modified_base 14: mod_base = OTHER; note = 2'-O-methylcytidine-3'-phosphate
  modified_base 15: mod_base = OTHER; note = 2'-O-methyladenosine-3'-phosphate
  modified_base 16: mod_base = OTHER; note = 2'-O-methylguanosine-3'-phosphate
  modified_base 17: mod_base = OTHER; note = 2'-O-methylcytidine-3'-phosphate
  modified_base 18: mod_base = OTHER; note = 2'-O-methylcytidine-3'-phosphate
  modified_base 19: mod_base = OTHER; note = 2'-O-methyluridine-3'-phosphate
  modified_base 20: mod_base = OTHER; note = 2'-O-methyluridine-3'-phosphate
  modified_base 21: mod_base = OTHER; note = 2'-O-methyluridine-3'-phosphate N-[tris(GalNAc-alkyl)-amidodecanoyl)]-4-hydroxyprolinol (Hyp-(GalNAc-alkyl)3)
gatgatctactttcagccttt

SEQ ID NO: 6610 - RNA, 21 nt, synthetic construct
  source 1..21: mol_type = other RNA
  modified_base 1: mod_base = OTHER; note = 2'-O-methyladenosine-3'-phosphorothioate
  modified_base 2: mod_base = OTHER; note = 2'-O-methyluridine-3'-phosphorothioate
  modified_base 3: mod_base = OTHER; note = 2'-O-methylguanosine-3'-phosphate
  modified_base 4: mod_base = OTHER; note = 2'-O-methyladenosine-3'-phosphate
  modified_base 5: mod_base = OTHER; note = 2'-O-methyluridine-3'-phosphate
  modified_base 6: mod_base = OTHER; note = 2'-O-methylcytidine-3'-phosphate
  modified_base 7: mod_base = OTHER; note = 2'-O-methyluridine-3'-phosphate
  modified_base 8: mod_base = OTHER; note = 2'-O-methyladenosine-3'-phosphate
  modified_base 9: mod_base = OTHER; note = 2'-fluorocytidine-3'-phosphate
  modified_base 10: mod_base = OTHER; note = 2'-fluorouridine-3'-phosphate
  modified_base 11: mod_base = OTHER; note = 2'-fluorouridine-3'-phosphate
  modified_base 12: mod_base = OTHER; note = 2'-O-methyluridine-3'-phosphate
  modified_base 13: mod_base = OTHER; note = 2'-O-methylcytidine-3'-phosphate
  modified_base 14: mod_base = OTHER; note = 2'-O-methyladenosine-3'-phosphate
  modified_base 15: mod_base = OTHER; note = 2'-O-methylguanosine-3'-phosphate
  modified_base 16: mod_base = OTHER; note = 2'-O-methylcytidine-3'-phosphate
  modified_base 17: mod_base = OTHER; note = 2'-O-methylcytidine-3'-phosphate
  modified_base 18: mod_base = OTHER; note = 2'-O-methyluridine-3'-phosphate
  modified_base 19: mod_base = OTHER; note = 2'-O-methyluridine-3'-phosphate
  modified_base 20: mod_base = OTHER; note = 2'-O-methylcytidine-3'-phosphate
  modified_base 21: mod_base = OTHER; note = 2'-O-methyluridine-3'-phosphate N-[tris(GalNAc-alkyl)-amidodecanoyl)]-4-hydroxyprolinol (Hyp-(GalNAc-alkyl)3)
atgatctactttcagccttct

SEQ ID NO: 6611 - RNA, 21 nt, synthetic construct
  source 1..21: mol_type = other RNA
  modified_base 1: mod_base = OTHER; note = 2'-O-methyluridine-3'-phosphorothioate
  modified_base 2: mod_base = OTHER; note = 2'-O-methylguanosine-3'-phosphorothioate
  modified_base 3: mod_base = OTHER; note = 2'-O-methyladenosine-3'-phosphate
  modified_base 4: mod_base = OTHER; note = 2'-O-methyluridine-3'-phosphate
  modified_base 5: mod_base = OTHER; note = 2'-O-methylcytidine-3'-phosphate
  modified_base 6: mod_base = OTHER; note = 2'-O-methyluridine-3'-phosphate
  modified_base 7: mod_base = OTHER; note = 2'-O-methyladenosine-3'-phosphate
  modified_base 8: mod_base = OTHER; note = 2'-O-methylcytidine-3'-phosphate
  modified_base 9: mod_base = OTHER; note = 2'-fluorouridine-3'-phosphate
  modified_base 10: mod_base = OTHER; note = 2'-fluorouridine-3'-phosphate
  modified_base 11: mod_base = OTHER; note = 2'-fluorouridine-3'-phosphate
  modified_base 12: mod_base = OTHER; note = 2'-O-methylcytidine-3'-phosphate
  modified_base 13: mod_base = OTHER; note = 2'-O-methyladenosine-3'-phosphate
  modified_base 14: mod_base = OTHER; note = 2'-O-methylguanosine-3'-phosphate
  modified_base 15: mod_base = OTHER; note = 2'-O-methylcytidine-3'-phosphate
  modified_base 16: mod_base = OTHER; note = 2'-O-methylcytidine-3'-phosphate
  modified_base 17: mod_base = OTHER; note = 2'-O-methyluridine-3'-phosphate
  modified_base 18: mod_base = OTHER; note = 2'-O-methyluridine-3'-phosphate
  modified_base 19: mod_base = OTHER; note = 2'-O-methylcytidine-3'-phosphate
  modified_base 20: mod_base = OTHER; note = 2'-O-methylcytidine-3'-phosphate
  modified_base 21: mod_base = OTHER; note = 2'-O-methyluridine-3'-phosphate N-[tris(GalNAc-alkyl)-amidodecanoyl)]-4-hydroxyprolinol (Hyp-(GalNAc-alkyl)3)
tgatctactttcagccttcct

SEQ ID NO: 6612 - RNA, 21 nt, synthetic construct
  source 1..21: mol_type = other RNA
  modified_base 1: mod_base = OTHER; note = 2'-O-methylguanosine-3'-phosphorothioate
  modified_base 2: mod_base = OTHER; note = 2'-O-methyladenosine-3'-phosphorothioate
  modified_base 3: mod_base = OTHER; note = 2'-O-methyluridine-3'-phosphate
  modified_base 4: mod_base = OTHER; note = 2'-O-methylcytidine-3'-phosphate
  modified_base 5: mod_base = OTHER; note = 2'-O-methyluridine-3'-phosphate
  modified_base 6: mod_base = OTHER; note = 2'-O-methyladenosine-3'-phosphate
  modified_base 7: mod_base = OTHER; note = 2'-O-methylcytidine-3'-phosphate
  modified_base 8: mod_base = OTHER; note = 2'-O-methyluridine-3'-phosphate
  modified_base 9: mod_base = OTHER; note = 2'-fluorouridine-3'-phosphate
  modified_base 10: mod_base = OTHER; note = 2'-fluorouridine-3'-phosphate
  modified_base 11: mod_base = OTHER; note = 2'-fluorocytidine-3'-phosphate
  modified_base 12: mod_base = OTHER; note = 2'-O-methyladenosine-3'-phosphate
  modified_base 13: mod_base = OTHER; note = 2'-O-methylguanosine-3'-phosphate
  modified_base 14: mod_base = OTHER; note = 2'-O-methylcytidine-3'-phosphate
  modified_base 15: mod_base = OTHER; note = 2'-O-methylcytidine-3'-phosphate
  modified_base 16: mod_base = OTHER; note = 2'-O-methyluridine-3'-phosphate
  modified_base 17: mod_base = OTHER; note = 2'-O-methyluridine-3'-phosphate
  modified_base 18: mod_base = OTHER; note = 2'-O-methylcytidine-3'-phosphate
  modified_base 19: mod_base = OTHER; note = 2'-O-methylcytidine-3'-phosphate
  modified_base 20: mod_base = OTHER; note = 2'-O-methyluridine-3'-phosphate
  modified_base 21: mod_base = OTHER; note = 2'-O-methyluridine-3'-phosphate N-[tris(GalNAc-alkyl)-amidodecanoyl)]-4-hydroxyprolinol (Hyp-(GalNAc-alkyl)3)
gatctactttcagccttcctt

SEQ ID NO: 6613 - RNA, 21 nt, synthetic construct
  source 1..21: mol_type = other RNA
  modified_base 1: mod_base = OTHER; note = 2'-O-methyladenosine-3'-phosphorothioate
  modified_base 2: mod_base = OTHER; note = 2'-O-methyluridine-3'-phosphorothioate
  modified_base 3: mod_base = OTHER; note = 2'-O-methylcytidine-3'-phosphate
  modified_base 4: mod_base = OTHER; note = 2'-O-methyluridine-3'-phosphate
  modified_base 5: mod_base = OTHER; note = 2'-O-methyladenosine-3'-phosphate
  modified_base 6: mod_base = OTHER; note = 2'-O-methylcytidine-3'-phosphate
  modified_base 7: mod_base = OTHER; note = 2'-O-methyluridine-3'-phosphate
  modified_base 8: mod_base = OTHER; note = 2'-O-methyluridine-3'-phosphate
  modified_base 9: mod_base = OTHER; note = 2'-fluorouridine-3'-phosphate
  modified_base 10: mod_base = OTHER; note = 2'-fluorocytidine-3'-phosphate
  modified_base 11: mod_base = OTHER; note = 2'-fluoroadenosine-3'-phosphate
  modified_base 12: mod_base = OTHER; note = 2'-O-methylguanosine-3'-phosphate
  modified_base 13: mod_base = OTHER; note = 2'-O-methylcytidine-3'-phosphate
  modified_base 14: mod_base = OTHER; note = 2'-O-methylcytidine-3'-phosphate
  modified_base 15: mod_base = OTHER; note = 2'-O-methyluridine-3'-phosphate
  modified_base 16: mod_base = OTHER; note = 2'-O-methyluridine-3'-phosphate
  modified_base 17: mod_base = OTHER; note = 2'-O-methylcytidine-3'-phosphate
  modified_base 18: mod_base = OTHER; note = 2'-O-methylcytidine-3'-phosphate
  modified_base 19: mod_base = OTHER; note = 2'-O-methyluridine-3'-phosphate
  modified_base 20: mod_base = OTHER; note = 2'-O-methylguanosine-3'-phosphate
  modified_base 21: mod_base = OTHER; note = 2'-O-methyluridine-3'-phosphate N-[tris(GalNAc-alkyl)-amidodecanoyl)]-4-hydroxyprolinol (Hyp-(GalNAc-alkyl)3)
atctactttcagccttcctgt

SEQ ID NO: 6614 - RNA, 21 nt, synthetic construct
  source 1..21: mol_type = other RNA
  modified_base 1: mod_base = OTHER; note = 2'-O-methyluridine-3'-phosphorothioate
  modified_base 2: mod_base = OTHER; note = 2'-O-methylcytidine-3'-phosphorothioate
  modified_base 3: mod_base = OTHER; note = 2'-O-methyluridine-3'-phosphate
  modified_base 4: mod_base = OTHER; note = 2'-O-methyladenosine-3'-phosphate
  modified_base 5: mod_base = OTHER; note = 2'-O-methylcytidine-3'-phosphate
  modified_base 6: mod_base = OTHER; note = 2'-O-methyluridine-3'-phosphate
  modified_base 7: mod_base = OTHER; note = 2'-O-methyluridine-3'-phosphate
  modified_base 8: mod_base = OTHER; note = 2'-O-methyluridine-3'-phosphate
  modified_base 9: mod_base = OTHER; note = 2'-fluorocytidine-3'-phosphate
  modified_base 10: mod_base = OTHER; note = 2'-fluoroadenosine-3'-phosphate
  modified_base 11: mod_base = OTHER; note = 2'-fluoroguanosine-3'-phosphate
  modified_base 12: mod_base = OTHER; note = 2'-O-methylcytidine-3'-phosphate
  modified_base 13: mod_base = OTHER; note = 2'-O-methylcytidine-3'-phosphate
  modified_base 14: mod_base = OTHER; note = 2'-O-methyluridine-3'-phosphate
  modified_base 15: mod_base = OTHER; note = 2'-O-methyluridine-3'-phosphate
  modified_base 16: mod_base = OTHER; note = 2'-O-methylcytidine-3'-phosphate
  modified_base 17: mod_base = OTHER; note = 2'-O-methylcytidine-3'-phosphate
  modified_base 18: mod_base = OTHER; note = 2'-O-methyluridine-3'-phosphate
  modified_base 19: mod_base = OTHER; note = 2'-O-methylguanosine-3'-phosphate
  modified_base 20: mod_base = OTHER; note = 2'-O-methyladenosine-3'-phosphate
  modified_base 21: mod_base = OTHER; note = 2'-O-methyluridine-3'-phosphate N-[tris(GalNAc-alkyl)-amidodecanoyl)]-4-hydroxyprolinol (Hyp-(GalNAc-alkyl)3)
tctactttcagccttcctgat

SEQ ID NO: 6615 - RNA, 21 nt, synthetic construct
  source 1..21: mol_type = other RNA
  modified_base 1: mod_base = OTHER; note = 2'-O-methylcytidine-3'-phosphorothioate
  modified_base 2: mod_base = OTHER; note = 2'-O-methyluridine-3'-phosphorothioate
  modified_base 3: mod_base = OTHER; note = 2'-O-methyladenosine-3'-phosphate
  modified_base 4: mod_base = OTHER; note = 2'-O-methylcytidine-3'-phosphate
  modified_base 5: mod_base = OTHER; note = 2'-O-methyluridine-3'-phosphate
  modified_base 6: mod_base = OTHER; note = 2'-O-methyluridine-3'-phosphate
  modified_base 7: mod_base = OTHER; note = 2'-O-methyluridine-3'-phosphate
  modified_base 8: mod_base = OTHER; note = 2'-O-methylcytidine-3'-phosphate
  modified_base 9: mod_base = OTHER; note = 2'-fluoroadenosine-3'-phosphate
  modified_base 10: mod_base = OTHER; note = 2'-fluoroguanosine-3'-phosphate
  modified_base 11: mod_base = OTHER; note = 2'-fluorocytidine-3'-phosphate
  modified_base 12: mod_base = OTHER; note = 2'-O-methylcytidine-3'-phosphate
  modified_base 13: mod_base = OTHER; note = 2'-O-methyluridine-3'-phosphate
  modified_base 14: mod_base = OTHER; note = 2'-O-methyluridine-3'-phosphate
  modified_base 15: mod_base = OTHER; note = 2'-O-methylcytidine-3'-phosphate
  modified_base 16: mod_base = OTHER; note = 2'-O-methylcytidine-3'-phosphate
  modified_base 17: mod_base = OTHER; note = 2'-O-methyluridine-3'-phosphate
  modified_base 18: mod_base = OTHER; note = 2'-O-methylguanosine-3'-phosphate
  modified_base 19: mod_base = OTHER; note = 2'-O-methyladenosine-3'-phosphate
  modified_base 20: mod_base = OTHER; note = 2'-O-methylguanosine-3'-phosphate
  modified_base 21: mod_base = OTHER; note = 2'-O-methyluridine-3'-phosphate N-[tris(GalNAc-alkyl)-amidodecanoyl)]-4-hydroxyprolinol (Hyp-(GalNAc-alkyl)3)
ctactttcagccttcctgagt

SEQ ID NO: 6616 - RNA, 21 nt, synthetic construct
  source 1..21: mol_type = other RNA
  modified_base 1: mod_base = OTHER; note = 2'-O-methyluridine-3'-phosphorothioate
  modified_base 2: mod_base = OTHER; note = 2'-O-methyladenosine-3'-phosphorothioate
  modified_base 3: mod_base = OTHER; note = 2'-O-methylcytidine-3'-phosphate
  modified_base 4: mod_base = OTHER; note = 2'-O-methyluridine-3'-phosphate
  modified_base 5: mod_base = OTHER; note = 2'-O-methyluridine-3'-phosphate
  modified_base 6: mod_base = OTHER; note = 2'-O-methyluridine-3'-phosphate
  modified_base 7: mod_base = OTHER; note = 2'-O-methylcytidine-3'-phosphate
  modified_base 8: mod_base = OTHER; note = 2'-O-methyladenosine-3'-phosphate
  modified_base 9: mod_base = OTHER; note = 2'-fluoroguanosine-3'-phosphate
  modified_base 10: mod_base = OTHER; note = 2'-fluorocytidine-3'-phosphate
  modified_base 11: mod_base = OTHER; note = 2'-fluorocytidine-3'-phosphate
  modified_base 12: mod_base = OTHER; note = 2'-O-methyluridine-3'-phosphate
  modified_base 13: mod_base = OTHER; note = 2'-O-methyluridine-3'-phosphate
  modified_base 14: mod_base = OTHER; note = 2'-O-methylcytidine-3'-phosphate
  modified_base 15: mod_base = OTHER; note = 2'-O-methylcytidine-3'-phosphate
  modified_base 16: mod_base = OTHER; note = 2'-O-methyluridine-3'-phosphate
  modified_base 17: mod_base = OTHER; note = 2'-O-methylguanosine-3'-phosphate
  modified_base 18: mod_base = OTHER; note = 2'-O-methyladenosine-3'-phosphate
  modified_base 19: mod_base = OTHER; note = 2'-O-methylguanosine-3'-phosphate
  modified_base 20: mod_base = OTHER; note = 2'-O-methyluridine-3'-phosphate
  modified_base 21: mod_base = OTHER; note = 2'-O-methyluridine-3'-phosphate N-[tris(GalNAc-alkyl)-amidodecanoyl)]-4-hydroxyprolinol (Hyp-(GalNAc-alkyl)3)
tactttcagccttcctgagtt

SEQ ID NO: 6617 - RNA, 21 nt, synthetic construct
  source 1..21: mol_type = other RNA
  modified_base 1: mod_base = OTHER; note = 2'-O-methyladenosine-3'-phosphorothioate
  modified_base 2: mod_base = OTHER; note = 2'-O-methylcytidine-3'-phosphorothioate
  modified_base 3: mod_base = OTHER; note = 2'-O-methyluridine-3'-phosphate
  modified_base 4: mod_base = OTHER; note = 2'-O-methyluridine-3'-phosphate
  modified_base 5: mod_base = OTHER; note = 2'-O-methyluridine-3'-phosphate
  modified_base 6: mod_base = OTHER; note = 2'-O-methylcytidine-3'-phosphate
  modified_base 7: mod_base = OTHER; note = 2'-O-methyladenosine-3'-phosphate
  modified_base 8: mod_base = OTHER; note = 2'-O-methylguanosine-3'-phosphate
  modified_base 9: mod_base = OTHER; note = 2'-fluorocytidine-3'-phosphate
  modified_base 10: mod_base = OTHER; note = 2'-fluorocytidine-3'-phosphate
  modified_base 11: mod_base = OTHER; note = 2'-fluorouridine-3'-phosphate
  modified_base 12: mod_base = OTHER; note = 2'-O-methyluridine-3'-phosphate
  modified_base 13: mod_base = OTHER; note = 2'-O-methylcytidine-3'-phosphate
  modified_base 14: mod_base = OTHER; note = 2'-O-methylcytidine-3'-phosphate
  modified_base 15: mod_base = OTHER; note = 2'-O-methyluridine-3'-phosphate
  modified_base 16: mod_base = OTHER; note = 2'-O-methylguanosine-3'-phosphate
  modified_base 17: mod_base = OTHER; note = 2'-O-methyladenosine-3'-phosphate
  modified_base 18: mod_base = OTHER; note = 2'-O-methylguanosine-3'-phosphate
  modified_base 19: mod_base = OTHER; note = 2'-O-methyluridine-3'-phosphate
  modified_base 20: mod_base = OTHER; note = 2'-O-methylcytidine-3'-phosphate
  modified_base 21: mod_base = OTHER; note = 2'-O-methyluridine-3'-phosphate N-[tris(GalNAc-alkyl)-amidodecanoyl)]-4-hydroxyprolinol (Hyp-(GalNAc-alkyl)3)
actttcagccttcctgagtct

SEQ ID NO: 6618 - RNA, 21 nt, synthetic construct
  source 1..21: mol_type = other RNA
  modified_base 1: mod_base = OTHER; note = 2'-O-methyluridine-3'-phosphorothioate
  modified_base 2: mod_base = OTHER; note = 2'-O-methylcytidine-3'-phosphorothioate
  modified_base 3: mod_base = OTHER; note = 2'-O-methyladenosine-3'-phosphate
  modified_base 4: mod_base = OTHER; note = 2'-O-methylguanosine-3'-phosphate
  modified_base 5: mod_base = OTHER; note = 2'-O-methylcytidine-3'-phosphate
  modified_base 6: mod_base = OTHER; note = 2'-O-methylcytidine-3'-phosphate
  modified_base 7: mod_base = OTHER; note = 2'-O-methyluridine-3'-phosphate
  modified_base 8: mod_base = OTHER; note = 2'-O-methyluridine-3'-phosphate
  modified_base 9: mod_base = OTHER; note = 2'-fluorocytidine-3'-phosphate
  modified_base 10: mod_base = OTHER; note = 2'-fluorocytidine-3'-phosphate
  modified_base 11: mod_base = OTHER; note = 2'-fluorouridine-3'-phosphate
  modified_base 12: mod_base = OTHER; note = 2'-O-methylguanosine-3'-phosphate
  modified_base 13: mod_base = OTHER; note = 2'-O-methyladenosine-3'-phosphate
  modified_base 14: mod_base = OTHER; note = 2'-O-methylguanosine-3'-phosphate
  modified_base 15: mod_base = OTHER; note = 2'-O-methyluridine-3'-phosphate
  modified_base 16: mod_base = OTHER; note = 2'-O-methylcytidine-3'-phosphate
  modified_base 17: mod_base = OTHER; note = 2'-O-methylcytidine-3'-phosphate
  modified_base 18: mod_base = OTHER; note = 2'-O-methylcytidine-3'-phosphate
  modified_base 19: mod_base = OTHER; note = 2'-O-methyladenosine-3'-phosphate
  modified_base 20: mod_base = OTHER; note = 2'-O-methylguanosine-3'-phosphate
  modified_base 21: mod_base = OTHER; note = 2'-O-methyluridine-3'-phosphate N-[tris(GalNAc-alkyl)-amidodecanoyl)]-4-hydroxyprolinol (Hyp-(GalNAc-alkyl)3)
tcagccttcctgagtcccagt

SEQ ID NO: 6619 - RNA, 21 nt, synthetic construct
  source 1..21: mol_type = other RNA
  modified_base 1: mod_base = OTHER; note = 2'-O-methylguanosine-3'-phosphorothioate
  modified_base 2: mod_base = OTHER; note = 2'-O-methyladenosine-3'-phosphorothioate
  modified_base 3: mod_base = OTHER; note = 2'-O-methylcytidine-3'-phosphate
  modified_base 4: mod_base = OTHER; note = 2'-O-methyladenosine-3'-phosphate
  modified_base 5: mod_base = OTHER; note = 2'-O-methyladenosine-3'-phosphate
  modified_base 6: mod_base = OTHER; note = 2'-O-methyluridine-3'-phosphate
  modified_base 7: mod_base = OTHER; note = 2'-O-methyladenosine-3'-phosphate
  modified_base 8: mod_base = OTHER; note = 2'-O-methylguanosine-3'-phosphate
  modified_base 9: mod_base = OTHER; note = 2'-fluoroadenosine-3'-phosphate
  modified_base 10: mod_base = OTHER; note = 2'-fluoroadenosine-3'-phosphate
  modified_base 11: mod_base = OTHER; note = 2'-fluoroguanosine-3'-phosphate
  modified_base 12: mod_base = OTHER; note = 2'-O-methyladenosine-3'-phosphate
  modified_base 13: mod_base = OTHER; note = 2'-O-methylcytidine-3'-phosphate
  modified_base 14: mod_base = OTHER; note = 2'-O-methyladenosine-3'-phosphate
  modified_base 15: mod_base = OTHER; note = 2'-O-methylguanosine-3'-phosphate
  modified_base 16: mod_base = OTHER; note = 2'-O-methylguanosine-3'-phosphate
  modified_base 17: mod_base = OTHER; note = 2'-O-methyluridine-3'-phosphate
  modified_base 18: mod_base = OTHER; note = 2'-O-methylguanosine-3'-phosphate
  modified_base 19: mod_base = OTHER; note = 2'-O-methylguanosine-3'-phosphate
  modified_base 20: mod_base = OTHER; note = 2'-O-methylcytidine-3'-phosphate
  modified_base 21: mod_base = OTHER; note = 2'-O-methyluridine-3'-phosphate N-[tris(GalNAc-alkyl)-amidodecanoyl)]-4-hydroxyprolinol (Hyp-(GalNAc-alkyl)3)
gacaatagaagacaggtggct

SEQ ID NO: 6620 - RNA, 21 nt, synthetic construct
  source 1..21: mol_type = other RNA
  modified_base 1: mod_base = OTHER; note = 2'-O-methyladenosine-3'-phosphorothioate
  modified_base 2: mod_base = OTHER; note = 2'-O-methylcytidine-3'-phosphorothioate
  modified_base 3: mod_base = OTHER; note = 2'-O-methyladenosine-3'-phosphate
  modified_base 4: mod_base = OTHER; note = 2'-O-methyladenosine-3'-phosphate
  modified_base 5: mod_base = OTHER; note = 2'-O-methyluridine-3'-phosphate
  modified_base 6: mod_base = OTHER; note = 2'-O-methyladenosine-3'-phosphate
  modified_base 7: mod_base = OTHER; note = 2'-O-methylguanosine-3'-phosphate
  modified_base 8: mod_base = OTHER; note = 2'-O-methyladenosine-3'-phosphate
  modified_base 9: mod_base = OTHER; note = 2'-fluoroadenosine-3'-phosphate
  modified_base 10: mod_base = OTHER; note = 2'-fluoroguanosine-3'-phosphate
  modified_base 11: mod_base = OTHER; note = 2'-fluoroadenosine-3'-phosphate
  modified_base 12: mod_base = OTHER; note = 2'-O-methylcytidine-3'-phosphate
  modified_base 13: mod_base = OTHER; note = 2'-O-methyladenosine-3'-phosphate
  modified_base 14: mod_base = OTHER; note = 2'-O-methylguanosine-3'-phosphate
  modified_base 15: mod_base = OTHER; note = 2'-O-methylguanosine-3'-phosphate
  modified_base 16: mod_base = OTHER; note = 2'-O-methyluridine-3'-phosphate
  modified_base 17: mod_base = OTHER; note = 2'-O-methylguanosine-3'-phosphate
  modified_base 18: mod_base = OTHER; note = 2'-O-methylguanosine-3'-phosphate
  modified_base 19: mod_base = OTHER; note = 2'-O-methylcytidine-3'-phosphate
  modified_base 20: mod_base = OTHER; note = 2'-O-methyluridine-3'-phosphate
  modified_base 21: mod_base = OTHER; note = 2'-O-methyluridine-3'-phosphate N-[tris(GalNAc-alkyl)-amidodecanoyl)]-4-hydroxyprolinol (Hyp-(GalNAc-alkyl)3)
acaatagaagacaggtggctt

SEQ ID NO: 6621 - RNA, 21 nt, synthetic construct
  source 1..21: mol_type = other RNA
  modified_base 1: mod_base = OTHER; note = 2'-O-methylguanosine-3'-phosphorothioate
  modified_base 2: mod_base = OTHER; note = 2'-O-methyluridine-3'-phosphorothioate
  modified_base 3: mod_base = OTHER; note = 2'-O-methylguanosine-3'-phosphate
  modified_base 4: mod_base = OTHER; note = 2'-O-methylguanosine-3'-phosphate
  modified_base 5: mod_base = OTHER; note = 2'-O-methylcytidine-3'-phosphate
  modified_base 6: mod_base = OTHER; note = 2'-O-methyladenosine-3'-phosphate
  modified_base 7: mod_base = OTHER; note = 2'-O-methylguanosine-3'-phosphate
  modified_base 8: mod_base = OTHER; note = 2'-O-methyluridine-3'-phosphate
  modified_base 9: mod_base = OTHER; note = 2'-fluoroguanosine-3'-phosphate
  modified_base 10: mod_base = OTHER; note = 2'-fluoroguanosine-3'-phosphate
  modified_base 11: mod_base = OTHER; note = 2'-fluorouridine-3'-phosphate
  modified_base 12: mod_base = OTHER; note = 2'-O-methylguanosine-3'-phosphate
  modified_base 13: mod_base = OTHER; note = 2'-O-methyluridine-3'-phosphate
  modified_base 14: mod_base = OTHER; note = 2'-O-methylcytidine-3'-phosphate
  modified_base 15: mod_base = OTHER; note = 2'-O-methyluridine-3'-phosphate
  modified_base 16: mod_base = OTHER; note = 2'-O-methylguanosine-3'-phosphate
  modified_base 17: mod_base = OTHER; note = 2'-O-methylcytidine-3'-phosphate
  modified_base 18: mod_base = OTHER; note = 2'-O-methyluridine-3'-phosphate
  modified_base 19: mod_base = OTHER; note = 2'-O-methylguanosine-3'-phosphate
  modified_base 20: mod_base = OTHER; note = 2'-O-methyluridine-3'-phosphate
  modified_base 21: mod_base = OTHER; note = 2'-O-methyluridine-3'-phosphate N-[tris(GalNAc-alkyl)-amidodecanoyl)]-4-hydroxyprolinol (Hyp-(GalNAc-alkyl)3)
gtggcagtggtgtctgctgtt

SEQ ID NO: 6622 - RNA, 21 nt, synthetic construct
  source 1..21: mol_type = other RNA
  modified_base 1: mod_base = OTHER; note = 2'-O-methyluridine-3'-phosphorothioate
  modified_base 2: mod_base = OTHER; note = 2'-O-methylguanosine-3'-phosphorothioate
  modified_base 3: mod_base = OTHER; note = 2'-O-methylguanosine-3'-phosphate
  modified_base 4: mod_base = OTHER; note = 2'-O-methylcytidine-3'-phosphate
  modified_base 5: mod_base = OTHER; note = 2'-O-methyladenosine-3'-phosphate
  modified_base 6: mod_base = OTHER; note = 2'-O-methylguanosine-3'-phosphate
  modified_base 7: mod_base = OTHER; note = 2'-O-methyluridine-3'-phosphate
  modified_base 8: mod_base = OTHER; note = 2'-O-methylguanosine-3'-phosphate
  modified_base 9: mod_base = OTHER; note = 2'-fluoroguanosine-3'-phosphate
  modified_base 10: mod_base = OTHER; note = 2'-fluorouridine-3'-phosphate
  modified_base 11: mod_base = OTHER; note = 2'-fluoroguanosine-3'-phosphate
  modified_base 12: mod_base = OTHER; note = 2'-O-methyluridine-3'-phosphate
  modified_base 13: mod_base = OTHER; note = 2'-O-methylcytidine-3'-phosphate
  modified_base 14: mod_base = OTHER; note = 2'-O-methyluridine-3'-phosphate
  modified_base 15: mod_base = OTHER; note = 2'-O-methylguanosine-3'-phosphate
  modified_base 16: mod_base = OTHER; note = 2'-O-methylcytidine-3'-phosphate
  modified_base 17: mod_base = OTHER; note = 2'-O-methyluridine-3'-phosphate
  modified_base 18: mod_base = OTHER; note = 2'-O-methylguanosine-3'-phosphate
  modified_base 19: mod_base = OTHER; note = 2'-O-methyluridine-3'-phosphate
  modified_base 20: mod_base = OTHER; note = 2'-O-methylcytidine-3'-phosphate
  modified_base 21: mod_base = OTHER; note = 2'-O-methyluridine-3'-phosphate N-[tris(GalNAc-alkyl)-amidodecanoyl)]-4-hydroxyprolinol (Hyp-(GalNAc-alkyl)3)
tggcagtggtgtctgctgtct

SEQ ID NO: 6623 - RNA, 21 nt, synthetic construct
  source 1..21: mol_type = other RNA
  modified_base 1: mod_base = OTHER; note = 2'-O-methylguanosine-3'-phosphorothioate
  modified_base 2: mod_base = OTHER; note = 2'-O-methylguanosine-3'-phosphorothioate
  modified_base 3: mod_base = OTHER; note = 2'-O-methylcytidine-3'-phosphate
  modified_base 4: mod_base = OTHER; note = 2'-O-methyladenosine-3'-phosphate
  modified_base 5: mod_base = OTHER; note = 2'-O-methylguanosine-3'-phosphate
  modified_base 6: mod_base = OTHER; note = 2'-O-methyluridine-3'-phosphate
  modified_base 7: mod_base = OTHER; note = 2'-O-methylguanosine-3'-phosphate
  modified_base 8: mod_base = OTHER; note = 2'-O-methylguanosine-3'-phosphate
  modified_base 9: mod_base = OTHER; note = 2'-fluorouridine-3'-phosphate
  modified_base 10: mod_base = OTHER; note = 2'-fluoroguanosine-3'-phosphate
  modified_base 11: mod_base = OTHER; note = 2'-fluorouridine-3'-phosphate
  modified_base 12: mod_base = OTHER; note = 2'-O-methylcytidine-3'-phosphate
  modified_base 13: mod_base = OTHER; note = 2'-O-methyluridine-3'-phosphate
  modified_base 14: mod_base = OTHER; note = 2'-O-methylguanosine-3'-phosphate
  modified_base 15: mod_base = OTHER; note = 2'-O-methylcytidine-3'-phosphate
  modified_base 16: mod_base = OTHER; note = 2'-O-methyluridine-3'-phosphate
  modified_base 17: mod_base = OTHER; note = 2'-O-methylguanosine-3'-phosphate
  modified_base 18: mod_base = OTHER; note = 2'-O-methyluridine-3'-phosphate
  modified_base 19: mod_base = OTHER; note = 2'-O-methylcytidine-3'-phosphate
  modified_base 20: mod_base = OTHER; note = 2'-O-methyladenosine-3'-phosphate
  modified_base 21: mod_base = OTHER; note = 2'-O-methyluridine-3'-phosphate N-[tris(GalNAc-alkyl)-amidodecanoyl)]-4-hydroxyprolinol (Hyp-(GalNAc-alkyl)3)
ggcagtggtgtctgctgtcat

SEQ ID NO: 6624 - RNA, 21 nt, synthetic construct
  source 1..21: mol_type = other RNA
  modified_base 1: mod_base = OTHER; note = 2'-O-methylguanosine-3'-phosphorothioate
  modified_base 2: mod_base = OTHER; note = 2'-O-methylcytidine-3'-phosphorothioate
  modified_base 3: mod_base = OTHER; note = 2'-O-methyladenosine-3'-phosphate
  modified_base 4: mod_base = OTHER; note = 2'-O-methylguanosine-3'-phosphate
  modified_base 5: mod_base = OTHER; note = 2'-O-methyluridine-3'-phosphate
  modified_base 6: mod_base = OTHER; note = 2'-O-methylguanosine-3'-phosphate
  modified_base 7: mod_base = OTHER; note = 2'-O-methylguanosine-3'-phosphate
  modified_base 8: mod_base = OTHER; note = 2'-O-methyluridine-3'-phosphate
  modified_base 9: mod_base = OTHER; note = 2'-fluoroguanosine-3'-phosphate
  modified_base 10: mod_base = OTHER; note = 2'-fluorouridine-3'-phosphate
  modified_base 11: mod_base = OTHER; note = 2'-fluorocytidine-3'-phosphate
  modified_base 12: mod_base = OTHER; note = 2'-O-methyluridine-3'-phosphate
  modified_base 13: mod_base = OTHER; note = 2'-O-methylguanosine-3'-phosphate
  modified_base 14: mod_base = OTHER; note = 2'-O-methylcytidine-3'-phosphate
  modified_base 15: mod_base = OTHER; note = 2'-O-methyluridine-3'-phosphate
  modified_base 16: mod_base = OTHER; note = 2'-O-methylguanosine-3'-phosphate
  modified_base 17: mod_base = OTHER; note = 2'-O-methyluridine-3'-phosphate
  modified_base 18: mod_base = OTHER; note = 2'-O-methylcytidine-3'-phosphate
  modified_base 19: mod_base = OTHER; note = 2'-O-methyladenosine-3'-phosphate
  modified_base 20: mod_base = OTHER; note = 2'-O-methylcytidine-3'-phosphate
  modified_base 21: mod_base = OTHER; note = 2'-O-methyluridine-3'-phosphate N-[tris(GalNAc-alkyl)-amidodecanoyl)]-4-hydroxyprolinol (Hyp-(GalNAc-alkyl)3)
gcagtggtgtctgctgtcact

SEQ ID NO: 6625 - RNA, 21 nt, synthetic construct
  source 1..21: mol_type = other RNA
  modified_base 1: mod_base = OTHER; note = 2'-O-methylcytidine-3'-phosphorothioate
  modified_base 2: mod_base = OTHER; note = 2'-O-methyladenosine-3'-phosphorothioate
  modified_base 3: mod_base = OTHER; note = 2'-O-methylguanosine-3'-phosphate
  modified_base 4: mod_base = OTHER; note = 2'-O-methyluridine-3'-phosphate
  modified_base 5: mod_base = OTHER; note = 2'-O-methylguanosine-3'-phosphate
  modified_base 6: mod_base = OTHER; note = 2'-O-methylguanosine-3'-phosphate
  modified_base 7: mod_base = OTHER; note = 2'-O-methyluridine-3'-phosphate
  modified_base 8: mod_base = OTHER; note = 2'-O-methylguanosine-3'-phosphate
  modified_base 9: mod_base = OTHER; note = 2'-fluorouridine-3'-phosphate
  modified_base 10: mod_base = OTHER; note = 2'-fluorocytidine-3'-phosphate
  modified_base 11: mod_base = OTHER; note = 2'-fluorouridine-3'-phosphate
  modified_base 12: mod_base = OTHER; note = 2'-O-methylguanosine-3'-phosphate
  modified_base 13: mod_base = OTHER; note = 2'-O-methylcytidine-3'-phosphate
  modified_base 14: mod_base = OTHER; note = 2'-O-methyluridine-3'-phosphate
  modified_base 15: mod_base = OTHER; note = 2'-O-methylguanosine-3'-phosphate
  modified_base 16: mod_base = OTHER; note = 2'-O-methyluridine-3'-phosphate
  modified_base 17: mod_base = OTHER; note = 2'-O-methylcytidine-3'-phosphate
  modified_base 18: mod_base = OTHER; note = 2'-O-methyladenosine-3'-phosphate
  modified_base 19: mod_base = OTHER; note = 2'-O-methylcytidine-3'-phosphate
  modified_base 20: mod_base = OTHER; note = 2'-O-methyluridine-3'-phosphate
  modified_base 21: mod_base = OTHER; note = 2'-O-methyluridine-3'-phosphate N-[tris(GalNAc-alkyl)-amidodecanoyl)]-4-hydroxyprolinol (Hyp-(GalNAc-alkyl)3)
cagtggtgtctgctgtcactt

SEQ ID NO: 6626 - RNA, 21 nt, synthetic construct
  source 1..21: mol_type = other RNA
  modified_base 1: mod_base = OTHER; note = 2'-O-methyladenosine-3'-phosphorothioate
  modified_base 2: mod_base = OTHER; note = 2'-O-methylguanosine-3'-phosphorothioate
  modified_base 3: mod_base = OTHER; note = 2'-O-methyluridine-3'-phosphate
  modified_base 4: mod_base = OTHER; note = 2'-O-methylguanosine-3'-phosphate
  modified_base 5: mod_base = OTHER; note = 2'-O-methylguanosine-3'-phosphate
  modified_base 6: mod_base = OTHER; note = 2'-O-methyluridine-3'-phosphate
  modified_base 7: mod_base = OTHER; note = 2'-O-methylguanosine-3'-phosphate
  modified_base 8: mod_base = OTHER; note = 2'-O-methyluridine-3'-phosphate
  modified_base 9: mod_base = OTHER; note = 2'-fluorocytidine-3'-phosphate
  modified_base 10: mod_base = OTHER; note = 2'-fluorouridine-3'-phosphate
  modified_base 11: mod_base = OTHER; note = 2'-fluoroguanosine-3'-phosphate
  modified_base 12: mod_base = OTHER; note = 2'-O-methylcytidine-3'-phosphate
  modified_base 13: mod_base = OTHER; note = 2'-O-methyluridine-3'-phosphate
  modified_base 14: mod_base = OTHER; note = 2'-O-methylguanosine-3'-phosphate
  modified_base 15: mod_base = OTHER; note = 2'-O-methyluridine-3'-phosphate
  modified_base 16: mod_base = OTHER; note = 2'-O-methylcytidine-3'-phosphate
  modified_base 17: mod_base = OTHER; note = 2'-O-methyladenosine-3'-phosphate
  modified_base 18: mod_base = OTHER; note = 2'-O-methylcytidine-3'-phosphate
  modified_base 19: mod_base = OTHER; note = 2'-O-methyluridine-3'-phosphate
  modified_base 20: mod_base = OTHER; note = 2'-O-methylguanosine-3'-phosphate
  modified_base 21: mod_base = OTHER; note = 2'-O-methyluridine-3'-phosphate N-[tris(GalNAc-alkyl)-amidodecanoyl)]-4-hydroxyprolinol (Hyp-(GalNAc-alkyl)3)
agtggtgtctgctgtcactgt

SEQ ID NO: 6627 - RNA, 21 nt, synthetic construct
  source 1..21: mol_type = other RNA
  modified_base 1: mod_base = OTHER; note = 2'-O-methylguanosine-3'-phosphorothioate
  modified_base 2: mod_base = OTHER; note = 2'-O-methyluridine-3'-phosphorothioate
  modified_base 3: mod_base = OTHER; note = 2'-O-methylguanosine-3'-phosphate
  modified_base 4: mod_base = OTHER; note = 2'-O-methylguanosine-3'-phosphate
  modified_base 5: mod_base = OTHER; note = 2'-O-methyluridine-3'-phosphate
  modified_base 6: mod_base = OTHER; note = 2'-O-methylguanosine-3'-phosphate
  modified_base 7: mod_base = OTHER; note = 2'-O-methyluridine-3'-phosphate
  modified_base 8: mod_base = OTHER; note = 2'-O-methylcytidine-3'-phosphate
  modified_base 9: mod_base = OTHER; note = 2'-fluorouridine-3'-phosphate
  modified_base 10: mod_base = OTHER; note = 2'-fluoroguanosine-3'-phosphate
  modified_base 11: mod_base = OTHER; note = 2'-fluorocytidine-3'-phosphate
  modified_base 12: mod_base = OTHER; note = 2'-O-methyluridine-3'-phosphate
  modified_base 13: mod_base = OTHER; note = 2'-O-methylguanosine-3'-phosphate
  modified_base 14: mod_base = OTHER; note = 2'-O-methyluridine-3'-phosphate
  modified_base 15: mod_base = OTHER; note = 2'-O-methylcytidine-3'-phosphate
  modified_base 16: mod_base = OTHER; note = 2'-O-methyladenosine-3'-phosphate
  modified_base 17: mod_base = OTHER; note = 2'-O-methylcytidine-3'-phosphate
  modified_base 18: mod_base = OTHER; note = 2'-O-methyluridine-3'-phosphate
  modified_base 19: mod_base = OTHER; note = 2'-O-methylguanosine-3'-phosphate
  modified_base 20: mod_base = OTHER; note = 2'-O-methyluridine-3'-phosphate
  modified_base 21: mod_base = OTHER; note = 2'-O-methyluridine-3'-phosphate N-[tris(GalNAc-alkyl)-amidodecanoyl)]-4-hydroxyprolinol (Hyp-(GalNAc-alkyl)3)
gtggtgtctgctgtcactgtt

SEQ ID NO: 6628 - RNA, 21 nt, synthetic construct
  source 1..21: mol_type = other RNA
  modified_base 1: mod_base = OTHER; note = 2'-O-methyluridine-3'-phosphorothioate
  modified_base 2: mod_base = OTHER; note = 2'-O-methylguanosine-3'-phosphorothioate
  modified_base 3: mod_base = OTHER; note = 2'-O-methylguanosine-3'-phosphate
  modified_base 4: mod_base = OTHER; note = 2'-O-methyluridine-3'-phosphate
  modified_base 5: mod_base = OTHER; note = 2'-O-methylguanosine-3'-phosphate
  modified_base 6: mod_base = OTHER; note = 2'-O-methyluridine-3'-phosphate
  modified_base 7: mod_base = OTHER; note = 2'-O-methylcytidine-3'-phosphate
  modified_base 8: mod_base = OTHER; note = 2'-O-methyluridine-3'-phosphate
  modified_base 9: mod_base = OTHER; note = 2'-fluoroguanosine-3'-phosphate
  modified_base 10: mod_base = OTHER; note = 2'-fluorocytidine-3'-phosphate
  modified_base 11: mod_base = OTHER; note = 2'-fluorouridine-3'-phosphate
  modified_base 12: mod_base = OTHER; note = 2'-O-methylguanosine-3'-phosphate
  modified_base 13: mod_base = OTHER; note = 2'-O-methyluridine-3'-phosphate
  modified_base 14: mod_base = OTHER; note = 2'-O-methylcytidine-3'-phosphate
  modified_base 15: mod_base = OTHER; note = 2'-O-methyladenosine-3'-phosphate
  modified_base 16: mod_base = OTHER; note = 2'-O-methylcytidine-3'-phosphate
  modified_base 17: mod_base = OTHER; note = 2'-O-methyluridine-3'-phosphate
  modified_base 18: mod_base = OTHER; note = 2'-O-methylguanosine-3'-phosphate
  modified_base 19: mod_base = OTHER; note = 2'-O-methyluridine-3'-phosphate
  modified_base 20: mod_base = OTHER; note = 2'-O-methylguanosine-3'-phosphate
  modified_base 21: mod_base = OTHER; note = 2'-O-methyluridine-3'-phosphate N-[tris(GalNAc-alkyl)-amidodecanoyl)]-4-hydroxyprolinol (Hyp-(GalNAc-alkyl)3)
tggtgtctgctgtcactgtgt

SEQ ID NO: 6629 - RNA, 21 nt, synthetic construct
  source 1..21: mol_type = other RNA
  modified_base 1: mod_base = OTHER; note = 2'-O-methylguanosine-3'-phosphorothioate
  modified_base 2: mod_base = OTHER; note = 2'-O-methylguanosine-3'-phosphorothioate
  modified_base 3: mod_base = OTHER; note = 2'-O-methyluridine-3'-phosphate
  modified_base 4: mod_base = OTHER; note = 2'-O-methylguanosine-3'-phosphate
  modified_base 5: mod_base = OTHER; note = 2'-O-methyluridine-3'-phosphate
  modified_base 6: mod_base = OTHER; note = 2'-O-methylcytidine-3'-phosphate
  modified_base 7: mod_base = OTHER; note = 2'-O-methyluridine-3'-phosphate
  modified_base 8: mod_base = OTHER; note = 2'-O-methylguanosine-3'-phosphate
  modified_base 9: mod_base = OTHER; note = 2'-fluorocytidine-3'-phosphate
  modified_base 10: mod_base = OTHER; note = 2'-fluorouridine-3'-phosphate
  modified_base 11: mod_base = OTHER; note = 2'-fluoroguanosine-3'-phosphate
  modified_base 12: mod_base = OTHER; note = 2'-O-methyluridine-3'-phosphate
  modified_base 13: mod_base = OTHER; note = 2'-O-methylcytidine-3'-phosphate
  modified_base 14: mod_base = OTHER; note = 2'-O-methyladenosine-3'-phosphate
  modified_base 15: mod_base = OTHER; note = 2'-O-methylcytidine-3'-phosphate
  modified_base 16: mod_base = OTHER; note = 2'-O-methyluridine-3'-phosphate
  modified_base 17: mod_base = OTHER; note = 2'-O-methylguanosine-3'-phosphate
  modified_base 18: mod_base = OTHER; note = 2'-O-methyluridine-3'-phosphate
  modified_base 19: mod_base = OTHER; note = 2'-O-methylguanosine-3'-phosphate
  modified_base 20: mod_base = OTHER; note = 2'-O-methylcytidine-3'-phosphate
  modified_base 21: mod_base = OTHER; note = 2'-O-methyluridine-3'-phosphate N-[tris(GalNAc-alkyl)-amidodecanoyl)]-4-hydroxyprolinol (Hyp-(GalNAc-alkyl)3)
ggtgtctgctgtcactgtgct

SEQ ID NO: 6630 - RNA, 21 nt, synthetic construct
  source 1..21: mol_type = other RNA
  modified_base 1: mod_base = OTHER; note = 2'-O-methylcytidine-3'-phosphorothioate
  modified_base 2: mod_base = OTHER; note = 2'-O-methyladenosine-3'-phosphorothioate
  modified_base 3: mod_base = OTHER; note = 2'-O-methylguanosine-3'-phosphate
  modified_base 4: mod_base = OTHER; note = 2'-O-methyladenosine-3'-phosphate
  modified_base 5: mod_base = OTHER; note = 2'-O-methylcytidine-3'-phosphate
  modified_base 6: mod_base = OTHER; note = 2'-O-methyluridine-3'-phosphate
  modified_base 7: mod_base = OTHER; note = 2'-O-methylcytidine-3'-phosphate
  modified_base 8: mod_base = OTHER; note = 2'-O-methyladenosine-3'-phosphate
  modified_base 9: mod_base = OTHER; note = 2'-fluoroadenosine-3'-phosphate
  modified_base 10: mod_base = OTHER; note = 2'-fluorocytidine-3'-phosphate
  modified_base 11: mod_base = OTHER; note = 2'-fluoroadenosine-3'-phosphate
  modified_base 12: mod_base = OTHER; note = 2'-O-methylguanosine-3'-phosphate
  modified_base 13: mod_base = OTHER; note = 2'-O-methyladenosine-3'-phosphate
  modified_base 14: mod_base = OTHER; note = 2'-O-methylcytidine-3'-phosphate
  modified_base 15: mod_base = OTHER; note = 2'-O-methylguanosine-3'-phosphate
  modified_base 16: mod_base = OTHER; note = 2'-O-methylguanosine-3'-phosphate
  modified_base 17: mod_base = OTHER; note = 2'-O-methyladenosine-3'-phosphate
  modified_base 18: mod_base = OTHER; note = 2'-O-methylguanosine-3'-phosphate
  modified_base 19: mod_base = OTHER; note = 2'-O-methylcytidine-3'-phosphate
  modified_base 20: mod_base = OTHER; note = 2'-O-methyladenosine-3'-phosphate
  modified_base 21: mod_base = OTHER; note = 2'-O-methyluridine-3'-phosphate N-[tris(GalNAc-alkyl)-amidodecanoyl)]-4-hydroxyprolinol (Hyp-(GalNAc-alkyl)3)
cagactcaacagacggagcat

SEQ ID NO: 6631 - RNA, 21 nt, synthetic construct
  source 1..21: mol_type = other RNA
  modified_base 1: mod_base = OTHER; note = 2'-O-methyladenosine-3'-phosphorothioate
  modified_base 2: mod_base = OTHER; note = 2'-O-methylguanosine-3'-phosphorothioate
  modified_base 3: mod_base = OTHER; note = 2'-O-methyladenosine-3'-phosphate
  modified_base 4: mod_base = OTHER; note = 2'-O-methylcytidine-3'-phosphate
  modified_base 5: mod_base = OTHER; note = 2'-O-methyluridine-3'-phosphate
  modified_base 6: mod_base = OTHER; note = 2'-O-methylcytidine-3'-phosphate
  modified_base 7: mod_base = OTHER; note = 2'-O-methyladenosine-3'-phosphate
  modified_base 8: mod_base = OTHER; note = 2'-O-methyladenosine-3'-phosphate
  modified_base 9: mod_base = OTHER; note = 2'-fluorocytidine-3'-phosphate
  modified_base 10: mod_base = OTHER; note = 2'-fluoroadenosine-3'-phosphate
  modified_base 11: mod_base = OTHER; note = 2'-fluoroguanosine-3'-phosphate
  modified_base 12: mod_base = OTHER; note = 2'-O-methyladenosine-3'-phosphate
  modified_base 13: mod_base = OTHER; note = 2'-O-methylcytidine-3'-phosphate
  modified_base 14: mod_base = OTHER; note = 2'-O-methylguanosine-3'-phosphate
  modified_base 15: mod_base = OTHER; note = 2'-O-methylguanosine-3'-phosphate
  modified_base 16: mod_base = OTHER; note = 2'-O-methyladenosine-3'-phosphate
  modified_base 17: mod_base = OTHER; note = 2'-O-methylguanosine-3'-phosphate
  modified_base 18: mod_base = OTHER; note = 2'-O-methylcytidine-3'-phosphate
  modified_base 19: mod_base = OTHER; note = 2'-O-methyladenosine-3'-phosphate
  modified_base 20: mod_base = OTHER; note = 2'-O-methyladenosine-3'-phosphate
  modified_base 21: mod_base = OTHER; note = 2'-O-methyluridine-3'-phosphate N-[tris(GalNAc-alkyl)-amidodecanoyl)]-4-hydroxyprolinol (Hyp-(GalNAc-alkyl)3)
agactcaacagacggagcaat

SEQ ID NO: 6632 - RNA, 21 nt, synthetic construct
  source 1..21: mol_type = other RNA
  modified_base 1: mod_base = OTHER; note = 2'-O-methylguanosine-3'-phosphorothioate
  modified_base 2: mod_base = OTHER; note = 2'-O-methyladenosine-3'-phosphorothioate
  modified_base 3: mod_base = OTHER; note = 2'-O-methylcytidine-3'-phosphate
  modified_base 4: mod_base = OTHER; note = 2'-O-methyluridine-3'-phosphate
  modified_base 5: mod_base = OTHER; note = 2'-O-methylcytidine-3'-phosphate
  modified_base 6: mod_base = OTHER; note = 2'-O-methyladenosine-3'-phosphate
  modified_base 7: mod_base = OTHER; note = 2'-O-methyladenosine-3'-phosphate
  modified_base 8: mod_base = OTHER; note = 2'-O-methylcytidine-3'-phosphate
  modified_base 9: mod_base = OTHER; note = 2'-fluoroadenosine-3'-phosphate
  modified_base 10: mod_base = OTHER; note = 2'-fluoroguanosine-3'-phosphate
  modified_base 11: mod_base = OTHER; note = 2'-fluoroadenosine-3'-phosphate
  modified_base 12: mod_base = OTHER; note = 2'-O-methylcytidine-3'-phosphate
  modified_base 13: mod_base = OTHER; note = 2'-O-methylguanosine-3'-phosphate
  modified_base 14: mod_base = OTHER; note = 2'-O-methylguanosine-3'-phosphate
  modified_base 15: mod_base = OTHER; note = 2'-O-methyladenosine-3'-phosphate
  modified_base 16: mod_base = OTHER; note = 2'-O-methylguanosine-3'-phosphate
  modified_base 17: mod_base = OTHER; note = 2'-O-methylcytidine-3'-phosphate
  modified_base 18: mod_base = OTHER; note = 2'-O-methyladenosine-3'-phosphate
  modified_base 19: mod_base = OTHER; note = 2'-O-methyladenosine-3'-phosphate
  modified_base 20: mod_base = OTHER; note = 2'-O-methylcytidine-3'-phosphate
  modified_base 21: mod_base = OTHER; note = 2'-O-methyluridine-3'-phosphate N-[tris(GalNAc-alkyl)-amidodecanoyl)]-4-hydroxyprolinol (Hyp-(GalNAc-alkyl)3)
gactcaacagacggagcaact

SEQ ID NO: 6633 - RNA, 21 nt, synthetic construct
  source 1..21: mol_type = other RNA
  modified_base 1: mod_base = OTHER; note = 2'-O-methyladenosine-3'-phosphorothioate
  modified_base 2: mod_base = OTHER; note = 2'-O-methylcytidine-3'-phosphorothioate
  modified_base 3: mod_base = OTHER; note = 2'-O-methyluridine-3'-phosphate
  modified_base 4: mod_base = OTHER; note = 2'-O-methylcytidine-3'-phosphate
  modified_base 5: mod_base = OTHER; note = 2'-O-methyladenosine-3'-phosphate
  modified_base 6: mod_base = OTHER; note = 2'-O-methyladenosine-3'-phosphate
  modified_base 7: mod_base = OTHER; note = 2'-O-methylcytidine-3'-phosphate
  modified_base 8: mod_base = OTHER; note = 2'-O-methyladenosine-3'-phosphate
  modified_base 9: mod_base = OTHER; note = 2'-fluoroguanosine-3'-phosphate
  modified_base 10: mod_base = OTHER; note = 2'-fluoroadenosine-3'-phosphate
  modified_base 11: mod_base = OTHER; note = 2'-fluorocytidine-3'-phosphate
  modified_base 12: mod_base = OTHER; note = 2'-O-methylguanosine-3'-phosphate
  modified_base 13: mod_base = OTHER; note = 2'-O-methylguanosine-3'-phosphate
  modified_base 14: mod_base = OTHER; note = 2'-O-methyladenosine-3'-phosphate
  modified_base 15: mod_base = OTHER; note = 2'-O-methylguanosine-3'-phosphate
  modified_base 16: mod_base = OTHER; note = 2'-O-methylcytidine-3'-phosphate
  modified_base 17: mod_base = OTHER; note = 2'-O-methyladenosine-3'-phosphate
  modified_base 18: mod_base = OTHER; note = 2'-O-methyladenosine-3'-phosphate
  modified_base 19: mod_base = OTHER; note = 2'-O-methylcytidine-3'-phosphate
  modified_base 20: mod_base = OTHER; note = 2'-O-methyluridine-3'-phosphate
  modified_base 21: mod_base = OTHER; note = 2'-O-methyluridine-3'-phosphate N-[tris(GalNAc-alkyl)-amidodecanoyl)]-4-hydroxyprolinol (Hyp-(GalNAc-alkyl)3)
actcaacagacggagcaactt

SEQ ID NO: 6634 - RNA, 21 nt, synthetic construct
  source 1..21: mol_type = other RNA
  modified_base 1: mod_base = OTHER; note = 2'-O-methylcytidine-3'-phosphorothioate
  modified_base 2: mod_base = OTHER; note = 2'-O-methyluridine-3'-phosphorothioate
  modified_base 3: mod_base = OTHER; note = 2'-O-methylcytidine-3'-phosphate
  modified_base 4: mod_base = OTHER; note = 2'-O-methyladenosine-3'-phosphate
  modified_base 5: mod_base = OTHER; note = 2'-O-methyladenosine-3'-phosphate
  modified_base 6: mod_base = OTHER; note = 2'-O-methylcytidine-3'-phosphate
  modified_base 7: mod_base = OTHER; note = 2'-O-methyladenosine-3'-phosphate
  modified_base 8: mod_base = OTHER; note = 2'-O-methylguanosine-3'-phosphate
  modified_base 9: mod_base = OTHER; note = 2'-fluoroadenosine-3'-phosphate
  modified_base 10: mod_base = OTHER; note = 2'-fluorocytidine-3'-phosphate
  modified_base 11: mod_base = OTHER; note = 2'-fluoroguanosine-3'-phosphate
  modified_base 12: mod_base = OTHER; note = 2'-O-methylguanosine-3'-phosphate
  modified_base 13: mod_base = OTHER; note = 2'-O-methyladenosine-3'-phosphate
  modified_base 14: mod_base = OTHER; note = 2'-O-methylguanosine-3'-phosphate
  modified_base 15: mod_base = OTHER; note = 2'-O-methylcytidine-3'-phosphate
  modified_base 16: mod_base = OTHER; note = 2'-O-methyladenosine-3'-phosphate
  modified_base 17: mod_base = OTHER; note = 2'-O-methyladenosine-3'-phosphate
  modified_base 18: mod_base = OTHER; note = 2'-O-methylcytidine-3'-phosphate
  modified_base 19: mod_base = OTHER; note = 2'-O-methyluridine-3'-phosphate
  modified_base 20: mod_base = OTHER; note = 2'-O-methylguanosine-3'-phosphate
  modified_base 21: mod_base = OTHER; note = 2'-O-methyluridine-3'-phosphate N-[tris(GalNAc-alkyl)-amidodecanoyl)]-4-hydroxyprolinol (Hyp-(GalNAc-alkyl)3)
ctcaacagacggagcaactgt

SEQ ID NO: 6635 - RNA, 21 nt, synthetic construct
  source 1..21: mol_type = other RNA
  modified_base 1: mod_base = OTHER; note = 2'-O-methyluridine-3'-phosphorothioate
  modified_base 2: mod_base = OTHER; note = 2'-O-methylcytidine-3'-phosphorothioate
  modified_base 3: mod_base = OTHER; note = 2'-O-methyladenosine-3'-phosphate
  modified_base 4: mod_base = OTHER; note = 2'-O-methyladenosine-3'-phosphate
  modified_base 5: mod_base = OTHER; note = 2'-O-methylcytidine-3'-phosphate
  modified_base 6: mod_base = OTHER; note = 2'-O-methyladenosine-3'-phosphate
  modified_base 7: mod_base = OTHER; note = 2'-O-methylguanosine-3'-phosphate
  modified_base 8: mod_base = OTHER; note = 2'-O-methyladenosine-3'-phosphate
  modified_base 9: mod_base = OTHER; note = 2'-fluorocytidine-3'-phosphate
  modified_base 10: mod_base = OTHER; note = 2'-fluoroguanosine-3'-phosphate
  modified_base 11: mod_base = OTHER; note = 2'-fluoroguanosine-3'-phosphate
  modified_base 12: mod_base = OTHER; note = 2'-O-methyladenosine-3'-phosphate
  modified_base 13: mod_base = OTHER; note = 2'-O-methylguanosine-3'-phosphate
  modified_base 14: mod_base = OTHER; note = 2'-O-methylcytidine-3'-phosphate
  modified_base 15: mod_base = OTHER; note = 2'-O-methyladenosine-3'-phosphate
  modified_base 16: mod_base = OTHER; note = 2'-O-methyladenosine-3'-phosphate
  modified_base 17: mod_base = OTHER; note = 2'-O-methylcytidine-3'-phosphate
  modified_base 18: mod_base = OTHER; note = 2'-O-methyluridine-3'-phosphate
  modified_base 19: mod_base = OTHER; note = 2'-O-methylguanosine-3'-phosphate
  modified_base 20: mod_base = OTHER; note = 2'-O-methylcytidine-3'-phosphate
  modified_base 21: mod_base = OTHER; note = 2'-O-methyluridine-3'-phosphate N-[tris(GalNAc-alkyl)-amidodecanoyl)]-4-hydroxyprolinol (Hyp-(GalNAc-alkyl)3)
tcaacagacggagcaactgct

SEQ ID NO: 6636 - RNA, 21 nt, synthetic construct
  source 1..21: mol_type = other RNA
  modified_base 1: mod_base = OTHER; note = 2'-O-methylcytidine-3'-phosphorothioate
  modified_base 2: mod_base = OTHER; note = 2'-O-methyladenosine-3'-phosphorothioate
  modified_base 3: mod_base = OTHER; note = 2'-O-methyladenosine-3'-phosphate
  modified_base 4: mod_base = OTHER; note = 2'-O-methylcytidine-3'-phosphate
  modified_base 5: mod_base = OTHER; note = 2'-O-methyladenosine-3'-phosphate
  modified_base 6: mod_base = OTHER; note = 2'-O-methylguanosine-3'-phosphate
  modified_base 7: mod_base = OTHER; note = 2'-O-methyladenosine-3'-phosphate
  modified_base 8: mod_base = OTHER; note = 2'-O-methylcytidine-3'-phosphate
  modified_base 9: mod_base = OTHER; note = 2'-fluoroguanosine-3'-phosphate
  modified_base 10: mod_base = OTHER; note = 2'-fluoroguanosine-3'-phosphate
  modified_base 11: mod_base = OTHER; note = 2'-fluoroadenosine-3'-phosphate
  modified_base 12: mod_base = OTHER; note = 2'-O-methylguanosine-3'-phosphate
  modified_base 13: mod_base = OTHER; note = 2'-O-methylcytidine-3'-phosphate
  modified_base 14: mod_base = OTHER; note = 2'-O-methyladenosine-3'-phosphate
  modified_base 15: mod_base = OTHER; note = 2'-O-methyladenosine-3'-phosphate
  modified_base 16: mod_base = OTHER; note = 2'-O-methylcytidine-3'-phosphate
  modified_base 17: mod_base = OTHER; note = 2'-O-methyluridine-3'-phosphate
  modified_base 18: mod_base = OTHER; note = 2'-O-methylguanosine-3'-phosphate
  modified_base 19: mod_base = OTHER; note = 2'-O-methylcytidine-3'-phosphate
  modified_base 20: mod_base = OTHER; note = 2'-O-methylcytidine-3'-phosphate
  modified_base 21: mod_base = OTHER; note = 2'-O-methyluridine-3'-phosphate N-[tris(GalNAc-alkyl)-amidodecanoyl)]-4-hydroxyprolinol (Hyp-(GalNAc-alkyl)3)
caacagacggagcaactgcct

SEQ ID NO: 6637 - RNA, 21 nt, synthetic construct
  source 1..21: mol_type = other RNA
  modified_base 1: mod_base = OTHER; note = 2'-O-methyladenosine-3'-phosphorothioate
  modified_base 2: mod_base = OTHER; note = 2'-O-methyladenosine-3'-phosphorothioate
  modified_base 3: mod_base = OTHER; note = 2'-O-methylcytidine-3'-phosphate
  modified_base 4: mod_base = OTHER; note = 2'-O-methyladenosine-3'-phosphate
  modified_base 5: mod_base = OTHER; note = 2'-O-methylguanosine-3'-phosphate
  modified_base 6: mod_base = OTHER; note = 2'-O-methyladenosine-3'-phosphate
  modified_base 7: mod_base = OTHER; note = 2'-O-methylcytidine-3'-phosphate
  modified_base 8: mod_base = OTHER; note = 2'-O-methylguanosine-3'-phosphate
  modified_base 9: mod_base = OTHER; note = 2'-fluoroguanosine-3'-phosphate
  modified_base 10: mod_base = OTHER; note = 2'-fluoroadenosine-3'-phosphate
  modified_base 11: mod_base = OTHER; note = 2'-fluoroguanosine-3'-phosphate
  modified_base 12: mod_base = OTHER; note = 2'-O-methylcytidine-3'-phosphate
  modified_base 13: mod_base = OTHER; note = 2'-O-methyladenosine-3'-phosphate
  modified_base 14: mod_base = OTHER; note = 2'-O-methyladenosine-3'-phosphate
  modified_base 15: mod_base = OTHER; note = 2'-O-methylcytidine-3'-phosphate
  modified_base 16: mod_base = OTHER; note = 2'-O-methyluridine-3'-phosphate
  modified_base 17: mod_base = OTHER; note = 2'-O-methylguanosine-3'-phosphate
  modified_base 18: mod_base = OTHER; note = 2'-O-methylcytidine-3'-phosphate
  modified_base 19: mod_base = OTHER; note = 2'-O-methylcytidine-3'-phosphate
  modified_base 20: mod_base = OTHER; note = 2'-O-methyladenosine-3'-phosphate
  modified_base 21: mod_base = OTHER; note = 2'-O-methyluridine-3'-phosphate N-[tris(GalNAc-alkyl)-amidodecanoyl)]-4-hydroxyprolinol (Hyp-(GalNAc-alkyl)3)
aacagacggagcaactgccat

SEQ ID NO: 6638 - RNA, 21 nt, synthetic construct
  source 1..21: mol_type = other RNA
  modified_base 1: mod_base = OTHER; note = 2'-O-methyladenosine-3'-phosphorothioate
  modified_base 2: mod_base = OTHER; note = 2'-O-methylcytidine-3'-phosphorothioate
  modified_base 3: mod_base = OTHER; note = 2'-O-methyladenosine-3'-phosphate
  modified_base 4: mod_base = OTHER; note = 2'-O-methylguanosine-3'-phosphate
  modified_base 5: mod_base = OTHER; note = 2'-O-methyladenosine-3'-phosphate
  modified_base 6: mod_base = OTHER; note = 2'-O-methylcytidine-3'-phosphate
  modified_base 7: mod_base = OTHER; note = 2'-O-methylguanosine-3'-phosphate
  modified_base 8: mod_base = OTHER; note = 2'-O-methylguanosine-3'-phosphate
  modified_base 9: mod_base = OTHER; note = 2'-fluoroadenosine-3'-phosphate
  modified_base 10: mod_base = OTHER; note = 2'-fluoroguanosine-3'-phosphate
  modified_base 11: mod_base = OTHER; note = 2'-fluorocytidine-3'-phosphate
  modified_base 12: mod_base = OTHER; note = 2'-O-methyladenosine-3'-phosphate
  modified_base 13: mod_base = OTHER; note = 2'-O-methyladenosine-3'-phosphate
  modified_base 14: mod_base = OTHER; note = 2'-O-methylcytidine-3'-phosphate
  modified_base 15: mod_base = OTHER; note = 2'-O-methyluridine-3'-phosphate
  modified_base 16: mod_base = OTHER; note = 2'-O-methylguanosine-3'-phosphate
  modified_base 17: mod_base = OTHER; note = 2'-O-methylcytidine-3'-phosphate
  modified_base 18: mod_base = OTHER; note = 2'-O-methylcytidine-3'-phosphate
  modified_base 19: mod_base = OTHER; note = 2'-O-methyladenosine-3'-phosphate
  modified_base 20: mod_base = OTHER; note = 2'-O-methyluridine-3'-phosphate
  modified_base 21: mod_base = OTHER; note = 2'-O-methyluridine-3'-phosphate N-[tris(GalNAc-alkyl)-amidodecanoyl)]-4-hydroxyprolinol (Hyp-(GalNAc-alkyl)3)
acagacggagcaactgccatt

SEQ ID NO: 6639 - RNA, 21 nt, synthetic construct
  source 1..21: mol_type = other RNA
  modified_base 1: mod_base = OTHER; note = 2'-O-methylcytidine-3'-phosphorothioate
  modified_base 2: mod_base = OTHER; note = 2'-O-methyladenosine-3'-phosphorothioate
  modified_base 3: mod_base = OTHER; note = 2'-O-methylguanosine-3'-phosphate
  modified_base 4: mod_base = OTHER; note = 2'-O-methyladenosine-3'-phosphate
  modified_base 5: mod_base = OTHER; note = 2'-O-methylcytidine-3'-phosphate
  modified_base 6: mod_base = OTHER; note = 2'-O-methylguanosine-3'-phosphate
  modified_base 7: mod_base = OTHER; note = 2'-O-methylguanosine-3'-phosphate
  modified_base 8: mod_base = OTHER; note = 2'-O-methyladenosine-3'-phosphate
  modified_base 9: mod_base = OTHER; note = 2'-fluoroguanosine-3'-phosphate
  modified_base 10: mod_base = OTHER; note = 2'-fluorocytidine-3'-phosphate
  modified_base 11: mod_base = OTHER; note = 2'-fluoroadenosine-3'-phosphate
  modified_base 12: mod_base = OTHER; note = 2'-O-methyladenosine-3'-phosphate
  modified_base 13: mod_base = OTHER; note = 2'-O-methylcytidine-3'-phosphate
  modified_base 14: mod_base = OTHER; note = 2'-O-methyluridine-3'-phosphate
  modified_base 15: mod_base = OTHER; note = 2'-O-methylguanosine-3'-phosphate
  modified_base 16: mod_base = OTHER; note = 2'-O-methylcytidine-3'-phosphate
  modified_base 17: mod_base = OTHER; note = 2'-O-methylcytidine-3'-phosphate
  modified_base 18: mod_base = OTHER; note = 2'-O-methyladenosine-3'-phosphate
  modified_base 19: mod_base = OTHER; note = 2'-O-methyluridine-3'-phosphate
  modified_base 20: mod_base = OTHER; note = 2'-O-methylcytidine-3'-phosphate
  modified_base 21: mod_base = OTHER; note = 2'-O-methyluridine-3'-phosphate N-[tris(GalNAc-alkyl)-amidodecanoyl)]-4-hydroxyprolinol (Hyp-(GalNAc-alkyl)3)
cagacggagcaactgccatct

SEQ ID NO: 6640 - RNA, 21 nt, synthetic construct
  source 1..21: mol_type = other RNA
  modified_base 1: mod_base = OTHER; note = 2'-O-methyladenosine-3'-phosphorothioate
  modified_base 2: mod_base = OTHER; note = 2'-O-methylguanosine-3'-phosphorothioate
  modified_base 3: mod_base = OTHER; note = 2'-O-methyladenosine-3'-phosphate
  modified_base 4: mod_base = OTHER; note = 2'-O-methylcytidine-3'-phosphate
  modified_base 5: mod_base = OTHER; note = 2'-O-methylguanosine-3'-phosphate
  modified_base 6: mod_base = OTHER; note = 2'-O-methylguanosine-3'-phosphate
  modified_base 7: mod_base = OTHER; note = 2'-O-methyladenosine-3'-phosphate
  modified_base 8: mod_base = OTHER; note = 2'-O-methylguanosine-3'-phosphate
  modified_base 9: mod_base = OTHER; note = 2'-fluorocytidine-3'-phosphate
  modified_base 10: mod_base = OTHER; note = 2'-fluoroadenosine-3'-phosphate
  modified_base 11: mod_base = OTHER; note = 2'-fluoroadenosine-3'-phosphate
  modified_base 12: mod_base = OTHER; note = 2'-O-methylcytidine-3'-phosphate
  modified_base 13: mod_base = OTHER; note = 2'-O-methyluridine-3'-phosphate
  modified_base 14: mod_base = OTHER; note = 2'-O-methylguanosine-3'-phosphate
  modified_base 15: mod_base = OTHER; note = 2'-O-methylcytidine-3'-phosphate
  modified_base 16: mod_base = OTHER; note = 2'-O-methylcytidine-3'-phosphate
  modified_base 17: mod_base = OTHER; note = 2'-O-methyladenosine-3'-phosphate
  modified_base 18: mod_base = OTHER; note = 2'-O-methyluridine-3'-phosphate
  modified_base 19: mod_base = OTHER; note = 2'-O-methylcytidine-3'-phosphate
  modified_base 20: mod_base = OTHER; note = 2'-O-methylcytidine-3'-phosphate
  modified_base 21: mod_base = OTHER; note = 2'-O-methyluridine-3'-phosphate N-[tris(GalNAc-alkyl)-amidodecanoyl)]-4-hydroxyprolinol (Hyp-(GalNAc-alkyl)3)
agacggagcaactgccatcct

SEQ ID NO: 6641 - RNA, 21 nt, synthetic construct
  source 1..21: mol_type = other RNA
  modified_base 1: mod_base = OTHER; note = 2'-O-methylguanosine-3'-phosphorothioate
  modified_base 2: mod_base = OTHER; note = 2'-O-methyladenosine-3'-phosphorothioate
  modified_base 3: mod_base = OTHER; note = 2'-O-methylcytidine-3'-phosphate
  modified_base 4: mod_base = OTHER; note = 2'-O-methylguanosine-3'-phosphate
  modified_base 5: mod_base = OTHER; note = 2'-O-methylguanosine-3'-phosphate
  modified_base 6: mod_base = OTHER; note = 2'-O-methyladenosine-3'-phosphate
  modified_base 7: mod_base = OTHER; note = 2'-O-methylguanosine-3'-phosphate
  modified_base 8: mod_base = OTHER; note = 2'-O-methylcytidine-3'-phosphate
  modified_base 9: mod_base = OTHER; note = 2'-fluoroadenosine-3'-phosphate
  modified_base 10: mod_base = OTHER; note = 2'-fluoroadenosine-3'-phosphate
  modified_base 11: mod_base = OTHER; note = 2'-fluorocytidine-3'-phosphate
  modified_base 12: mod_base = OTHER; note = 2'-O-methyluridine-3'-phosphate
  modified_base 13: mod_base = OTHER; note = 2'-O-methylguanosine-3'-phosphate
  modified_base 14: mod_base = OTHER; note = 2'-O-methylcytidine-3'-phosphate
  modified_base 15: mod_base = OTHER; note = 2'-O-methylcytidine-3'-phosphate
  modified_base 16: mod_base = OTHER; note = 2'-O-methyladenosine-3'-phosphate
  modified_base 17: mod_base = OTHER; note = 2'-O-methyluridine-3'-phosphate
  modified_base 18: mod_base = OTHER; note = 2'-O-methylcytidine-3'-phosphate
  modified_base 19: mod_base = OTHER; note = 2'-O-methylcytidine-3'-phosphate
  modified_base 20: mod_base = OTHER; note = 2'-O-methylguanosine-3'-phosphate
  modified_base 21: mod_base = OTHER; note = 2'-O-methyluridine-3'-phosphate N-[tris(GalNAc-alkyl)-amidodecanoyl)]-4-hydroxyprolinol (Hyp-(GalNAc-alkyl)3)
gacggagcaactgccatccgt

SEQ ID NO: 6642 - RNA, 21 nt, synthetic construct
  source 1..21: mol_type = other RNA
  modified_base 1: mod_base = OTHER; note = 2'-O-methyladenosine-3'-phosphorothioate
  modified_base 2: mod_base = OTHER; note = 2'-O-methylcytidine-3'-phosphorothioate
  modified_base 3: mod_base = OTHER; note = 2'-O-methylguanosine-3'-phosphate
  modified_base 4: mod_base = OTHER; note = 2'-O-methylguanosine-3'-phosphate
  modified_base 5: mod_base = OTHER; note = 2'-O-methyladenosine-3'-phosphate
  modified_base 6: mod_base = OTHER; note = 2'-O-methylguanosine-3'-phosphate
  modified_base 7: mod_base = OTHER; note = 2'-O-methylcytidine-3'-phosphate
  modified_base 8: mod_base = OTHER; note = 2'-O-methyladenosine-3'-phosphate
  modified_base 9: mod_base = OTHER; note = 2'-fluoroadenosine-3'-phosphate
  modified_base 10: mod_base = OTHER; note = 2'-fluorocytidine-3'-phosphate
  modified_base 11: mod_base = OTHER; note = 2'-fluorouridine-3'-phosphate
  modified_base 12: mod_base = OTHER; note = 2'-O-methylguanosine-3'-phosphate
  modified_base 13: mod_base = OTHER; note = 2'-O-methylcytidine-3'-phosphate
  modified_base 14: mod_base = OTHER; note = 2'-O-methylcytidine-3'-phosphate
  modified_base 15: mod_base = OTHER; note = 2'-O-methyladenosine-3'-phosphate
  modified_base 16: mod_base = OTHER; note = 2'-O-methyluridine-3'-phosphate
  modified_base 17: mod_base = OTHER; note = 2'-O-methylcytidine-3'-phosphate
  modified_base 18: mod_base = OTHER; note = 2'-O-methylcytidine-3'-phosphate
  modified_base 19: mod_base = OTHER; note = 2'-O-methylguanosine-3'-phosphate
  modified_base 20: mod_base = OTHER; note = 2'-O-methyladenosine-3'-phosphate
  modified_base 21: mod_base = OTHER; note = 2'-O-methyluridine-3'-phosphate N-[tris(GalNAc-alkyl)-amidodecanoyl)]-4-hydroxyprolinol (Hyp-(GalNAc-alkyl)3)
acggagcaactgccatccgat

SEQ ID NO: 6643 - RNA, 21 nt, synthetic construct
  source 1..21: mol_type = other RNA
  modified_base 1: mod_base = OTHER; note = 2'-O-methylcytidine-3'-phosphorothioate
  modified_base 2: mod_base = OTHER; note = 2'-O-methylguanosine-3'-phosphorothioate
  modified_base 3: mod_base = OTHER; note = 2'-O-methylguanosine-3'-phosphate
  modified_base 4: mod_base = OTHER; note = 2'-O-methyladenosine-3'-phosphate
  modified_base 5: mod_base = OTHER; note = 2'-O-methylguanosine-3'-phosphate
  modified_base 6: mod_base = OTHER; note = 2'-O-methylcytidine-3'-phosphate
  modified_base 7: mod_base = OTHER; note = 2'-O-methyladenosine-3'-phosphate
  modified_base 8: mod_base = OTHER; note = 2'-O-methyladenosine-3'-phosphate
  modified_base 9: mod_base = OTHER; note = 2'-fluorocytidine-3'-phosphate
  modified_base 10: mod_base = OTHER; note = 2'-fluorouridine-3'-phosphate
  modified_base 11: mod_base = OTHER; note = 2'-fluoroguanosine-3'-phosphate
  modified_base 12: mod_base = OTHER; note = 2'-O-methylcytidine-3'-phosphate
  modified_base 13: mod_base = OTHER; note = 2'-O-methylcytidine-3'-phosphate
  modified_base 14: mod_base = OTHER; note = 2'-O-methyladenosine-3'-phosphate
  modified_base 15: mod_base = OTHER; note = 2'-O-methyluridine-3'-phosphate
  modified_base 16: mod_base = OTHER; note = 2'-O-methylcytidine-3'-phosphate
  modified_base 17: mod_base = OTHER; note = 2'-O-methylcytidine-3'-phosphate
  modified_base 18: mod_base = OTHER; note = 2'-O-methylguanosine-3'-phosphate
  modified_base 19: mod_base = OTHER; note = 2'-O-methyladenosine-3'-phosphate
  modified_base 20: mod_base = OTHER; note = 2'-O-methylguanosine-3'-phosphate
  modified_base 21: mod_base = OTHER; note = 2'-O-methyluridine-3'-phosphate N-[tris(GalNAc-alkyl)-amidodecanoyl)]-4-hydroxyprolinol (Hyp-(GalNAc-alkyl)3)
cggagcaactgccatccgagt

SEQ ID NO: 6644 - RNA, 21 nt, synthetic construct
  source 1..21: mol_type = other RNA
  modified_base 1: mod_base = OTHER; note = 2'-O-methylguanosine-3'-phosphorothioate
  modified_base 2: mod_base = OTHER; note = 2'-O-methylguanosine-3'-phosphorothioate
  modified_base 3: mod_base = OTHER; note = 2'-O-methyladenosine-3'-phosphate
  modified_base 4: mod_base = OTHER; note = 2'-O-methylguanosine-3'-phosphate
  modified_base 5: mod_base = OTHER; note = 2'-O-methylcytidine-3'-phosphate
  modified_base 6: mod_base = OTHER; note = 2'-O-methyladenosine-3'-phosphate
  modified_base 7: mod_base = OTHER; note = 2'-O-methyladenosine-3'-phosphate
  modified_base 8: mod_base = OTHER; note = 2'-O-methylcytidine-3'-phosphate
  modified_base 9: mod_base = OTHER; note = 2'-fluorouridine-3'-phosphate
  modified_base 10: mod_base = OTHER; note = 2'-fluoroguanosine-3'-phosphate
  modified_base 11: mod_base = OTHER; note = 2'-fluorocytidine-3'-phosphate
  modified_base 12: mod_base = OTHER; note = 2'-O-methylcytidine-3'-phosphate
  modified_base 13: mod_base = OTHER; note = 2'-O-methyladenosine-3'-phosphate
  modified_base 14: mod_base = OTHER; note = 2'-O-methyluridine-3'-phosphate
  modified_base 15: mod_base = OTHER; note = 2'-O-methylcytidine-3'-phosphate
  modified_base 16: mod_base = OTHER; note = 2'-O-methylcytidine-3'-phosphate
  modified_base 17: mod_base = OTHER; note = 2'-O-methylguanosine-3'-phosphate
  modified_base 18: mod_base = OTHER; note = 2'-O-methyladenosine-3'-phosphate
  modified_base 19: mod_base = OTHER; note = 2'-O-methylguanosine-3'-phosphate
  modified_base 20: mod_base = OTHER; note = 2'-O-methylguanosine-3'-phosphate
  modified_base 21: mod_base = OTHER; note = 2'-O-methyluridine-3'-phosphate N-[tris(GalNAc-alkyl)-amidodecanoyl)]-4-hydroxyprolinol (Hyp-(GalNAc-alkyl)3)
ggagcaactgccatccgaggt

SEQ ID NO: 6645 - RNA, 21 nt, synthetic construct
  source 1..21: mol_type = other RNA
  modified_base 1: mod_base = OTHER; note = 2'-O-methyladenosine-3'-phosphorothioate
  modified_base 2: mod_base = OTHER; note = 2'-O-methylguanosine-3'-phosphorothioate
  modified_base 3: mod_base = OTHER; note = 2'-O-methylcytidine-3'-phosphate
  modified_base 4: mod_base = OTHER; note = 2'-O-methyladenosine-3'-phosphate
  modified_base 5: mod_base = OTHER; note = 2'-O-methyladenosine-3'-phosphate
  modified_base 6: mod_base = OTHER; note = 2'-O-methylcytidine-3'-phosphate
  modified_base 7: mod_base = OTHER; note = 2'-O-methyluridine-3'-phosphate
  modified_base 8: mod_base = OTHER; note = 2'-O-methylguanosine-3'-phosphate
  modified_base 9: mod_base = OTHER; note = 2'-fluorocytidine-3'-phosphate
  modified_base 10: mod_base = OTHER; note = 2'-fluorocytidine-3'-phosphate
  modified_base 11: mod_base = OTHER; note = 2'-fluoroadenosine-3'-phosphate
  modified_base 12: mod_base = OTHER; note = 2'-O-methyluridine-3'-phosphate
  modified_base 13: mod_base = OTHER; note = 2'-O-methylcytidine-3'-phosphate
  modified_base 14: mod_base = OTHER; note = 2'-O-methylcytidine-3'-phosphate
  modified_base 15: mod_base = OTHER; note = 2'-O-methylguanosine-3'-phosphate
  modified_base 16: mod_base = OTHER; note = 2'-O-methyladenosine-3'-phosphate
  modified_base 17: mod_base = OTHER; note = 2'-O-methylguanosine-3'-phosphate
  modified_base 18: mod_base = OTHER; note = 2'-O-methylguanosine-3'-phosphate
  modified_base 19: mod_base = OTHER; note = 2'-O-methylcytidine-3'-phosphate
  modified_base 20: mod_base = OTHER; note = 2'-O-methyluridine-3'-phosphate
  modified_base 21: mod_base = OTHER; note = 2'-O-methyluridine-3'-phosphate N-[tris(GalNAc-alkyl)-amidodecanoyl)]-4-hydroxyprolinol (Hyp-(GalNAc-alkyl)3)
agcaactgccatccgaggctt

SEQ ID NO: 6646 - RNA, 21 nt, synthetic construct
  source 1..21: mol_type = other RNA
  modified_base 1: mod_base = OTHER; note = 2'-O-methylguanosine-3'-phosphorothioate
  modified_base 2: mod_base = OTHER; note = 2'-O-methylcytidine-3'-phosphorothioate
  modified_base 3: mod_base = OTHER; note = 2'-O-methyladenosine-3'-phosphate
  modified_base 4: mod_base = OTHER; note = 2'-O-methyladenosine-3'-phosphate
  modified_base 5: mod_base = OTHER; note = 2'-O-methylcytidine-3'-phosphate
  modified_base 6: mod_base = OTHER; note = 2'-O-methyluridine-3'-phosphate
  modified_base 7: mod_base = OTHER; note = 2'-O-methylguanosine-3'-phosphate
  modified_base 8: mod_base = OTHER; note = 2'-O-methylcytidine-3'-phosphate
  modified_base 9: mod_base = OTHER; note = 2'-fluorocytidine-3'-phosphate
  modified_base 10: mod_base = OTHER; note = 2'-fluoroadenosine-3'-phosphate
  modified_base 11: mod_base = OTHER; note = 2'-fluorouridine-3'-phosphate
  modified_base 12: mod_base = OTHER; note = 2'-O-methylcytidine-3'-phosphate
  modified_base 13: mod_base = OTHER; note = 2'-O-methylcytidine-3'-phosphate
  modified_base 14: mod_base = OTHER; note = 2'-O-methylguanosine-3'-phosphate
  modified_base 15: mod_base = OTHER; note = 2'-O-methyladenosine-3'-phosphate
  modified_base 16: mod_base = OTHER; note = 2'-O-methylguanosine-3'-phosphate
  modified_base 17: mod_base = OTHER; note = 2'-O-methylguanosine-3'-phosphate
  modified_base 18: mod_base = OTHER; note = 2'-O-methylcytidine-3'-phosphate
  modified_base 19: mod_base = OTHER; note = 2'-O-methyluridine-3'-phosphate
  modified_base 20: mod_base = OTHER; note = 2'-O-methylcytidine-3'-phosphate
  modified_base 21: mod_base = OTHER; note = 2'-O-methyluridine-3'-phosphate N-[tris(GalNAc-alkyl)-amidodecanoyl)]-4-hydroxyprolinol (Hyp-(GalNAc-alkyl)3)
gcaactgccatccgaggctct

SEQ ID NO: 6647 - RNA, 21 nt, synthetic construct
  source 1..21: mol_type = other RNA
  modified_base 1: mod_base = OTHER; note = 2'-O-methylcytidine-3'-phosphorothioate
  modified_base 2: mod_base = OTHER; note = 2'-O-methyladenosine-3'-phosphorothioate
  modified_base 3: mod_base = OTHER; note = 2'-O-methyladenosine-3'-phosphate
  modified_base 4: mod_base = OTHER; note = 2'-O-methylcytidine-3'-phosphate
  modified_base 5: mod_base = OTHER; note = 2'-O-methyluridine-3'-phosphate
  modified_base 6: mod_base = OTHER; note = 2'-O-methylguanosine-3'-phosphate
  modified_base 7: mod_base = OTHER; note = 2'-O-methylcytidine-3'-phosphate
  modified_base 8: mod_base = OTHER; note = 2'-O-methylcytidine-3'-phosphate
  modified_base 9: mod_base = OTHER; note = 2'-fluoroadenosine-3'-phosphate
  modified_base 10: mod_base = OTHER; note = 2'-fluorouridine-3'-phosphate
  modified_base 11: mod_base = OTHER; note = 2'-fluorocytidine-3'-phosphate
  modified_base 12: mod_base = OTHER; note = 2'-O-methylcytidine-3'-phosphate
  modified_base 13: mod_base = OTHER; note = 2'-O-methylguanosine-3'-phosphate
  modified_base 14: mod_base = OTHER; note = 2'-O-methyladenosine-3'-phosphate
  modified_base 15: mod_base = OTHER; note = 2'-O-methylguanosine-3'-phosphate
  modified_base 16: mod_base = OTHER; note = 2'-O-methylguanosine-3'-phosphate
  modified_base 17: mod_base = OTHER; note = 2'-O-methylcytidine-3'-phosphate
  modified_base 18: mod_base = OTHER; note = 2'-O-methyluridine-3'-phosphate
  modified_base 19: mod_base = OTHER; note = 2'-O-methylcytidine-3'-phosphate
  modified_base 20: mod_base = OTHER; note = 2'-O-methylcytidine-3'-phosphate
  modified_base 21: mod_base = OTHER; note = 2'-O-methyluridine-3'-phosphate N-[tris(GalNAc-alkyl)-amidodecanoyl)]-4-hydroxyprolinol (Hyp-(GalNAc-alkyl)3)
caactgccatccgaggctcct

SEQ ID NO: 6648 - RNA, 21 nt, synthetic construct
  source 1..21: mol_type = other RNA
  modified_base 1: mod_base = OTHER; note = 2'-O-methylcytidine-3'-phosphorothioate
  modified_base 2: mod_base = OTHER; note = 2'-O-methyladenosine-3'-phosphorothioate
  modified_base 3: mod_base = OTHER; note = 2'-O-methyladenosine-3'-phosphate
  modified_base 4: mod_base = OTHER; note = 2'-O-methylguanosine-3'-phosphate
  modified_base 5: mod_base = OTHER; note = 2'-O-methylcytidine-3'-phosphate
  modified_base 6: mod_base = OTHER; note = 2'-O-methyladenosine-3'-phosphate
  modified_base 7: mod_base = OTHER; note = 2'-O-methylguanosine-3'-phosphate
  modified_base 8: mod_base = OTHER; note = 2'-O-methyladenosine-3'-phosphate
  modified_base 9: mod_base = OTHER; note = 2'-fluoroadenosine-3'-phosphate
  modified_base 10: mod_base = OTHER; note = 2'-fluorocytidine-3'-phosphate
  modified_base 11: mod_base = OTHER; note = 2'-fluoroguanosine-3'-phosphate
  modified_base 12: mod_base = OTHER; note = 2'-O-methyladenosine-3'-phosphate
  modified_base 13: mod_base = OTHER; note = 2'-O-methylguanosine-3'-phosphate
  modified_base 14: mod_base = OTHER; note = 2'-O-methylcytidine-3'-phosphate
  modified_base 15: mod_base = OTHER; note = 2'-O-methyluridine-3'-phosphate
  modified_base 16: mod_base = OTHER; note = 2'-O-methylcytidine-3'-phosphate
  modified_base 17: mod_base = OTHER; note = 2'-O-methyluridine-3'-phosphate
  modified_base 18: mod_base = OTHER; note = 2'-O-methylguanosine-3'-phosphate
  modified_base 19: mod_base = OTHER; note = 2'-O-methylguanosine-3'-phosphate
  modified_base 20: mod_base = OTHER; note = 2'-O-methyluridine-3'-phosphate
  modified_base 21: mod_base = OTHER; note = 2'-O-methyluridine-3'-phosphate N-[tris(GalNAc-alkyl)-amidodecanoyl)]-4-hydroxyprolinol (Hyp-(GalNAc-alkyl)3)
caagcagaacgagctctggtt

SEQ ID NO: 6649 - RNA, 21 nt, synthetic construct
  source 1..21: mol_type = other RNA
  modified_base 1: mod_base = OTHER; note = 2'-O-methyladenosine-3'-phosphorothioate
  modified_base 2: mod_base = OTHER; note = 2'-O-methyladenosine-3'-phosphorothioate
  modified_base 3: mod_base = OTHER; note = 2'-O-methylguanosine-3'-phosphate
  modified_base 4: mod_base = OTHER; note = 2'-O-methylcytidine-3'-phosphate
  modified_base 5: mod_base = OTHER; note = 2'-O-methyladenosine-3'-phosphate
  modified_base 6: mod_base = OTHER; note = 2'-O-methylguanosine-3'-phosphate
  modified_base 7: mod_base = OTHER; note = 2'-O-methyladenosine-3'-phosphate
  modified_base 8: mod_base = OTHER; note = 2'-O-methyladenosine-3'-phosphate
  modified_base 9: mod_base = OTHER; note = 2'-fluorocytidine-3'-phosphate
  modified_base 10: mod_base = OTHER; note = 2'-fluoroguanosine-3'-phosphate
  modified_base 11: mod_base = OTHER; note = 2'-fluoroadenosine-3'-phosphate
  modified_base 12: mod_base = OTHER; note = 2'-O-methylguanosine-3'-phosphate
  modified_base 13: mod_base = OTHER; note = 2'-O-methylcytidine-3'-phosphate
  modified_base 14: mod_base = OTHER; note = 2'-O-methyluridine-3'-phosphate
  modified_base 15: mod_base = OTHER; note = 2'-O-methylcytidine-3'-phosphate
  modified_base 16: mod_base = OTHER; note = 2'-O-methyluridine-3'-phosphate
  modified_base 17: mod_base = OTHER; note = 2'-O-methylguanosine-3'-phosphate
  modified_base 18: mod_base = OTHER; note = 2'-O-methylguanosine-3'-phosphate
  modified_base 19: mod_base = OTHER; note = 2'-O-methyluridine-3'-phosphate
  modified_base 20: mod_base = OTHER; note = 2'-O-methylguanosine-3'-phosphate
  modified_base 21: mod_base = OTHER; note = 2'-O-methyluridine-3'-phosphate N-[tris(GalNAc-alkyl)-amidodecanoyl)]-4-hydroxyprolinol (Hyp-(GalNAc-alkyl)3)
aagcagaacgagctctggtgt

SEQ ID NO: 6650 - RNA, 21 nt, synthetic construct
  source 1..21: mol_type = other RNA
  modified_base 1: mod_base = OTHER; note = 2'-O-methyladenosine-3'-phosphorothioate
  modified_base 2: mod_base = OTHER; note = 2'-O-methylguanosine-3'-phosphorothioate
  modified_base 3: mod_base = OTHER; note = 2'-O-methylcytidine-3'-phosphate
  modified_base 4: mod_base = OTHER; note = 2'-O-methyladenosine-3'-phosphate
  modified_base 5: mod_base = OTHER; note = 2'-O-methylguanosine-3'-phosphate
  modified_base 6: mod_base = OTHER; note = 2'-O-methyladenosine-3'-phosphate
  modified_base 7: mod_base = OTHER; note = 2'-O-methyladenosine-3'-phosphate
  modified_base 8: mod_base = OTHER; note = 2'-O-methylcytidine-3'-phosphate
  modified_base 9: mod_base = OTHER; note = 2'-fluoroguanosine-3'-phosphate
  modified_base 10: mod_base = OTHER; note = 2'-fluoroadenosine-3'-phosphate
  modified_base 11: mod_base = OTHER; note = 2'-fluoroguanosine-3'-phosphate
  modified_base 12: mod_base = OTHER; note = 2'-O-methylcytidine-3'-phosphate
  modified_base 13: mod_base = OTHER; note = 2'-O-methyluridine-3'-phosphate
  modified_base 14: mod_base = OTHER; note = 2'-O-methylcytidine-3'-phosphate
  modified_base 15: mod_base = OTHER; note = 2'-O-methyluridine-3'-phosphate
  modified_base 16: mod_base = OTHER; note = 2'-O-methylguanosine-3'-phosphate
  modified_base 17: mod_base = OTHER; note = 2'-O-methylguanosine-3'-phosphate
  modified_base 18: mod_base = OTHER; note = 2'-O-methyluridine-3'-phosphate
  modified_base 19: mod_base = OTHER; note = 2'-O-methylguanosine-3'-phosphate
  modified_base 20: mod_base = OTHER; note = 2'-O-methylcytidine-3'-phosphate
  modified_base 21: mod_base = OTHER; note = 2'-O-methyluridine-3'-phosphate N-[tris(GalNAc-alkyl)-amidodecanoyl)]-4-hydroxyprolinol (Hyp-(GalNAc-alkyl)3)
agcagaacgagctctggtgct

SEQ ID NO: 6651 - RNA, 21 nt, synthetic construct
  source 1..21: mol_type = other RNA
  modified_base 1: mod_base = OTHER; note = 2'-O-methylguanosine-3'-phosphorothioate
  modified_base 2: mod_base = OTHER; note = 2'-O-methylcytidine-3'-phosphorothioate
  modified_base 3: mod_base = OTHER; note = 2'-O-methyladenosine-3'-phosphate
  modified_base 4: mod_base = OTHER; note = 2'-O-methylguanosine-3'-phosphate
  modified_base 5: mod_base = OTHER; note = 2'-O-methyladenosine-3'-phosphate
  modified_base 6: mod_base = OTHER; note = 2'-O-methyladenosine-3'-phosphate
  modified_base 7: mod_base = OTHER; note = 2'-O-methylcytidine-3'-phosphate
  modified_base 8: mod_base = OTHER; note = 2'-O-methylguanosine-3'-phosphate
  modified_base 9: mod_base = OTHER; note = 2'-fluoroadenosine-3'-phosphate
  modified_base 10: mod_base = OTHER; note = 2'-fluoroguanosine-3'-phosphate
  modified_base 11: mod_base = OTHER; note = 2'-fluorocytidine-3'-phosphate
  modified_base 12: mod_base = OTHER; note = 2'-O-methyluridine-3'-phosphate
  modified_base 13: mod_base = OTHER; note = 2'-O-methylcytidine-3'-phosphate
  modified_base 14: mod_base = OTHER; note = 2'-O-methyluridine-3'-phosphate
  modified_base 15: mod_base = OTHER; note = 2'-O-methylguanosine-3'-phosphate
  modified_base 16: mod_base = OTHER; note = 2'-O-methylguanosine-3'-phosphate
  modified_base 17: mod_base = OTHER; note = 2'-O-methyluridine-3'-phosphate
  modified_base 18: mod_base = OTHER; note = 2'-O-methylguanosine-3'-phosphate
  modified_base 19: mod_base = OTHER; note = 2'-O-methylcytidine-3'-phosphate
  modified_base 20: mod_base = OTHER; note = 2'-O-methyluridine-3'-phosphate
  modified_base 21: mod_base = OTHER; note = 2'-O-methyluridine-3'-phosphate N-[tris(GalNAc-alkyl)-amidodecanoyl)]-4-hydroxyprolinol (Hyp-(GalNAc-alkyl)3)
gcagaacgagctctggtgctt

SEQ ID NO: 6652 - RNA, 21 nt, synthetic construct
  source 1..21: mol_type = other RNA
  modified_base 1: mod_base = OTHER; note = 2'-O-methylcytidine-3'-phosphorothioate
  modified_base 2: mod_base = OTHER; note = 2'-O-methyladenosine-3'-phosphorothioate
  modified_base 3: mod_base = OTHER; note = 2'-O-methylguanosine-3'-phosphate
  modified_base 4: mod_base = OTHER; note = 2'-O-methyladenosine-3'-phosphate
  modified_base 5: mod_base = OTHER; note = 2'-O-methyladenosine-3'-phosphate
  modified_base 6: mod_base = OTHER; note = 2'-O-methylcytidine-3'-phosphate
  modified_base 7: mod_base = OTHER; note = 2'-O-methylguanosine-3'-phosphate
  modified_base 8: mod_base = OTHER; note = 2'-O-methyladenosine-3'-phosphate
  modified_base 9: mod_base = OTHER; note = 2'-fluoroguanosine-3'-phosphate
  modified_base 10: mod_base = OTHER; note = 2'-fluorocytidine-3'-phosphate
  modified_base 11: mod_base = OTHER; note = 2'-fluorouridine-3'-phosphate
  modified_base 12: mod_base = OTHER; note = 2'-O-methylcytidine-3'-phosphate
  modified_base 13: mod_base = OTHER; note = 2'-O-methyluridine-3'-phosphate
  modified_base 14: mod_base = OTHER; note = 2'-O-methylguanosine-3'-phosphate
  modified_base 15: mod_base = OTHER; note = 2'-O-methylguanosine-3'-phosphate
  modified_base 16: mod_base = OTHER; note = 2'-O-methyluridine-3'-phosphate
  modified_base 17: mod_base = OTHER; note = 2'-O-methylguanosine-3'-phosphate
  modified_base 18: mod_base = OTHER; note = 2'-O-methylcytidine-3'-phosphate
  modified_base 19: mod_base = OTHER; note = 2'-O-methyluridine-3'-phosphate
  modified_base 20: mod_base = OTHER; note = 2'-O-methylguanosine-3'-phosphate
  modified_base 21: mod_base = OTHER; note = 2'-O-methyluridine-3'-phosphate N-[tris(GalNAc-alkyl)-amidodecanoyl)]-4-hydroxyprolinol (Hyp-(GalNAc-alkyl)3)
cagaacgagctctggtgctgt

SEQ ID NO: 6653 - RNA, 21 nt, synthetic construct
  source 1..21: mol_type = other RNA
  modified_base 1: mod_base = OTHER; note = 2'-O-methyladenosine-3'-phosphorothioate
  modified_base 2: mod_base = OTHER; note = 2'-O-methylguanosine-3'-phosphorothioate
  modified_base 3: mod_base = OTHER; note = 2'-O-methyladenosine-3'-phosphate
  modified_base 4: mod_base = OTHER; note = 2'-O-methyladenosine-3'-phosphate
  modified_base 5: mod_base = OTHER; note = 2'-O-methylcytidine-3'-phosphate
  modified_base 6: mod_base = OTHER; note = 2'-O-methylguanosine-3'-phosphate
  modified_base 7: mod_base = OTHER; note = 2'-O-methyladenosine-3'-phosphate
  modified_base 8: mod_base = OTHER; note = 2'-O-methylguanosine-3'-phosphate
  modified_base 9: mod_base = OTHER; note = 2'-fluorocytidine-3'-phosphate
  modified_base 10: mod_base = OTHER; note = 2'-fluorouridine-3'-phosphate
  modified_base 11: mod_base = OTHER; note = 2'-fluorocytidine-3'-phosphate
  modified_base 12: mod_base = OTHER; note = 2'-O-methyluridine-3'-phosphate
  modified_base 13: mod_base = OTHER; note = 2'-O-methylguanosine-3'-phosphate
  modified_base 14: mod_base = OTHER; note = 2'-O-methylguanosine-3'-phosphate
  modified_base 15: mod_base = OTHER; note = 2'-O-methyluridine-3'-phosphate
  modified_base 16: mod_base = OTHER; note = 2'-O-methylguanosine-3'-phosphate
  modified_base 17: mod_base = OTHER; note = 2'-O-methylcytidine-3'-phosphate
  modified_base 18: mod_base = OTHER; note = 2'-O-methyluridine-3'-phosphate
  modified_base 19: mod_base = OTHER; note = 2'-O-methylguanosine-3'-phosphate
  modified_base 20: mod_base = OTHER; note = 2'-O-methylguanosine-3'-phosphate
  modified_base 21: mod_base = OTHER; note = 2'-O-methyluridine-3'-phosphate N-[tris(GalNAc-alkyl)-amidodecanoyl)]-4-hydroxyprolinol (Hyp-(GalNAc-alkyl)3)
agaacgagctctggtgctggt

SEQ ID NO: 6654 - RNA, 21 nt, synthetic construct
  source 1..21: mol_type = other RNA
  modified_base 1: mod_base = OTHER; note = 2'-O-methylguanosine-3'-phosphorothioate
  modified_base 2: mod_base = OTHER; note = 2'-O-methyladenosine-3'-phosphorothioate
  modified_base 3: mod_base = OTHER; note = 2'-O-methyladenosine-3'-phosphate
  modified_base 4: mod_base = OTHER; note = 2'-O-methylcytidine-3'-phosphate
  modified_base 5: mod_base = OTHER; note = 2'-O-methylguanosine-3'-phosphate
  modified_base 6: mod_base = OTHER; note = 2'-O-methyladenosine-3'-phosphate
  modified_base 7: mod_base = OTHER; note = 2'-O-methylguanosine-3'-phosphate
  modified_base 8: mod_base = OTHER; note = 2'-O-methylcytidine-3'-phosphate
  modified_base 9: mod_base = OTHER; note = 2'-fluorouridine-3'-phosphate
  modified_base 10: mod_base = OTHER; note = 2'-fluorocytidine-3'-phosphate
  modified_base 11: mod_base = OTHER; note = 2'-fluorouridine-3'-phosphate
  modified_base 12: mod_base = OTHER; note = 2'-O-methylguanosine-3'-phosphate
  modified_base 13: mod_base = OTHER; note = 2'-O-methylguanosine-3'-phosphate
  modified_base 14: mod_base = OTHER; note = 2'-O-methyluridine-3'-phosphate
  modified_base 15: mod_base = OTHER; note = 2'-O-methylguanosine-3'-phosphate
  modified_base 16: mod_base = OTHER; note = 2'-O-methylcytidine-3'-phosphate
  modified_base 17: mod_base = OTHER; note = 2'-O-methyluridine-3'-phosphate
  modified_base 18: mod_base = OTHER; note = 2'-O-methylguanosine-3'-phosphate
  modified_base 19: mod_base = OTHER; note = 2'-O-methylguanosine-3'-phosphate
  modified_base 20: mod_base = OTHER; note = 2'-O-methyladenosine-3'-phosphate
  modified_base 21: mod_base = OTHER; note = 2'-O-methyluridine-3'-phosphate N-[tris(GalNAc-alkyl)-amidodecanoyl)]-4-hydroxyprolinol (Hyp-(GalNAc-alkyl)3)
gaacgagctctggtgctggat

SEQ ID NO: 6655 - RNA, 21 nt, synthetic construct
  source 1..21: mol_type = other RNA
  modified_base 1: mod_base = OTHER; note = 2'-O-methyladenosine-3'-phosphorothioate
  modified_base 2: mod_base = OTHER; note = 2'-O-methyladenosine-3'-phosphorothioate
  modified_base 3: mod_base = OTHER; note = 2'-O-methylcytidine-3'-phosphate
  modified_base 4: mod_base = OTHER; note = 2'-O-methylguanosine-3'-phosphate
  modified_base 5: mod_base = OTHER; note = 2'-O-methyladenosine-3'-phosphate
  modified_base 6: mod_base = OTHER; note = 2'-O-methylguanosine-3'-phosphate
  modified_base 7: mod_base = OTHER; note = 2'-O-methylcytidine-3'-phosphate
  modified_base 8: mod_base = OTHER; note = 2'-O-methyluridine-3'-phosphate
  modified_base 9: mod_base = OTHER; note = 2'-fluorocytidine-3'-phosphate
  modified_base 10: mod_base = OTHER; note = 2'-fluorouridine-3'-phosphate
  modified_base 11: mod_base = OTHER; note = 2'-fluoroguanosine-3'-phosphate
  modified_base 12: mod_base = OTHER; note = 2'-O-methylguanosine-3'-phosphate
  modified_base 13: mod_base = OTHER; note = 2'-O-methyluridine-3'-phosphate
  modified_base 14: mod_base = OTHER; note = 2'-O-methylguanosine-3'-phosphate
  modified_base 15: mod_base = OTHER; note = 2'-O-methylcytidine-3'-phosphate
  modified_base 16: mod_base = OTHER; note = 2'-O-methyluridine-3'-phosphate
  modified_base 17: mod_base = OTHER; note = 2'-O-methylguanosine-3'-phosphate
  modified_base 18: mod_base = OTHER; note = 2'-O-methylguanosine-3'-phosphate
  modified_base 19: mod_base = OTHER; note = 2'-O-methyladenosine-3'-phosphate
  modified_base 20: mod_base = OTHER; note = 2'-O-methylguanosine-3'-phosphate
  modified_base 21: mod_base = OTHER; note = 2'-O-methyluridine-3'-phosphate N-[tris(GalNAc-alkyl)-amidodecanoyl)]-4-hydroxyprolinol (Hyp-(GalNAc-alkyl)3)
aacgagctctggtgctggagt

SEQ ID NO: 6656 - RNA, 21 nt, synthetic construct
  source 1..21: mol_type = other RNA
  modified_base 1: mod_base = OTHER; note = 2'-O-methyladenosine-3'-phosphorothioate
  modified_base 2: mod_base = OTHER; note = 2'-O-methylcytidine-3'-phosphorothioate
  modified_base 3: mod_base = OTHER; note = 2'-O-methylguanosine-3'-phosphate
  modified_base 4: mod_base = OTHER; note = 2'-O-methyladenosine-3'-phosphate
  modified_base 5: mod_base = OTHER; note = 2'-O-methylguanosine-3'-phosphate
  modified_base 6: mod_base = OTHER; note = 2'-O-methylcytidine-3'-phosphate
  modified_base 7: mod_base = OTHER; note = 2'-O-methyluridine-3'-phosphate
  modified_base 8: mod_base = OTHER; note = 2'-O-methylcytidine-3'-phosphate
  modified_base 9: mod_base = OTHER; note = 2'-fluorouridine-3'-phosphate
  modified_base 10: mod_base = OTHER; note = 2'-fluoroguanosine-3'-phosphate
  modified_base 11: mod_base = OTHER; note = 2'-fluoroguanosine-3'-phosphate
  modified_base 12: mod_base = OTHER; note = 2'-O-methyluridine-3'-phosphate
  modified_base 13: mod_base = OTHER; note = 2'-O-methylguanosine-3'-phosphate
  modified_base 14: mod_base = OTHER; note = 2'-O-methylcytidine-3'-phosphate
  modified_base 15: mod_base = OTHER; note = 2'-O-methyluridine-3'-phosphate
  modified_base 16: mod_base = OTHER; note = 2'-O-methylguanosine-3'-phosphate
  modified_base 17: mod_base = OTHER; note = 2'-O-methylguanosine-3'-phosphate
  modified_base 18: mod_base = OTHER; note = 2'-O-methyladenosine-3'-phosphate
  modified_base 19: mod_base = OTHER; note = 2'-O-methylguanosine-3'-phosphate
  modified_base 20: mod_base = OTHER; note = 2'-O-methylcytidine-3'-phosphate
  modified_base 21: mod_base = OTHER; note = 2'-O-methyluridine-3'-phosphate N-[tris(GalNAc-alkyl)-amidodecanoyl)]-4-hydroxyprolinol (Hyp-(GalNAc-alkyl)3)
acgagctctggtgctggagct

SEQ ID NO: 6657 - RNA, 21 nt, synthetic construct
  source 1..21: mol_type = other RNA
  modified_base 1: mod_base = OTHER; note = 2'-O-methylguanosine-3'-phosphorothioate
  modified_base 2: mod_base = OTHER; note = 2'-O-methyladenosine-3'-phosphorothioate
  modified_base 3: mod_base = OTHER; note = 2'-O-methylguanosine-3'-phosphate
  modified_base 4: mod_base = OTHER; note = 2'-O-methylcytidine-3'-phosphate
  modified_base 5: mod_base = OTHER; note = 2'-O-methyluridine-3'-phosphate
  modified_base 6: mod_base = OTHER; note = 2'-O-methylcytidine-3'-phosphate
  modified_base 7: mod_base = OTHER; note = 2'-O-methyluridine-3'-phosphate
  modified_base 8: mod_base = OTHER; note = 2'-O-methylguanosine-3'-phosphate
  modified_base 9: mod_base = OTHER; note = 2'-fluoroguanosine-3'-phosphate
  modified_base 10: mod_base = OTHER; note = 2'-fluorouridine-3'-phosphate
  modified_base 11: mod_base = OTHER; note = 2'-fluoroguanosine-3'-phosphate
  modified_base 12: mod_base = OTHER; note = 2'-O-methylcytidine-3'-phosphate
  modified_base 13: mod_base = OTHER; note = 2'-O-methyluridine-3'-phosphate
  modified_base 14: mod_base = OTHER; note = 2'-O-methylguanosine-3'-phosphate
  modified_base 15: mod_base = OTHER; note = 2'-O-methylguanosine-3'-phosphate
  modified_base 16: mod_base = OTHER; note = 2'-O-methyladenosine-3'-phosphate
  modified_base 17: mod_base = OTHER; note = 2'-O-methylguanosine-3'-phosphate
  modified_base 18: mod_base = OTHER; note = 2'-O-methylcytidine-3'-phosphate
  modified_base 19: mod_base = OTHER; note = 2'-O-methyluridine-3'-phosphate
  modified_base 20: mod_base = OTHER; note = 2'-O-methyladenosine-3'-phosphate
  modified_base 21: mod_base = OTHER; note = 2'-O-methyluridine-3'-phosphate N-[tris(GalNAc-alkyl)-amidodecanoyl)]-4-hydroxyprolinol (Hyp-(GalNAc-alkyl)3)
gagctctggtgctggagctat

SEQ ID NO: 6658 - RNA, 21 nt, synthetic construct
  source 1..21: mol_type = other RNA
  modified_base 1: mod_base = OTHER; note = 2'-O-methylguanosine-3'-phosphorothioate
  modified_base 2: mod_base = OTHER; note = 2'-O-methylcytidine-3'-phosphorothioate
  modified_base 3: mod_base = OTHER; note = 2'-O-methyluridine-3'-phosphate
  modified_base 4: mod_base = OTHER; note = 2'-O-methylcytidine-3'-phosphate
  modified_base 5: mod_base = OTHER; note = 2'-O-methyluridine-3'-phosphate
  modified_base 6: mod_base = OTHER; note = 2'-O-methylguanosine-3'-phosphate
  modified_base 7: mod_base = OTHER; note = 2'-O-methylguanosine-3'-phosphate
  modified_base 8: mod_base = OTHER; note = 2'-O-methyluridine-3'-phosphate
  modified_base 9: mod_base = OTHER; note = 2'-fluoroguanosine-3'-phosphate
  modified_base 10: mod_base = OTHER; note = 2'-fluorocytidine-3'-phosphate
  modified_base 11: mod_base = OTHER; note = 2'-fluorouridine-3'-phosphate
  modified_base 12: mod_base = OTHER; note = 2'-O-methylguanosine-3'-phosphate
  modified_base 13: mod_base = OTHER; note = 2'-O-methylguanosine-3'-phosphate
  modified_base 14: mod_base = OTHER; note = 2'-O-methyladenosine-3'-phosphate
  modified_base 15: mod_base = OTHER; note = 2'-O-methylguanosine-3'-phosphate
  modified_base 16: mod_base = OTHER; note = 2'-O-methylcytidine-3'-phosphate
  modified_base 17: mod_base = OTHER; note = 2'-O-methyluridine-3'-phosphate
  modified_base 18: mod_base = OTHER; note = 2'-O-methyladenosine-3'-phosphate
  modified_base 19: mod_base = OTHER; note = 2'-O-methylguanosine-3'-phosphate
  modified_base 20: mod_base = OTHER; note = 2'-O-methylcytidine-3'-phosphate
  modified_base 21: mod_base = OTHER; note = 2'-O-methyluridine-3'-phosphate N-[tris(GalNAc-alkyl)-amidodecanoyl)]-4-hydroxyprolinol (Hyp-(GalNAc-alkyl)3)
gctctggtgctggagctagct

SEQ ID NO: 6659 - RNA, 21 nt, synthetic construct
  source 1..21: mol_type = other RNA
  modified_base 1: mod_base = OTHER; note = 2'-O-methylcytidine-3'-phosphorothioate
  modified_base 2: mod_base = OTHER; note = 2'-O-methyluridine-3'-phosphorothioate
  modified_base 3: mod_base = OTHER; note = 2'-O-methylcytidine-3'-phosphate
  modified_base 4: mod_base = OTHER; note = 2'-O-methyluridine-3'-phosphate
  modified_base 5: mod_base = OTHER; note = 2'-O-methylguanosine-3'-phosphate
  modified_base 6: mod_base = OTHER; note = 2'-O-methylguanosine-3'-phosphate
  modified_base 7: mod_base = OTHER; note = 2'-O-methyluridine-3'-phosphate
  modified_base 8: mod_base = OTHER; note = 2'-O-methylguanosine-3'-phosphate
  modified_base 9: mod_base = OTHER; note = 2'-fluorocytidine-3'-phosphate
  modified_base 10: mod_base = OTHER; note = 2'-fluorouridine-3'-phosphate
  modified_base 11: mod_base = OTHER; note = 2'-fluoroguanosine-3'-phosphate
  modified_base 12: mod_base = OTHER; note = 2'-O-methylguanosine-3'-phosphate
  modified_base 13: mod_base = OTHER; note = 2'-O-methyladenosine-3'-phosphate
  modified_base 14: mod_base = OTHER; note = 2'-O-methylguanosine-3'-phosphate
  modified_base 15: mod_base = OTHER; note = 2'-O-methylcytidine-3'-phosphate
  modified_base 16: mod_base = OTHER; note = 2'-O-methyluridine-3'-phosphate
  modified_base 17: mod_base = OTHER; note = 2'-O-methyladenosine-3'-phosphate
  modified_base 18: mod_base = OTHER; note = 2'-O-methylguanosine-3'-phosphate
  modified_base 19: mod_base = OTHER; note = 2'-O-methylcytidine-3'-phosphate
  modified_base 20: mod_base = OTHER; note = 2'-O-methylcytidine-3'-phosphate
  modified_base 21: mod_base = OTHER; note = 2'-O-methyluridine-3'-phosphate N-[tris(GalNAc-alkyl)-amidodecanoyl)]-4-hydroxyprolinol (Hyp-(GalNAc-alkyl)3)
ctctggtgctggagctagcct

SEQ ID NO: 6660 - RNA, 21 nt, synthetic construct
  source 1..21: mol_type = other RNA
  modified_base 1: mod_base = OTHER; note = 2'-O-methyluridine-3'-phosphorothioate
  modified_base 2: mod_base = OTHER; note = 2'-O-methylcytidine-3'-phosphorothioate
  modified_base 3: mod_base = OTHER; note = 2'-O-methyluridine-3'-phosphate
  modified_base 4: mod_base = OTHER; note = 2'-O-methylguanosine-3'-phosphate
  modified_base 5: mod_base = OTHER; note = 2'-O-methylguanosine-3'-phosphate
  modified_base 6: mod_base = OTHER; note = 2'-O-methyluridine-3'-phosphate
  modified_base 7: mod_base = OTHER; note = 2'-O-methylguanosine-3'-phosphate
  modified_base 8: mod_base = OTHER; note = 2'-O-methylcytidine-3'-phosphate
  modified_base 9: mod_base = OTHER; note = 2'-fluorouridine-3'-phosphate
  modified_base 10: mod_base = OTHER; note = 2'-fluoroguanosine-3'-phosphate
  modified_base 11: mod_base = OTHER; note = 2'-fluoroguanosine-3'-phosphate
  modified_base 12: mod_base = OTHER; note = 2'-O-methyladenosine-3'-phosphate
  modified_base 13: mod_base = OTHER; note = 2'-O-methylguanosine-3'-phosphate
  modified_base 14: mod_base = OTHER; note = 2'-O-methylcytidine-3'-phosphate
  modified_base 15: mod_base = OTHER; note = 2'-O-methyluridine-3'-phosphate
  modified_base 16: mod_base = OTHER; note = 2'-O-methyladenosine-3'-phosphate
  modified_base 17: mod_base = OTHER; note = 2'-O-methylguanosine-3'-phosphate
  modified_base 18: mod_base = OTHER; note = 2'-O-methylcytidine-3'-phosphate
  modified_base 19: mod_base = OTHER; note = 2'-O-methylcytidine-3'-phosphate
  modified_base 20: mod_base = OTHER; note = 2'-O-methyladenosine-3'-phosphate
  modified_base 21: mod_base = OTHER; note = 2'-O-methyluridine-3'-phosphate N-[tris(GalNAc-alkyl)-amidodecanoyl)]-4-hydroxyprolinol (Hyp-(GalNAc-alkyl)3)
tctggtgctggagctagccat

SEQ ID NO: 6661 - RNA, 21 nt, synthetic construct
  source 1..21: mol_type = other RNA
  modified_base 1: mod_base = OTHER; note = 2'-O-methylcytidine-3'-phosphorothioate
  modified_base 2: mod_base = OTHER; note = 2'-O-methyluridine-3'-phosphorothioate
  modified_base 3: mod_base = OTHER; note = 2'-O-methylguanosine-3'-phosphate
  modified_base 4: mod_base = OTHER; note = 2'-O-methylguanosine-3'-phosphate
  modified_base 5: mod_base = OTHER; note = 2'-O-methyluridine-3'-phosphate
  modified_base 6: mod_base = OTHER; note = 2'-O-methylguanosine-3'-phosphate
  modified_base 7: mod_base = OTHER; note = 2'-O-methylcytidine-3'-phosphate
  modified_base 8: mod_base = OTHER; note = 2'-O-methyluridine-3'-phosphate
  modified_base 9: mod_base = OTHER; note = 2'-fluoroguanosine-3'-phosphate
  modified_base 10: mod_base = OTHER; note = 2'-fluoroguanosine-3'-phosphate
  modified_base 11: mod_base = OTHER; note = 2'-fluoroadenosine-3'-phosphate
  modified_base 12: mod_base = OTHER; note = 2'-O-methylguanosine-3'-phosphate
  modified_base 13: mod_base = OTHER; note = 2'-O-methylcytidine-3'-phosphate
  modified_base 14: mod_base = OTHER; note = 2'-O-methyluridine-3'-phosphate
  modified_base 15: mod_base = OTHER; note = 2'-O-methyladenosine-3'-phosphate
  modified_base 16: mod_base = OTHER; note = 2'-O-methylguanosine-3'-phosphate
  modified_base 17: mod_base = OTHER; note = 2'-O-methylcytidine-3'-phosphate
  modified_base 18: mod_base = OTHER; note = 2'-O-methylcytidine-3'-phosphate
  modified_base 19: mod_base = OTHER; note = 2'-O-methyladenosine-3'-phosphate
  modified_base 20: mod_base = OTHER; note = 2'-O-methyladenosine-3'-phosphate
  modified_base 21: mod_base = OTHER; note = 2'-O-methyluridine-3'-phosphate N-[tris(GalNAc-alkyl)-amidodecanoyl)]-4-hydroxyprolinol (Hyp-(GalNAc-alkyl)3)
ctggtgctggagctagccaat

SEQ ID NO: 6662 - RNA, 21 nt, synthetic construct
  source 1..21: mol_type = other RNA
  modified_base 1: mod_base = OTHER; note = 2'-O-methyluridine-3'-phosphorothioate
  modified_base 2: mod_base = OTHER; note = 2'-O-methylguanosine-3'-phosphorothioate
  modified_base 3: mod_base = OTHER; note = 2'-O-methylguanosine-3'-phosphate
  modified_base 4: mod_base = OTHER; note = 2'-O-methyluridine-3'-phosphate
  modified_base 5: mod_base = OTHER; note = 2'-O-methylguanosine-3'-phosphate
  modified_base 6: mod_base = OTHER; note = 2'-O-methylcytidine-3'-phosphate
  modified_base 7: mod_base = OTHER; note = 2'-O-methyluridine-3'-phosphate
  modified_base 8: mod_base = OTHER; note = 2'-O-methylguanosine-3'-phosphate
  modified_base 9: mod_base = OTHER; note = 2'-fluoroguanosine-3'-phosphate
  modified_base 10: mod_base = OTHER; note = 2'-fluoroadenosine-3'-phosphate
  modified_base 11: mod_base = OTHER; note = 2'-fluoroguanosine-3'-phosphate
  modified_base 12: mod_base = OTHER; note = 2'-O-methylcytidine-3'-phosphate
  modified_base 13: mod_base = OTHER; note = 2'-O-methyluridine-3'-phosphate
  modified_base 14: mod_base = OTHER; note = 2'-O-methyladenosine-3'-phosphate
  modified_base 15: mod_base = OTHER; note = 2'-O-methylguanosine-3'-phosphate
  modified_base 16: mod_base = OTHER; note = 2'-O-methylcytidine-3'-phosphate
  modified_base 17: mod_base = OTHER; note = 2'-O-methylcytidine-3'-phosphate
  modified_base 18: mod_base = OTHER; note = 2'-O-methyladenosine-3'-phosphate
  modified_base 19: mod_base = OTHER; note = 2'-O-methyladenosine-3'-phosphate
  modified_base 20: mod_base = OTHER; note = 2'-O-methylguanosine-3'-phosphate
  modified_base 21: mod_base = OTHER; note = 2'-O-methyluridine-3'-phosphate N-[tris(GalNAc-alkyl)-amidodecanoyl)]-4-hydroxyprolinol (Hyp-(GalNAc-alkyl)3)
tggtgctggagctagccaagt

SEQ ID NO: 6663 - RNA, 21 nt, synthetic construct
  source 1..21: mol_type = other RNA
  modified_base 1: mod_base = OTHER; note = 2'-O-methylguanosine-3'-phosphorothioate
  modified_base 2: mod_base = OTHER; note = 2'-O-methylguanosine-3'-phosphorothioate
  modified_base 3: mod_base = OTHER; note = 2'-O-methyluridine-3'-phosphate
  modified_base 4: mod_base = OTHER; note = 2'-O-methylguanosine-3'-phosphate
  modified_base 5: mod_base = OTHER; note = 2'-O-methylcytidine-3'-phosphate
  modified_base 6: mod_base = OTHER; note = 2'-O-methyluridine-3'-phosphate
  modified_base 7: mod_base = OTHER; note = 2'-O-methylguanosine-3'-phosphate
  modified_base 8: mod_base = OTHER; note = 2'-O-methylguanosine-3'-phosphate
  modified_base 9: mod_base = OTHER; note = 2'-fluoroadenosine-3'-phosphate
  modified_base 10: mod_base = OTHER; note = 2'-fluoroguanosine-3'-phosphate
  modified_base 11: mod_base = OTHER; note = 2'-fluorocytidine-3'-phosphate
  modified_base 12: mod_base = OTHER; note = 2'-O-methyluridine-3'-phosphate
  modified_base 13: mod_base = OTHER; note = 2'-O-methyladenosine-3'-phosphate
  modified_base 14: mod_base = OTHER; note = 2'-O-methylguanosine-3'-phosphate
  modified_base 15: mod_base = OTHER; note = 2'-O-methylcytidine-3'-phosphate
  modified_base 16: mod_base = OTHER; note = 2'-O-methylcytidine-3'-phosphate
  modified_base 17: mod_base = OTHER; note = 2'-O-methyladenosine-3'-phosphate
  modified_base 18: mod_base = OTHER; note = 2'-O-methyladenosine-3'-phosphate
  modified_base 19: mod_base = OTHER; note = 2'-O-methylguanosine-3'-phosphate
  modified_base 20: mod_base = OTHER; note = 2'-O-methylcytidine-3'-phosphate
  modified_base 21: mod_base = OTHER; note = 2'-O-methyluridine-3'-phosphate N-[tris(GalNAc-alkyl)-amidodecanoyl)]-4-hydroxyprolinol (Hyp-(GalNAc-alkyl)3)
ggtgctggagctagccaagct

SEQ ID NO: 6664 - RNA, 21 nt, synthetic construct
  source 1..21: mol_type = other RNA
  modified_base 1: mod_base = OTHER; note = 2'-O-methylguanosine-3'-phosphorothioate
  modified_base 2: mod_base = OTHER; note = 2'-O-methyluridine-3'-phosphorothioate
  modified_base 3: mod_base = OTHER; note = 2'-O-methylguanosine-3'-phosphate
  modified_base 4: mod_base = OTHER; note = 2'-O-methylcytidine-3'-phosphate
  modified_base 5: mod_base = OTHER; note = 2'-O-methyluridine-3'-phosphate
  modified_base 6: mod_base = OTHER; note = 2'-O-methylguanosine-3'-phosphate
  modified_base 7: mod_base = OTHER; note = 2'-O-methylguanosine-3'-phosphate
  modified_base 8: mod_base = OTHER; note = 2'-O-methyladenosine-3'-phosphate
  modified_base 9: mod_base = OTHER; note = 2'-fluoroguanosine-3'-phosphate
  modified_base 10: mod_base = OTHER; note = 2'-fluorocytidine-3'-phosphate
  modified_base 11: mod_base = OTHER; note = 2'-fluorouridine-3'-phosphate
  modified_base 12: mod_base = OTHER; note = 2'-O-methyladenosine-3'-phosphate
  modified_base 13: mod_base = OTHER; note = 2'-O-methylguanosine-3'-phosphate
  modified_base 14: mod_base = OTHER; note = 2'-O-methylcytidine-3'-phosphate
  modified_base 15: mod_base = OTHER; note = 2'-O-methylcytidine-3'-phosphate
  modified_base 16: mod_base = OTHER; note = 2'-O-methyladenosine-3'-phosphate
  modified_base 17: mod_base = OTHER; note = 2'-O-methyladenosine-3'-phosphate
  modified_base 18: mod_base = OTHER; note = 2'-O-methylguanosine-3'-phosphate
  modified_base 19: mod_base = OTHER; note = 2'-O-methylcytidine-3'-phosphate
  modified_base 20: mod_base = OTHER; note = 2'-O-methyladenosine-3'-phosphate
  modified_base 21: mod_base = OTHER; note = 2'-O-methyluridine-3'-phosphate N-[tris(GalNAc-alkyl)-amidodecanoyl)]-4-hydroxyprolinol (Hyp-(GalNAc-alkyl)3)
gtgctggagctagccaagcat

SEQ ID NO: 6665 - RNA, 21 nt, synthetic construct
  source 1..21: mol_type = other RNA
  modified_base 1: mod_base = OTHER; note = 2'-O-methyluridine-3'-phosphorothioate
  modified_base 2: mod_base = OTHER; note = 2'-O-methylguanosine-3'-phosphorothioate
  modified_base 3: mod_base = OTHER; note = 2'-O-methylcytidine-3'-phosphate
  modified_base 4: mod_base = OTHER; note = 2'-O-methyluridine-3'-phosphate
  modified_base 5: mod_base = OTHER; note = 2'-O-methylguanosine-3'-phosphate
  modified_base 6: mod_base = OTHER; note = 2'-O-methylguanosine-3'-phosphate
  modified_base 7: mod_base = OTHER; note = 2'-O-methyladenosine-3'-phosphate
  modified_base 8: mod_base = OTHER; note = 2'-O-methylguanosine-3'-phosphate
  modified_base 9: mod_base = OTHER; note = 2'-fluorocytidine-3'-phosphate
  modified_base 10: mod_base = OTHER; note = 2'-fluorouridine-3'-phosphate
  modified_base 11: mod_base = OTHER; note = 2'-fluoroadenosine-3'-phosphate
  modified_base 12: mod_base = OTHER; note = 2'-O-methylguanosine-3'-phosphate
  modified_base 13: mod_base = OTHER; note = 2'-O-methylcytidine-3'-phosphate
  modified_base 14: mod_base = OTHER; note = 2'-O-methylcytidine-3'-phosphate
  modified_base 15: mod_base = OTHER; note = 2'-O-methyladenosine-3'-phosphate
  modified_base 16: mod_base = OTHER; note = 2'-O-methyladenosine-3'-phosphate
  modified_base 17: mod_base = OTHER; note = 2'-O-methylguanosine-3'-phosphate
  modified_base 18: mod_base = OTHER; note = 2'-O-methylcytidine-3'-phosphate
  modified_base 19: mod_base = OTHER; note = 2'-O-methyladenosine-3'-phosphate
  modified_base 20: mod_base = OTHER; note = 2'-O-methylguanosine-3'-phosphate
  modified_base 21: mod_base = OTHER; note = 2'-O-methyluridine-3'-phosphate N-[tris(GalNAc-alkyl)-amidodecanoyl)]-4-hydroxyprolinol (Hyp-(GalNAc-alkyl)3)
tgctggagctagccaagcagt

SEQ ID NO: 6666 - RNA, 21 nt, synthetic construct
  source 1..21: mol_type = other RNA
  modified_base 1: mod_base = OTHER; note = 2'-O-methylguanosine-3'-phosphorothioate
  modified_base 2: mod_base = OTHER; note = 2'-O-methylguanosine-3'-phosphorothioate
  modified_base 3: mod_base = OTHER; note = 2'-O-methyladenosine-3'-phosphate
  modified_base 4: mod_base = OTHER; note = 2'-O-methylguanosine-3'-phosphate
  modified_base 5: mod_base = OTHER; note = 2'-O-methylcytidine-3'-phosphate
  modified_base 6: mod_base = OTHER; note = 2'-O-methyluridine-3'-phosphate
  modified_base 7: mod_base = OTHER; note = 2'-O-methyladenosine-3'-phosphate
  modified_base 8: mod_base = OTHER; note = 2'-O-methylguanosine-3'-phosphate
  modified_base 9: mod_base = OTHER; note = 2'-fluorocytidine-3'-phosphate
  modified_base 10: mod_base = OTHER; note = 2'-fluorocytidine-3'-phosphate
  modified_base 11: mod_base = OTHER; note = 2'-fluoroadenosine-3'-phosphate
  modified_base 12: mod_base = OTHER; note = 2'-O-methyladenosine-3'-phosphate
  modified_base 13: mod_base = OTHER; note = 2'-O-methylguanosine-3'-phosphate
  modified_base 14: mod_base = OTHER; note = 2'-O-methylcytidine-3'-phosphate
  modified_base 15: mod_base = OTHER; note = 2'-O-methyladenosine-3'-phosphate
  modified_base 16: mod_base = OTHER; note = 2'-O-methylguanosine-3'-phosphate
  modified_base 17: mod_base = OTHER; note = 2'-O-methylcytidine-3'-phosphate
  modified_base 18: mod_base = OTHER; note = 2'-O-methyladenosine-3'-phosphate
  modified_base 19: mod_base = OTHER; note = 2'-O-methyladenosine-3'-phosphate
  modified_base 20: mod_base = OTHER; note = 2'-O-methyladenosine-3'-phosphate
  modified_base 21: mod_base = OTHER; note = 2'-O-methyluridine-3'-phosphate N-[tris(GalNAc-alkyl)-amidodecanoyl)]-4-hydroxyprolinol (Hyp-(GalNAc-alkyl)3)
ggagctagccaagcagcaaat

SEQ ID NO: 6667 - RNA, 21 nt, synthetic construct
  source 1..21: mol_type = other RNA
  modified_base 1: mod_base = OTHER; note = 2'-O-methylguanosine-3'-phosphorothioate
  modified_base 2: mod_base = OTHER; note = 2'-O-methyladenosine-3'-phosphorothioate
  modified_base 3: mod_base = OTHER; note = 2'-O-methylguanosine-3'-phosphate
  modified_base 4: mod_base = OTHER; note = 2'-O-methylcytidine-3'-phosphate
  modified_base 5: mod_base = OTHER; note = 2'-O-methyluridine-3'-phosphate
  modified_base 6: mod_base = OTHER; note = 2'-O-methyladenosine-3'-phosphate
  modified_base 7: mod_base = OTHER; note = 2'-O-methylguanosine-3'-phosphate
  modified_base 8: mod_base = OTHER; note = 2'-O-methylcytidine-3'-phosphate
  modified_base 9: mod_base = OTHER; note = 2'-fluorocytidine-3'-phosphate
  modified_base 10: mod_base = OTHER; note = 2'-fluoroadenosine-3'-phosphate
  modified_base 11: mod_base = OTHER; note = 2'-fluoroadenosine-3'-phosphate
  modified_base 12: mod_base = OTHER; note = 2'-O-methylguanosine-3'-phosphate
  modified_base 13: mod_base = OTHER; note = 2'-O-methylcytidine-3'-phosphate
  modified_base 14: mod_base = OTHER; note = 2'-O-methyladenosine-3'-phosphate
  modified_base 15: mod_base = OTHER; note = 2'-O-methylguanosine-3'-phosphate
  modified_base 16: mod_base = OTHER; note = 2'-O-methylcytidine-3'-phosphate
  modified_base 17: mod_base = OTHER; note = 2'-O-methyladenosine-3'-phosphate
  modified_base 18: mod_base = OTHER; note = 2'-O-methyladenosine-3'-phosphate
  modified_base 19: mod_base = OTHER; note = 2'-O-methyladenosine-3'-phosphate
  modified_base 20: mod_base = OTHER; note = 2'-O-methyluridine-3'-phosphate
  modified_base 21: mod_base = OTHER; note = 2'-O-methyluridine-3'-phosphate N-[tris(GalNAc-alkyl)-amidodecanoyl)]-4-hydroxyprolinol (Hyp-(GalNAc-alkyl)3)
gagctagccaagcagcaaatt

SEQ ID NO: 6668 - RNA, 21 nt, synthetic construct
  source 1..21: mol_type = other RNA
  modified_base 1: mod_base = OTHER; note = 2'-O-methyladenosine-3'-phosphorothioate
  modified_base 2: mod_base = OTHER; note = 2'-O-methylguanosine-3'-phosphorothioate
  modified_base 3: mod_base = OTHER; note = 2'-O-methylcytidine-3'-phosphate
  modified_base 4: mod_base = OTHER; note = 2'-O-methyluridine-3'-phosphate
  modified_base 5: mod_base = OTHER; note = 2'-O-methyladenosine-3'-phosphate
  modified_base 6: mod_base = OTHER; note = 2'-O-methylguanosine-3'-phosphate
  modified_base 7: mod_base = OTHER; note = 2'-O-methylcytidine-3'-phosphate
  modified_base 8: mod_base = OTHER; note = 2'-O-methylcytidine-3'-phosphate
  modified_base 9: mod_base = OTHER; note = 2'-fluoroadenosine-3'-phosphate
  modified_base 10: mod_base = OTHER; note = 2'-fluoroadenosine-3'-phosphate
  modified_base 11: mod_base = OTHER; note = 2'-fluoroguanosine-3'-phosphate
  modified_base 12: mod_base = OTHER; note = 2'-O-methylcytidine-3'-phosphate
  modified_base 13: mod_base = OTHER; note = 2'-O-methyladenosine-3'-phosphate
  modified_base 14: mod_base = OTHER; note = 2'-O-methylguanosine-3'-phosphate
  modified_base 15: mod_base = OTHER; note = 2'-O-methylcytidine-3'-phosphate
  modified_base 16: mod_base = OTHER; note = 2'-O-methyladenosine-3'-phosphate
  modified_base 17: mod_base = OTHER; note = 2'-O-methyladenosine-3'-phosphate
  modified_base 18: mod_base = OTHER; note = 2'-O-methyladenosine-3'-phosphate
  modified_base 19: mod_base = OTHER; note = 2'-O-methyluridine-3'-phosphate
  modified_base 20: mod_base = OTHER; note = 2'-O-methylcytidine-3'-phosphate
  modified_base 21: mod_base = OTHER; note = 2'-O-methyluridine-3'-phosphate N-[tris(GalNAc-alkyl)-amidodecanoyl)]-4-hydroxyprolinol (Hyp-(GalNAc-alkyl)3)
agctagccaagcagcaaatct

SEQ ID NO: 6669 - RNA, 21 nt, synthetic construct
  source 1..21: mol_type = other RNA
  modified_base 1: mod_base = OTHER; note = 2'-O-methylguanosine-3'-phosphorothioate
  modified_base 2: mod_base = OTHER; note = 2'-O-methylcytidine-3'-phosphorothioate
  modified_base 3: mod_base = OTHER; note = 2'-O-methyluridine-3'-phosphate
  modified_base 4: mod_base = OTHER; note = 2'-O-methyladenosine-3'-phosphate
  modified_base 5: mod_base = OTHER; note = 2'-O-methylguanosine-3'-phosphate
  modified_base 6: mod_base = OTHER; note = 2'-O-methylcytidine-3'-phosphate
  modified_base 7: mod_base = OTHER; note = 2'-O-methylcytidine-3'-phosphate
  modified_base 8: mod_base = OTHER; note = 2'-O-methyladenosine-3'-phosphate
  modified_base 9: mod_base = OTHER; note = 2'-fluoroadenosine-3'-phosphate
  modified_base 10: mod_base = OTHER; note = 2'-fluoroguanosine-3'-phosphate
  modified_base 11: mod_base = OTHER; note = 2'-fluorocytidine-3'-phosphate
  modified_base 12: mod_base = OTHER; note = 2'-O-methyladenosine-3'-phosphate
  modified_base 13: mod_base = OTHER; note = 2'-O-methylguanosine-3'-phosphate
  modified_base 14: mod_base = OTHER; note = 2'-O-methylcytidine-3'-phosphate
  modified_base 15: mod_base = OTHER; note = 2'-O-methyladenosine-3'-phosphate
  modified_base 16: mod_base = OTHER; note = 2'-O-methyladenosine-3'-phosphate
  modified_base 17: mod_base = OTHER; note = 2'-O-methyladenosine-3'-phosphate
  modified_base 18: mod_base = OTHER; note = 2'-O-methyluridine-3'-phosphate
  modified_base 19: mod_base = OTHER; note = 2'-O-methylcytidine-3'-phosphate
  modified_base 20: mod_base = OTHER; note = 2'-O-methylcytidine-3'-phosphate
  modified_base 21: mod_base = OTHER; note = 2'-O-methyluridine-3'-phosphate N-[tris(GalNAc-alkyl)-amidodecanoyl)]-4-hydroxyprolinol (Hyp-(GalNAc-alkyl)3)
gctagccaagcagcaaatcct

SEQ ID NO: 6670 - RNA, 21 nt, synthetic construct
  source 1..21: mol_type = other RNA
  modified_base 1: mod_base = OTHER; note = 2'-O-methylcytidine-3'-phosphorothioate
  modified_base 2: mod_base = OTHER; note = 2'-O-methyluridine-3'-phosphorothioate
  modified_base 3: mod_base = OTHER; note = 2'-O-methyladenosine-3'-phosphate
  modified_base 4: mod_base = OTHER; note = 2'-O-methylguanosine-3'-phosphate
  modified_base 5: mod_base = OTHER; note = 2'-O-methylcytidine-3'-phosphate
  modified_base 6: mod_base = OTHER; note = 2'-O-methylcytidine-3'-phosphate
  modified_base 7: mod_base = OTHER; note = 2'-O-methyladenosine-3'-phosphate
  modified_base 8: mod_base = OTHER; note = 2'-O-methyladenosine-3'-phosphate
  modified_base 9: mod_base = OTHER; note = 2'-fluoroguanosine-3'-phosphate
  modified_base 10: mod_base = OTHER; note = 2'-fluorocytidine-3'-phosphate
  modified_base 11: mod_base = OTHER; note = 2'-fluoroadenosine-3'-phosphate
  modified_base 12: mod_base = OTHER; note = 2'-O-methylguanosine-3'-phosphate
  modified_base 13: mod_base = OTHER; note = 2'-O-methylcytidine-3'-phosphate
  modified_base 14: mod_base = OTHER; note = 2'-O-methyladenosine-3'-phosphate
  modified_base 15: mod_base = OTHER; note = 2'-O-methyladenosine-3'-phosphate
  modified_base 16: mod_base = OTHER; note = 2'-O-methyladenosine-3'-phosphate
  modified_base 17: mod_base = OTHER; note = 2'-O-methyluridine-3'-phosphate
  modified_base 18: mod_base = OTHER; note = 2'-O-methylcytidine-3'-phosphate
  modified_base 19: mod_base = OTHER; note = 2'-O-methylcytidine-3'-phosphate
  modified_base 20: mod_base = OTHER; note = 2'-O-methyluridine-3'-phosphate
  modified_base 21: mod_base = OTHER; note = 2'-O-methyluridine-3'-phosphate N-[tris(GalNAc-alkyl)-amidodecanoyl)]-4-hydroxyprolinol (Hyp-(GalNAc-alkyl)3)
ctagccaagcagcaaatcctt

SEQ ID NO: 6671 - RNA, 21 nt, synthetic construct
  source 1..21: mol_type = other RNA
  modified_base 1: mod_base = OTHER; note = 2'-O-methyluridine-3'-phosphorothioate
  modified_base 2: mod_base = OTHER; note = 2'-O-methyladenosine-3'-phosphorothioate
  modified_base 3: mod_base = OTHER; note = 2'-O-methylguanosine-3'-phosphate
  modified_base 4: mod_base = OTHER; note = 2'-O-methylcytidine-3'-phosphate
  modified_base 5: mod_base = OTHER; note = 2'-O-methylcytidine-3'-phosphate
  modified_base 6: mod_base = OTHER; note = 2'-O-methyladenosine-3'-phosphate
  modified_base 7: mod_base = OTHER; note = 2'-O-methyladenosine-3'-phosphate
  modified_base 8: mod_base = OTHER; note = 2'-O-methylguanosine-3'-phosphate
  modified_base 9: mod_base = OTHER; note = 2'-fluorocytidine-3'-phosphate
  modified_base 10: mod_base = OTHER; note = 2'-fluoroadenosine-3'-phosphate
  modified_base 11: mod_base = OTHER; note = 2'-fluoroguanosine-3'-phosphate
  modified_base 12: mod_base = OTHER; note = 2'-O-methylcytidine-3'-phosphate
  modified_base 13: mod_base = OTHER; note = 2'-O-methyladenosine-3'-phosphate
  modified_base 14: mod_base = OTHER; note = 2'-O-methyladenosine-3'-phosphate
  modified_base 15: mod_base = OTHER; note = 2'-O-methyladenosine-3'-phosphate
  modified_base 16: mod_base = OTHER; note = 2'-O-methyluridine-3'-phosphate
  modified_base 17: mod_base = OTHER; note = 2'-O-methylcytidine-3'-phosphate
  modified_base 18: mod_base = OTHER; note = 2'-O-methylcytidine-3'-phosphate
  modified_base 19: mod_base = OTHER; note = 2'-O-methyluridine-3'-phosphate
  modified_base 20: mod_base = OTHER; note = 2'-O-methylguanosine-3'-phosphate
  modified_base 21: mod_base = OTHER; note = 2'-O-methyluridine-3'-phosphate N-[tris(GalNAc-alkyl)-amidodecanoyl)]-4-hydroxyprolinol (Hyp-(GalNAc-alkyl)3)
tagccaagcagcaaatcctgt

SEQ ID NO: 6672 - RNA, 21 nt, synthetic construct
  source 1..21: mol_type = other RNA
  modified_base 1: mod_base = OTHER; note = 2'-O-methyladenosine-3'-phosphorothioate
  modified_base 2: mod_base = OTHER; note = 2'-O-methylguanosine-3'-phosphorothioate
  modified_base 3: mod_base = OTHER; note = 2'-O-methylcytidine-3'-phosphate
  modified_base 4: mod_base = OTHER; note = 2'-O-methylcytidine-3'-phosphate
  modified_base 5: mod_base = OTHER; note = 2'-O-methyladenosine-3'-phosphate
  modified_base 6: mod_base = OTHER; note = 2'-O-methyladenosine-3'-phosphate
  modified_base 7: mod_base = OTHER; note = 2'-O-methylguanosine-3'-phosphate
  modified_base 8: mod_base = OTHER; note = 2'-O-methylcytidine-3'-phosphate
  modified_base 9: mod_base = OTHER; note = 2'-fluoroadenosine-3'-phosphate
  modified_base 10: mod_base = OTHER; note = 2'-fluoroguanosine-3'-phosphate
  modified_base 11: mod_base = OTHER; note = 2'-fluorocytidine-3'-phosphate
  modified_base 12: mod_base = OTHER; note = 2'-O-methyladenosine-3'-phosphate
  modified_base 13: mod_base = OTHER; note = 2'-O-methyladenosine-3'-phosphate
  modified_base 14: mod_base = OTHER; note = 2'-O-methyladenosine-3'-phosphate
  modified_base 15: mod_base = OTHER; note = 2'-O-methyluridine-3'-phosphate
  modified_base 16: mod_base = OTHER; note = 2'-O-methylcytidine-3'-phosphate
  modified_base 17: mod_base = OTHER; note = 2'-O-methylcytidine-3'-phosphate
  modified_base 18: mod_base = OTHER; note = 2'-O-methyluridine-3'-phosphate
  modified_base 19: mod_base = OTHER; note = 2'-O-methylguanosine-3'-phosphate
  modified_base 20: mod_base = OTHER; note = 2'-O-methylguanosine-3'-phosphate
  modified_base 21: mod_base = OTHER; note = 2'-O-methyluridine-3'-phosphate N-[tris(GalNAc-alkyl)-amidodecanoyl)]-4-hydroxyprolinol (Hyp-(GalNAc-alkyl)3)
agccaagcagcaaatcctggt

SEQ ID NO: 6673 - RNA, 21 nt, synthetic construct
  source 1..21: mol_type = other RNA
  modified_base 1: mod_base = OTHER; note = 2'-O-methylguanosine-3'-phosphorothioate
  modified_base 2: mod_base = OTHER; note = 2'-O-methylcytidine-3'-phosphorothioate
  modified_base 3: mod_base = OTHER; note = 2'-O-methylcytidine-3'-phosphate
  modified_base 4: mod_base = OTHER; note = 2'-O-methyladenosine-3'-phosphate
  modified_base 5: mod_base = OTHER; note = 2'-O-methyladenosine-3'-phosphate
  modified_base 6: mod_base = OTHER; note = 2'-O-methylguanosine-3'-phosphate
  modified_base 7: mod_base = OTHER; note = 2'-O-methylcytidine-3'-phosphate
  modified_base 8: mod_base = OTHER; note = 2'-O-methyladenosine-3'-phosphate
  modified_base 9: mod_base = OTHER; note = 2'-fluoroguanosine-3'-phosphate
  modified_base 10: mod_base = OTHER; note = 2'-fluorocytidine-3'-phosphate
  modified_base 11: mod_base = OTHER; note = 2'-fluoroadenosine-3'-phosphate
  modified_base 12: mod_base = OTHER; note = 2'-O-methyladenosine-3'-phosphate
  modified_base 13: mod_base = OTHER; note = 2'-O-methyladenosine-3'-phosphate
  modified_base 14: mod_base = OTHER; note = 2'-O-methyluridine-3'-phosphate
  modified_base 15: mod_base = OTHER; note = 2'-O-methylcytidine-3'-phosphate
  modified_base 16: mod_base = OTHER; note = 2'-O-methylcytidine-3'-phosphate
  modified_base 17: mod_base = OTHER; note = 2'-O-methyluridine-3'-phosphate
  modified_base 18: mod_base = OTHER; note = 2'-O-methylguanosine-3'-phosphate
  modified_base 19: mod_base = OTHER; note = 2'-O-methylguanosine-3'-phosphate
  modified_base 20: mod_base = OTHER; note = 2'-O-methyladenosine-3'-phosphate
  modified_base 21: mod_base = OTHER; note = 2'-O-methyluridine-3'-phosphate N-[tris(GalNAc-alkyl)-amidodecanoyl)]-4-hydroxyprolinol (Hyp-(GalNAc-alkyl)3)
gccaagcagcaaatcctggat

SEQ ID NO: 6674 - RNA, 21 nt, synthetic construct
  source 1..21: mol_type = other RNA
  modified_base 1: mod_base = OTHER; note = 2'-O-methyladenosine-3'-phosphorothioate
  modified_base 2: mod_base = OTHER; note = 2'-O-methylcytidine-3'-phosphorothioate
  modified_base 3: mod_base = OTHER; note = 2'-O-methylcytidine-3'-phosphate
  modified_base 4: mod_base = OTHER; note = 2'-O-methyluridine-3'-phosphate
  modified_base 5: mod_base = OTHER; note = 2'-O-methylguanosine-3'-phosphate
  modified_base 6: mod_base = OTHER; note = 2'-O-methyladenosine-3'-phosphate
  modified_base 7: mod_base = OTHER; note = 2'-O-methylcytidine-3'-phosphate
  modified_base 8: mod_base = OTHER; note = 2'-O-methylcytidine-3'-phosphate
  modified_base 9: mod_base = OTHER; note = 2'-fluoroadenosine-3'-phosphate
  modified_base 10: mod_base = OTHER; note = 2'-fluoroguanosine-3'-phosphate
  modified_base 11: mod_base = OTHER; note = 2'-fluorouridine-3'-phosphate
  modified_base 12: mod_base = OTHER; note = 2'-O-methylcytidine-3'-phosphate
  modified_base 13: mod_base = OTHER; note = 2'-O-methylguanosine-3'-phosphate
  modified_base 14: mod_base = OTHER; note = 2'-O-methyluridine-3'-phosphate
  modified_base 15: mod_base = OTHER; note = 2'-O-methylcytidine-3'-phosphate
  modified_base 16: mod_base = OTHER; note = 2'-O-methylcytidine-3'-phosphate
  modified_base 17: mod_base = OTHER; note = 2'-O-methylcytidine-3'-phosphate
  modified_base 18: mod_base = OTHER; note = 2'-O-methyladenosine-3'-phosphate
  modified_base 19: mod_base = OTHER; note = 2'-O-methylguanosine-3'-phosphate
  modified_base 20: mod_base = OTHER; note = 2'-O-methyladenosine-3'-phosphate
  modified_base 21: mod_base = OTHER; note = 2'-O-methyluridine-3'-phosphate N-[tris(GalNAc-alkyl)-amidodecanoyl)]-4-hydroxyprolinol (Hyp-(GalNAc-alkyl)3)
acctgaccagtcgtcccagat

SEQ ID NO: 6675 - RNA, 21 nt, synthetic construct
  source 1..21: mol_type = other RNA
  modified_base 1: mod_base = OTHER; note = 2'-O-methylcytidine-3'-phosphorothioate
  modified_base 2: mod_base = OTHER; note = 2'-O-methylcytidine-3'-phosphorothioate
  modified_base 3: mod_base = OTHER; note = 2'-O-methyluridine-3'-phosphate
  modified_base 4: mod_base = OTHER; note = 2'-O-methylguanosine-3'-phosphate
  modified_base 5: mod_base = OTHER; note = 2'-O-methyladenosine-3'-phosphate
  modified_base 6: mod_base = OTHER; note = 2'-O-methylcytidine-3'-phosphate
  modified_base 7: mod_base = OTHER; note = 2'-O-methylcytidine-3'-phosphate
  modified_base 8: mod_base = OTHER; note = 2'-O-methyladenosine-3'-phosphate
  modified_base 9: mod_base = OTHER; note = 2'-fluoroguanosine-3'-phosphate
  modified_base 10: mod_base = OTHER; note = 2'-fluorouridine-3'-phosphate
  modified_base 11: mod_base = OTHER; note = 2'-fluorocytidine-3'-phosphate
  modified_base 12: mod_base = OTHER; note = 2'-O-methylguanosine-3'-phosphate
  modified_base 13: mod_base = OTHER; note = 2'-O-methyluridine-3'-phosphate
  modified_base 14: mod_base = OTHER; note = 2'-O-methylcytidine-3'-phosphate
  modified_base 15: mod_base = OTHER; note = 2'-O-methylcytidine-3'-phosphate
  modified_base 16: mod_base = OTHER; note = 2'-O-methylcytidine-3'-phosphate
  modified_base 17: mod_base = OTHER; note = 2'-O-methyladenosine-3'-phosphate
  modified_base 18: mod_base = OTHER; note = 2'-O-methylguanosine-3'-phosphate
  modified_base 19: mod_base = OTHER; note = 2'-O-methyladenosine-3'-phosphate
  modified_base 20: mod_base = OTHER; note = 2'-O-methyladenosine-3'-phosphate
  modified_base 21: mod_base = OTHER; note = 2'-O-methyluridine-3'-phosphate N-[tris(GalNAc-alkyl)-amidodecanoyl)]-4-hydroxyprolinol (Hyp-(GalNAc-alkyl)3)
cctgaccagtcgtcccagaat

SEQ ID NO: 6676 - RNA, 21 nt, synthetic construct
  source 1..21: mol_type = other RNA
  modified_base 1: mod_base = OTHER; note = 2'-O-methylcytidine-3'-phosphorothioate
  modified_base 2: mod_base = OTHER; note = 2'-O-methyluridine-3'-phosphorothioate
  modified_base 3: mod_base = OTHER; note = 2'-O-methylguanosine-3'-phosphate
  modified_base 4: mod_base = OTHER; note = 2'-O-methyladenosine-3'-phosphate
  modified_base 5: mod_base = OTHER; note = 2'-O-methylcytidine-3'-phosphate
  modified_base 6: mod_base = OTHER; note = 2'-O-methylcytidine-3'-phosphate
  modified_base 7: mod_base = OTHER; note = 2'-O-methyladenosine-3'-phosphate
  modified_base 8: mod_base = OTHER; note = 2'-O-methylguanosine-3'-phosphate
  modified_base 9: mod_base = OTHER; note = 2'-fluorouridine-3'-phosphate
  modified_base 10: mod_base = OTHER; note = 2'-fluorocytidine-3'-phosphate
  modified_base 11: mod_base = OTHER; note = 2'-fluoroguanosine-3'-phosphate
  modified_base 12: mod_base = OTHER; note = 2'-O-methyluridine-3'-phosphate
  modified_base 13: mod_base = OTHER; note = 2'-O-methylcytidine-3'-phosphate
  modified_base 14: mod_base = OTHER; note = 2'-O-methylcytidine-3'-phosphate
  modified_base 15: mod_base = OTHER; note = 2'-O-methylcytidine-3'-phosphate
  modified_base 16: mod_base = OTHER; note = 2'-O-methyladenosine-3'-phosphate
  modified_base 17: mod_base = OTHER; note = 2'-O-methylguanosine-3'-phosphate
  modified_base 18: mod_base = OTHER; note = 2'-O-methyladenosine-3'-phosphate
  modified_base 19: mod_base = OTHER; note = 2'-O-methyladenosine-3'-phosphate
  modified_base 20: mod_base = OTHER; note = 2'-O-methyluridine-3'-phosphate
  modified_base 21: mod_base = OTHER; note = 2'-O-methyluridine-3'-phosphate N-[tris(GalNAc-alkyl)-amidodecanoyl)]-4-hydroxyprolinol (Hyp-(GalNAc-alkyl)3)
ctgaccagtcgtcccagaatt

SEQ ID NO: 6677 - RNA, 21 nt, synthetic construct
  source 1..21: mol_type = other RNA
  modified_base 1: mod_base = OTHER; note = 2'-O-methyluridine-3'-phosphorothioate
  modified_base 2: mod_base = OTHER; note = 2'-O-methylguanosine-3'-phosphorothioate
  modified_base 3: mod_base = OTHER; note = 2'-O-methyladenosine-3'-phosphate
  modified_base 4: mod_base = OTHER; note = 2'-O-methylcytidine-3'-phosphate
  modified_base 5: mod_base = OTHER; note = 2'-O-methylcytidine-3'-phosphate
  modified_base 6: mod_base = OTHER; note = 2'-O-methyladenosine-3'-phosphate
  modified_base 7: mod_base = OTHER; note = 2'-O-methylguanosine-3'-phosphate
  modified_base 8: mod_base = OTHER; note = 2'-O-methyluridine-3'-phosphate
  modified_base 9: mod_base = OTHER; note = 2'-fluorocytidine-3'-phosphate
  modified_base 10: mod_base = OTHER; note = 2'-fluoroguanosine-3'-phosphate
  modified_base 11: mod_base = OTHER; note = 2'-fluorouridine-3'-phosphate
  modified_base 12: mod_base = OTHER; note = 2'-O-methylcytidine-3'-phosphate
  modified_base 13: mod_base = OTHER; note = 2'-O-methylcytidine-3'-phosphate
  modified_base 14: mod_base = OTHER; note = 2'-O-methylcytidine-3'-phosphate
  modified_base 15: mod_base = OTHER; note = 2'-O-methyladenosine-3'-phosphate
  modified_base 16: mod_base = OTHER; note = 2'-O-methylguanosine-3'-phosphate
  modified_base 17: mod_base = OTHER; note = 2'-O-methyladenosine-3'-phosphate
  modified_base 18: mod_base = OTHER; note = 2'-O-methyladenosine-3'-phosphate
  modified_base 19: mod_base = OTHER; note = 2'-O-methyluridine-3'-phosphate
  modified_base 20: mod_base = OTHER; note = 2'-O-methyladenosine-3'-phosphate
  modified_base 21: mod_base = OTHER; note = 2'-O-methyluridine-3'-phosphate N-[tris(GalNAc-alkyl)-amidodecanoyl)]-4-hydroxyprolinol (Hyp-(GalNAc-alkyl)3)
tgaccagtcgtcccagaatat

SEQ ID NO: 6678 - RNA, 21 nt, synthetic construct
  source 1..21: mol_type = other RNA
  modified_base 1: mod_base = OTHER; note = 2'-O-methylguanosine-3'-phosphorothioate
  modified_base 2: mod_base = OTHER; note = 2'-O-methyladenosine-3'-phosphorothioate
  modified_base 3: mod_base = OTHER; note = 2'-O-methylcytidine-3'-phosphate
  modified_base 4: mod_base = OTHER; note = 2'-O-methylcytidine-3'-phosphate
  modified_base 5: mod_base = OTHER; note = 2'-O-methyladenosine-3'-phosphate
  modified_base 6: mod_base = OTHER; note = 2'-O-methylguanosine-3'-phosphate
  modified_base 7: mod_base = OTHER; note = 2'-O-methyluridine-3'-phosphate
  modified_base 8: mod_base = OTHER; note = 2'-O-methylcytidine-3'-phosphate
  modified_base 9: mod_base = OTHER; note = 2'-fluoroguanosine-3'-phosphate
  modified_base 10: mod_base = OTHER; note = 2'-fluorouridine-3'-phosphate
  modified_base 11: mod_base = OTHER; note = 2'-fluorocytidine-3'-phosphate
  modified_base 12: mod_base = OTHER; note = 2'-O-methylcytidine-3'-phosphate
  modified_base 13: mod_base = OTHER; note = 2'-O-methylcytidine-3'-phosphate
  modified_base 14: mod_base = OTHER; note = 2'-O-methyladenosine-3'-phosphate
  modified_base 15: mod_base = OTHER; note = 2'-O-methylguanosine-3'-phosphate
  modified_base 16: mod_base = OTHER; note = 2'-O-methyladenosine-3'-phosphate
  modified_base 17: mod_base = OTHER; note = 2'-O-methyladenosine-3'-phosphate
  modified_base 18: mod_base = OTHER; note = 2'-O-methyluridine-3'-phosphate
  modified_base 19: mod_base = OTHER; note = 2'-O-methyladenosine-3'-phosphate
  modified_base 20: mod_base = OTHER; note = 2'-O-methyladenosine-3'-phosphate
  modified_base 21: mod_base = OTHER; note = 2'-O-methyluridine-3'-phosphate N-[tris(GalNAc-alkyl)-amidodecanoyl)]-4-hydroxyprolinol (Hyp-(GalNAc-alkyl)3)
gaccagtcgtcccagaataat

SEQ ID NO: 6679 - RNA, 21 nt, synthetic construct
  source 1..21: mol_type = other RNA
  modified_base 1: mod_base = OTHER; note = 2'-O-methyladenosine-3'-phosphorothioate
  modified_base 2: mod_base = OTHER; note = 2'-O-methylcytidine-3'-phosphorothioate
  modified_base 3: mod_base = OTHER; note = 2'-O-methylcytidine-3'-phosphate
  modified_base 4: mod_base = OTHER; note = 2'-O-methyladenosine-3'-phosphate
  modified_base 5: mod_base = OTHER; note = 2'-O-methylguanosine-3'-phosphate
  modified_base 6: mod_base = OTHER; note = 2'-O-methyluridine-3'-phosphate
  modified_base 7: mod_base = OTHER; note = 2'-O-methylcytidine-3'-phosphate
  modified_base 8: mod_base = OTHER; note = 2'-O-methylguanosine-3'-phosphate
  modified_base 9: mod_base = OTHER; note = 2'-fluorouridine-3'-phosphate
  modified_base 10: mod_base = OTHER; note = 2'-fluorocytidine-3'-phosphate
  modified_base 11: mod_base = OTHER; note = 2'-fluorocytidine-3'-phosphate
  modified_base 12: mod_base = OTHER; note = 2'-O-methylcytidine-3'-phosphate
  modified_base 13: mod_base = OTHER; note = 2'-O-methyladenosine-3'-phosphate
  modified_base 14: mod_base = OTHER; note = 2'-O-methylguanosine-3'-phosphate
  modified_base 15: mod_base = OTHER; note = 2'-O-methyladenosine-3'-phosphate
  modified_base 16: mod_base = OTHER; note = 2'-O-methyladenosine-3'-phosphate
  modified_base 17: mod_base = OTHER; note = 2'-O-methyluridine-3'-phosphate
  modified_base 18: mod_base = OTHER; note = 2'-O-methyladenosine-3'-phosphate
  modified_base 19: mod_base = OTHER; note = 2'-O-methyladenosine-3'-phosphate
  modified_base 20: mod_base = OTHER; note = 2'-O-methylcytidine-3'-phosphate
  modified_base 21: mod_base = OTHER; note = 2'-O-methyluridine-3'-phosphate N-[tris(GalNAc-alkyl)-amidodecanoyl)]-4-hydroxyprolinol (Hyp-(GalNAc-alkyl)3)
accagtcgtcccagaataact

SEQ ID NO: 6680 - RNA, 21 nt, synthetic construct
  source 1..21: mol_type = other RNA
  modified_base 1: mod_base = OTHER; note = 2'-O-methylcytidine-3'-phosphorothioate
  modified_base 2: mod_base = OTHER; note = 2'-O-methylcytidine-3'-phosphorothioate
  modified_base 3: mod_base = OTHER; note = 2'-O-methyladenosine-3'-phosphate
  modified_base 4: mod_base = OTHER; note = 2'-O-methylguanosine-3'-phosphate
  modified_base 5: mod_base = OTHER; note = 2'-O-methyluridine-3'-phosphate
  modified_base 6: mod_base = OTHER; note = 2'-O-methylcytidine-3'-phosphate
  modified_base 7: mod_base = OTHER; note = 2'-O-methylguanosine-3'-phosphate
  modified_base 8: mod_base = OTHER; note = 2'-O-methyluridine-3'-phosphate
  modified_base 9: mod_base = OTHER; note = 2'-fluorocytidine-3'-phosphate
  modified_base 10: mod_base = OTHER; note = 2'-fluorocytidine-3'-phosphate
  modified_base 11: mod_base = OTHER; note = 2'-fluorocytidine-3'-phosphate
  modified_base 12: mod_base = OTHER; note = 2'-O-methyladenosine-3'-phosphate
  modified_base 13: mod_base = OTHER; note = 2'-O-methylguanosine-3'-phosphate
  modified_base 14: mod_base = OTHER; note = 2'-O-methyladenosine-3'-phosphate
  modified_base 15: mod_base = OTHER; note = 2'-O-methyladenosine-3'-phosphate
  modified_base 16: mod_base = OTHER; note = 2'-O-methyluridine-3'-phosphate
  modified_base 17: mod_base = OTHER; note = 2'-O-methyladenosine-3'-phosphate
  modified_base 18: mod_base = OTHER; note = 2'-O-methyladenosine-3'-phosphate
  modified_base 19: mod_base = OTHER; note = 2'-O-methylcytidine-3'-phosphate
  modified_base 20: mod_base = OTHER; note = 2'-O-methyluridine-3'-phosphate
  modified_base 21: mod_base = OTHER; note = 2'-O-methyluridine-3'-phosphate N-[tris(GalNAc-alkyl)-amidodecanoyl)]-4-hydroxyprolinol (Hyp-(GalNAc-alkyl)3)
ccagtcgtcccagaataactt

SEQ ID NO: 6681 - RNA, 21 nt, synthetic construct
  source 1..21: mol_type = other RNA
  modified_base 1: mod_base = OTHER; note = 2'-O-methylcytidine-3'-phosphorothioate
  modified_base 2: mod_base = OTHER; note = 2'-O-methyladenosine-3'-phosphorothioate
  modified_base 3: mod_base = OTHER; note = 2'-O-methylguanosine-3'-phosphate
  modified_base 4: mod_base = OTHER; note = 2'-O-methyluridine-3'-phosphate
  modified_base 5: mod_base = OTHER; note = 2'-O-methylcytidine-3'-phosphate
  modified_base 6: mod_base = OTHER; note = 2'-O-methylguanosine-3'-phosphate
  modified_base 7: mod_base = OTHER; note = 2'-O-methyluridine-3'-phosphate
  modified_base 8: mod_base = OTHER; note = 2'-O-methylcytidine-3'-phosphate
  modified_base 9: mod_base = OTHER; note = 2'-fluorocytidine-3'-phosphate
  modified_base 10: mod_base = OTHER; note = 2'-fluorocytidine-3'-phosphate
  modified_base 11: mod_base = OTHER; note = 2'-fluoroadenosine-3'-phosphate
  modified_base 12: mod_base = OTHER; note = 2'-O-methylguanosine-3'-phosphate
  modified_base 13: mod_base = OTHER; note = 2'-O-methyladenosine-3'-phosphate
  modified_base 14: mod_base = OTHER; note = 2'-O-methyladenosine-3'-phosphate
  modified_base 15: mod_base = OTHER; note = 2'-O-methyluridine-3'-phosphate
  modified_base 16: mod_base = OTHER; note = 2'-O-methyladenosine-3'-phosphate
  modified_base 17: mod_base = OTHER; note = 2'-O-methyladenosine-3'-phosphate
  modified_base 18: mod_base = OTHER; note = 2'-O-methylcytidine-3'-phosphate
  modified_base 19: mod_base = OTHER; note = 2'-O-methyluridine-3'-phosphate
  modified_base 20: mod_base = OTHER; note = 2'-O-methylcytidine-3'-phosphate
  modified_base 21: mod_base = OTHER; note = 2'-O-methyluridine-3'-phosphate N-[tris(GalNAc-alkyl)-amidodecanoyl)]-4-hydroxyprolinol (Hyp-(GalNAc-alkyl)3)
cagtcgtcccagaataactct

SEQ ID NO: 6682 - RNA, 21 nt, synthetic construct
  source 1..21: mol_type = other RNA
  modified_base 1: mod_base = OTHER; note = 2'-O-methyladenosine-3'-phosphorothioate
  modified_base 2: mod_base = OTHER; note = 2'-O-methylguanosine-3'-phosphorothioate
  modified_base 3: mod_base = OTHER; note = 2'-O-methyluridine-3'-phosphate
  modified_base 4: mod_base = OTHER; note = 2'-O-methylcytidine-3'-phosphate
  modified_base 5: mod_base = OTHER; note = 2'-O-methylguanosine-3'-phosphate
  modified_base 6: mod_base = OTHER; note = 2'-O-methyluridine-3'-phosphate
  modified_base 7: mod_base = OTHER; note = 2'-O-methylcytidine-3'-phosphate
  modified_base 8: mod_base = OTHER; note = 2'-O-methylcytidine-3'-phosphate
  modified_base 9: mod_base = OTHER; note = 2'-fluorocytidine-3'-phosphate
  modified_base 10: mod_base = OTHER; note = 2'-fluoroadenosine-3'-phosphate
  modified_base 11: mod_base = OTHER; note = 2'-fluoroguanosine-3'-phosphate
  modified_base 12: mod_base = OTHER; note = 2'-O-methyladenosine-3'-phosphate
  modified_base 13: mod_base = OTHER; note = 2'-O-methyladenosine-3'-phosphate
  modified_base 14: mod_base = OTHER; note = 2'-O-methyluridine-3'-phosphate
  modified_base 15: mod_base = OTHER; note = 2'-O-methyladenosine-3'-phosphate
  modified_base 16: mod_base = OTHER; note = 2'-O-methyladenosine-3'-phosphate
  modified_base 17: mod_base = OTHER; note = 2'-O-methylcytidine-3'-phosphate
  modified_base 18: mod_base = OTHER; note = 2'-O-methyluridine-3'-phosphate
  modified_base 19: mod_base = OTHER; note = 2'-O-methylcytidine-3'-phosphate
  modified_base 20: mod_base = OTHER; note = 2'-O-methyladenosine-3'-phosphate
  modified_base 21: mod_base = OTHER; note = 2'-O-methyluridine-3'-phosphate N-[tris(GalNAc-alkyl)-amidodecanoyl)]-4-hydroxyprolinol (Hyp-(GalNAc-alkyl)3)
agtcgtcccagaataactcat

SEQ ID NO: 6683 - RNA, 21 nt, synthetic construct
  source 1..21: mol_type = other RNA
  modified_base 1: mod_base = OTHER; note = 2'-O-methylguanosine-3'-phosphorothioate
  modified_base 2: mod_base = OTHER; note = 2'-O-methyluridine-3'-phosphorothioate
  modified_base 3: mod_base = OTHER; note = 2'-O-methylcytidine-3'-phosphate
  modified_base 4: mod_base = OTHER; note = 2'-O-methylguanosine-3'-phosphate
  modified_base 5: mod_base = OTHER; note = 2'-O-methyluridine-3'-phosphate
  modified_base 6: mod_base = OTHER; note = 2'-O-methylcytidine-3'-phosphate
  modified_base 7: mod_base = OTHER; note = 2'-O-methylcytidine-3'-phosphate
  modified_base 8: mod_base = OTHER; note = 2'-O-methylcytidine-3'-phosphate
  modified_base 9: mod_base = OTHER; note = 2'-fluoroadenosine-3'-phosphate
  modified_base 10: mod_base = OTHER; note = 2'-fluoroguanosine-3'-phosphate
  modified_base 11: mod_base = OTHER; note = 2'-fluoroadenosine-3'-phosphate
  modified_base 12: mod_base = OTHER; note = 2'-O-methyladenosine-3'-phosphate
  modified_base 13: mod_base = OTHER; note = 2'-O-methyluridine-3'-phosphate
  modified_base 14: mod_base = OTHER; note = 2'-O-methyladenosine-3'-phosphate
  modified_base 15: mod_base = OTHER; note = 2'-O-methyladenosine-3'-phosphate
  modified_base 16: mod_base = OTHER; note = 2'-O-methylcytidine-3'-phosphate
  modified_base 17: mod_base = OTHER; note = 2'-O-methyluridine-3'-phosphate
  modified_base 18: mod_base = OTHER; note = 2'-O-methylcytidine-3'-phosphate
  modified_base 19: mod_base = OTHER; note = 2'-O-methyladenosine-3'-phosphate
  modified_base 20: mod_base = OTHER; note = 2'-O-methyluridine-3'-phosphate
  modified_base 21: mod_base = OTHER; note = 2'-O-methyluridine-3'-phosphate N-[tris(GalNAc-alkyl)-amidodecanoyl)]-4-hydroxyprolinol (Hyp-(GalNAc-alkyl)3)
gtcgtcccagaataactcatt

SEQ ID NO: 6684 - RNA, 21 nt, synthetic construct
  source 1..21: mol_type = other RNA
  modified_base 1: mod_base = OTHER; note = 2'-O-methyluridine-3'-phosphorothioate
  modified_base 2: mod_base = OTHER; note = 2'-O-methylcytidine-3'-phosphorothioate
  modified_base 3: mod_base = OTHER; note = 2'-O-methylguanosine-3'-phosphate
  modified_base 4: mod_base = OTHER; note = 2'-O-methyluridine-3'-phosphate
  modified_base 5: mod_base = OTHER; note = 2'-O-methylcytidine-3'-phosphate
  modified_base 6: mod_base = OTHER; note = 2'-O-methylcytidine-3'-phosphate
  modified_base 7: mod_base = OTHER; note = 2'-O-methylcytidine-3'-phosphate
  modified_base 8: mod_base = OTHER; note = 2'-O-methyladenosine-3'-phosphate
  modified_base 9: mod_base = OTHER; note = 2'-fluoroguanosine-3'-phosphate
  modified_base 10: mod_base = OTHER; note = 2'-fluoroadenosine-3'-phosphate
  modified_base 11: mod_base = OTHER; note = 2'-fluoroadenosine-3'-phosphate
  modified_base 12: mod_base = OTHER; note = 2'-O-methyluridine-3'-phosphate
  modified_base 13: mod_base = OTHER; note = 2'-O-methyladenosine-3'-phosphate
  modified_base 14: mod_base = OTHER; note = 2'-O-methyladenosine-3'-phosphate
  modified_base 15: mod_base = OTHER; note = 2'-O-methylcytidine-3'-phosphate
  modified_base 16: mod_base = OTHER; note = 2'-O-methyluridine-3'-phosphate
  modified_base 17: mod_base = OTHER; note = 2'-O-methylcytidine-3'-phosphate
  modified_base 18: mod_base = OTHER; note = 2'-O-methyladenosine-3'-phosphate
  modified_base 19: mod_base = OTHER; note = 2'-O-methyluridine-3'-phosphate
  modified_base 20: mod_base = OTHER; note = 2'-O-methylcytidine-3'-phosphate
  modified_base 21: mod_base = OTHER; note = 2'-O-methyluridine-3'-phosphate N-[tris(GalNAc-alkyl)-amidodecanoyl)]-4-hydroxyprolinol (Hyp-(GalNAc-alkyl)3)
tcgtcccagaataactcatct

SEQ ID NO: 6685 - RNA, 21 nt, synthetic construct
  source 1..21: mol_type = other RNA
  modified_base 1: mod_base = OTHER; note = 2'-O-methylcytidine-3'-phosphorothioate
  modified_base 2: mod_base = OTHER; note = 2'-O-methylguanosine-3'-phosphorothioate
  modified_base 3: mod_base = OTHER; note = 2'-O-methyluridine-3'-phosphate
  modified_base 4: mod_base = OTHER; note = 2'-O-methylcytidine-3'-phosphate
  modified_base 5: mod_base = OTHER; note = 2'-O-methylcytidine-3'-phosphate
  modified_base 6: mod_base = OTHER; note = 2'-O-methylcytidine-3'-phosphate
  modified_base 7: mod_base = OTHER; note = 2'-O-methyladenosine-3'-phosphate
  modified_base 8: mod_base = OTHER; note = 2'-O-methylguanosine-3'-phosphate
  modified_base 9: mod_base = OTHER; note = 2'-fluoroadenosine-3'-phosphate
  modified_base 10: mod_base = OTHER; note = 2'-fluoroadenosine-3'-phosphate
  modified_base 11: mod_base = OTHER; note = 2'-fluorouridine-3'-phosphate
  modified_base 12: mod_base = OTHER; note = 2'-O-methyladenosine-3'-phosphate
  modified_base 13: mod_base = OTHER; note = 2'-O-methyladenosine-3'-phosphate
  modified_base 14: mod_base = OTHER; note = 2'-O-methylcytidine-3'-phosphate
  modified_base 15: mod_base = OTHER; note = 2'-O-methyluridine-3'-phosphate
  modified_base 16: mod_base = OTHER; note = 2'-O-methylcytidine-3'-phosphate
  modified_base 17: mod_base = OTHER; note = 2'-O-methyladenosine-3'-phosphate
  modified_base 18: mod_base = OTHER; note = 2'-O-methyluridine-3'-phosphate
  modified_base 19: mod_base = OTHER; note = 2'-O-methylcytidine-3'-phosphate
  modified_base 20: mod_base = OTHER; note = 2'-O-methylcytidine-3'-phosphate
  modified_base 21: mod_base = OTHER; note = 2'-O-methyluridine-3'-phosphate N-[tris(GalNAc-alkyl)-amidodecanoyl)]-4-hydroxyprolinol (Hyp-(GalNAc-alkyl)3)
cgtcccagaataactcatcct

SEQ ID NO: 6686 - RNA, 21 nt, synthetic construct
  source 1..21: mol_type = other RNA
  modified_base 1: mod_base = OTHER; note = 2'-O-methylguanosine-3'-phosphorothioate
  modified_base 2: mod_base = OTHER; note = 2'-O-methyluridine-3'-phosphorothioate
  modified_base 3: mod_base = OTHER; note = 2'-O-methylcytidine-3'-phosphate
  modified_base 4: mod_base = OTHER; note = 2'-O-methylcytidine-3'-phosphate
  modified_base 5: mod_base = OTHER; note = 2'-O-methylcytidine-3'-phosphate
  modified_base 6: mod_base = OTHER; note = 2'-O-methyladenosine-3'-phosphate
  modified_base 7: mod_base = OTHER; note = 2'-O-methylguanosine-3'-phosphate
  modified_base 8: mod_base = OTHER; note = 2'-O-methyladenosine-3'-phosphate
  modified_base 9: mod_base = OTHER; note = 2'-fluoroadenosine-3'-phosphate
  modified_base 10: mod_base = OTHER; note = 2'-fluorouridine-3'-phosphate
  modified_base 11: mod_base = OTHER; note = 2'-fluoroadenosine-3'-phosphate
  modified_base 12: mod_base = OTHER; note = 2'-O-methyladenosine-3'-phosphate
  modified_base 13: mod_base = OTHER; note = 2'-O-methylcytidine-3'-phosphate
  modified_base 14: mod_base = OTHER; note = 2'-O-methyluridine-3'-phosphate
  modified_base 15: mod_base = OTHER; note = 2'-O-methylcytidine-3'-phosphate
  modified_base 16: mod_base = OTHER; note = 2'-O-methyladenosine-3'-phosphate
  modified_base 17: mod_base = OTHER; note = 2'-O-methyluridine-3'-phosphate
  modified_base 18: mod_base = OTHER; note = 2'-O-methylcytidine-3'-phosphate
  modified_base 19: mod_base = OTHER; note = 2'-O-methylcytidine-3'-phosphate
  modified_base 20: mod_base = OTHER; note = 2'-O-methyluridine-3'-phosphate
  modified_base 21: mod_base = OTHER; note = 2'-O-methyluridine-3'-phosphate N-[tris(GalNAc-alkyl)-amidodecanoyl)]-4-hydroxyprolinol (Hyp-(GalNAc-alkyl)3)
gtcccagaataactcatcctt

SEQ ID NO: 6687 - RNA, 21 nt, synthetic construct
  source 1..21: mol_type = other RNA
  modified_base 1: mod_base = OTHER; note = 2'-O-methyluridine-3'-phosphorothioate
  modified_base 2: mod_base = OTHER; note = 2'-O-methylcytidine-3'-phosphorothioate
  modified_base 3: mod_base = OTHER; note = 2'-O-methylcytidine-3'-phosphate
  modified_base 4: mod_base = OTHER; note = 2'-O-methylcytidine-3'-phosphate
  modified_base 5: mod_base = OTHER; note = 2'-O-methyladenosine-3'-phosphate
  modified_base 6: mod_base = OTHER; note = 2'-O-methylguanosine-3'-phosphate
  modified_base 7: mod_base = OTHER; note = 2'-O-methyladenosine-3'-phosphate
  modified_base 8: mod_base = OTHER; note = 2'-O-methyladenosine-3'-phosphate
  modified_base 9: mod_base = OTHER; note = 2'-fluorouridine-3'-phosphate
  modified_base 10: mod_base = OTHER; note = 2'-fluoroadenosine-3'-phosphate
  modified_base 11: mod_base = OTHER; note = 2'-fluoroadenosine-3'-phosphate
  modified_base 12: mod_base = OTHER; note = 2'-O-methylcytidine-3'-phosphate
  modified_base 13: mod_base = OTHER; note = 2'-O-methyluridine-3'-phosphate
  modified_base 14: mod_base = OTHER; note = 2'-O-methylcytidine-3'-phosphate
  modified_base 15: mod_base = OTHER; note = 2'-O-methyladenosine-3'-phosphate
  modified_base 16: mod_base = OTHER; note = 2'-O-methyluridine-3'-phosphate
  modified_base 17: mod_base = OTHER; note = 2'-O-methylcytidine-3'-phosphate
  modified_base 18: mod_base = OTHER; note = 2'-O-methylcytidine-3'-phosphate
  modified_base 19: mod_base = OTHER; note = 2'-O-methyluridine-3'-phosphate
  modified_base 20: mod_base = OTHER; note = 2'-O-methylcytidine-3'-phosphate
  modified_base 21: mod_base = OTHER; note = 2'-O-methyluridine-3'-phosphate N-[tris(GalNAc-alkyl)-amidodecanoyl)]-4-hydroxyprolinol (Hyp-(GalNAc-alkyl)3)
tcccagaataactcatcctct

SEQ ID NO: 6688 - RNA, 21 nt, synthetic construct
  source 1..21: mol_type = other RNA
  modified_base 1: mod_base = OTHER; note = 2'-O-methylcytidine-3'-phosphorothioate
  modified_base 2: mod_base = OTHER; note = 2'-O-methylcytidine-3'-phosphorothioate
  modified_base 3: mod_base = OTHER; note = 2'-O-methylcytidine-3'-phosphate
  modified_base 4: mod_base = OTHER; note = 2'-O-methyladenosine-3'-phosphate
  modified_base 5: mod_base = OTHER; note = 2'-O-methylguanosine-3'-phosphate
  modified_base 6: mod_base = OTHER; note = 2'-O-methyladenosine-3'-phosphate
  modified_base 7: mod_base = OTHER; note = 2'-O-methyladenosine-3'-phosphate
  modified_base 8: mod_base = OTHER; note = 2'-O-methyluridine-3'-phosphate
  modified_base 9: mod_base = OTHER; note = 2'-fluoroadenosine-3'-phosphate
  modified_base 10: mod_base = OTHER; note = 2'-fluoroadenosine-3'-phosphate
  modified_base 11: mod_base = OTHER; note = 2'-fluorocytidine-3'-phosphate
  modified_base 12: mod_base = OTHER; note = 2'-O-methyluridine-3'-phosphate
  modified_base 13: mod_base = OTHER; note = 2'-O-methylcytidine-3'-phosphate
  modified_base 14: mod_base = OTHER; note = 2'-O-methyladenosine-3'-phosphate
  modified_base 15: mod_base = OTHER; note = 2'-O-methyluridine-3'-phosphate
  modified_base 16: mod_base = OTHER; note = 2'-O-methylcytidine-3'-phosphate
  modified_base 17: mod_base = OTHER; note = 2'-O-methylcytidine-3'-phosphate
  modified_base 18: mod_base = OTHER; note = 2'-O-methyluridine-3'-phosphate
  modified_base 19: mod_base = OTHER; note = 2'-O-methylcytidine-3'-phosphate
  modified_base 20: mod_base = OTHER; note = 2'-O-methylcytidine-3'-phosphate
  modified_base 21: mod_base = OTHER; note = 2'-O-methyluridine-3'-phosphate N-[tris(GalNAc-alkyl)-amidodecanoyl)]-4-hydroxyprolinol (Hyp-(GalNAc-alkyl)3)
cccagaataactcatcctcct

SEQ ID NO: 6689 - RNA, 21 nt, synthetic construct
  source 1..21: mol_type = other RNA
  modified_base 1: mod_base = OTHER; note = 2'-O-methylcytidine-3'-phosphorothioate
  modified_base 2: mod_base = OTHER; note = 2'-O-methylcytidine-3'-phosphorothioate
  modified_base 3: mod_base = OTHER; note = 2'-O-methyladenosine-3'-phosphate
  modified_base 4: mod_base = OTHER; note = 2'-O-methylguanosine-3'-phosphate
  modified_base 5: mod_base = OTHER; note = 2'-O-methyladenosine-3'-phosphate
  modified_base 6: mod_base = OTHER; note = 2'-O-methyladenosine-3'-phosphate
  modified_base 7: mod_base = OTHER; note = 2'-O-methyluridine-3'-phosphate
  modified_base 8: mod_base = OTHER; note = 2'-O-methyladenosine-3'-phosphate
  modified_base 9: mod_base = OTHER; note = 2'-fluoroadenosine-3'-phosphate
  modified_base 10: mod_base = OTHER; note = 2'-fluorocytidine-3'-phosphate
  modified_base 11: mod_base = OTHER; note = 2'-fluorouridine-3'-phosphate
  modified_base 12: mod_base = OTHER; note = 2'-O-methylcytidine-3'-phosphate
  modified_base 13: mod_base = OTHER; note = 2'-O-methyladenosine-3'-phosphate
  modified_base 14: mod_base = OTHER; note = 2'-O-methyluridine-3'-phosphate
  modified_base 15: mod_base = OTHER; note = 2'-O-methylcytidine-3'-phosphate
  modified_base 16: mod_base = OTHER; note = 2'-O-methylcytidine-3'-phosphate
  modified_base 17: mod_base = OTHER; note = 2'-O-methyluridine-3'-phosphate
  modified_base 18: mod_base = OTHER; note = 2'-O-methylcytidine-3'-phosphate
  modified_base 19: mod_base = OTHER; note = 2'-O-methylcytidine-3'-phosphate
  modified_base 20: mod_base = OTHER; note = 2'-O-methyladenosine-3'-phosphate
  modified_base 21: mod_base = OTHER; note = 2'-O-methyluridine-3'-phosphate N-[tris(GalNAc-alkyl)-amidodecanoyl)]-4-hydroxyprolinol (Hyp-(GalNAc-alkyl)3)
ccagaataactcatcctccat

SEQ ID NO: 6690 - RNA, 21 nt, synthetic construct
  source 1..21: mol_type = other RNA
  modified_base 1: mod_base = OTHER; note = 2'-O-methylcytidine-3'-phosphorothioate
  modified_base 2: mod_base = OTHER; note = 2'-O-methyladenosine-3'-phosphorothioate
  modified_base 3: mod_base = OTHER; note = 2'-O-methylguanosine-3'-phosphate
  modified_base 4: mod_base = OTHER; note = 2'-O-methyladenosine-3'-phosphate
  modified_base 5: mod_base = OTHER; note = 2'-O-methyladenosine-3'-phosphate
  modified_base 6: mod_base = OTHER; note = 2'-O-methyluridine-3'-phosphate
  modified_base 7: mod_base = OTHER; note = 2'-O-methyladenosine-3'-phosphate
  modified_base 8: mod_base = OTHER; note = 2'-O-methyladenosine-3'-phosphate
  modified_base 9: mod_base = OTHER; note = 2'-fluorocytidine-3'-phosphate
  modified_base 10: mod_base = OTHER; note = 2'-fluorouridine-3'-phosphate
  modified_base 11: mod_base = OTHER; note = 2'-fluorocytidine-3'-phosphate
  modified_base 12: mod_base = OTHER; note = 2'-O-methyladenosine-3'-phosphate
  modified_base 13: mod_base = OTHER; note = 2'-O-methyluridine-3'-phosphate
  modified_base 14: mod_base = OTHER; note = 2'-O-methylcytidine-3'-phosphate
  modified_base 15: mod_base = OTHER; note = 2'-O-methylcytidine-3'-phosphate
  modified_base 16: mod_base = OTHER; note = 2'-O-methyluridine-3'-phosphate
  modified_base 17: mod_base = OTHER; note = 2'-O-methylcytidine-3'-phosphate
  modified_base 18: mod_base = OTHER; note = 2'-O-methylcytidine-3'-phosphate
  modified_base 19: mod_base = OTHER; note = 2'-O-methyladenosine-3'-phosphate
  modified_base 20: mod_base = OTHER; note = 2'-O-methylcytidine-3'-phosphate
  modified_base 21: mod_base = OTHER; note = 2'-O-methyluridine-3'-phosphate N-[tris(GalNAc-alkyl)-amidodecanoyl)]-4-hydroxyprolinol (Hyp-(GalNAc-alkyl)3)
cagaataactcatcctccact

SEQ ID NO: 6691 - RNA, 21 nt, synthetic construct
  source 1..21: mol_type = other RNA
  modified_base 1: mod_base = OTHER; note = 2'-O-methylguanosine-3'-phosphorothioate
  modified_base 2: mod_base = OTHER; note = 2'-O-methylguanosine-3'-phosphorothioate
  modified_base 3: mod_base = OTHER; note = 2'-O-methylguanosine-3'-phosphate
  modified_base 4: mod_base = OTHER; note = 2'-O-methyladenosine-3'-phosphate
  modified_base 5: mod_base = OTHER; note = 2'-O-methylguanosine-3'-phosphate
  modified_base 6: mod_base = OTHER; note = 2'-O-methyluridine-3'-phosphate
  modified_base 7: mod_base = OTHER; note = 2'-O-methylguanosine-3'-phosphate
  modified_base 8: mod_base = OTHER; note = 2'-O-methyluridine-3'-phosphate
  modified_base 9: mod_base = OTHER; note = 2'-fluoroguanosine-3'-phosphate
  modified_base 10: mod_base = OTHER; note = 2'-fluoroguanosine-3'-phosphate
  modified_base 11: mod_base = OTHER; note = 2'-fluorocytidine-3'-phosphate
  modified_base 12: mod_base = OTHER; note = 2'-O-methyluridine-3'-phosphate
  modified_base 13: mod_base = OTHER; note = 2'-O-methylcytidine-3'-phosphate
  modified_base 14: mod_base = OTHER; note = 2'-O-methylcytidine-3'-phosphate
  modified_base 15: mod_base = OTHER; note = 2'-O-methyladenosine-3'-phosphate
  modified_base 16: mod_base = OTHER; note = 2'-O-methylguanosine-3'-phosphate
  modified_base 17: mod_base = OTHER; note = 2'-O-methylguanosine-3'-phosphate
  modified_base 18: mod_base = OTHER; note = 2'-O-methylguanosine-3'-phosphate
  modified_base 19: mod_base = OTHER; note = 2'-O-methyladenosine-3'-phosphate
  modified_base 20: mod_base = OTHER; note = 2'-O-methyladenosine-3'-phosphate
  modified_base 21: mod_base = OTHER; note = 2'-O-methyluridine-3'-phosphate N-[tris(GalNAc-alkyl)-amidodecanoyl)]-4-hydroxyprolinol (Hyp-(GalNAc-alkyl)3)
gggagtgtggctccagggaat

SEQ ID NO: 6692 - RNA, 21 nt, synthetic construct
  source 1..21: mol_type = other RNA
  modified_base 1: mod_base = OTHER; note = 2'-O-methylguanosine-3'-phosphorothioate
  modified_base 2: mod_base = OTHER; note = 2'-O-methylguanosine-3'-phosphorothioate
  modified_base 3: mod_base = OTHER; note = 2'-O-methyladenosine-3'-phosphate
  modified_base 4: mod_base = OTHER; note = 2'-O-methylguanosine-3'-phosphate
  modified_base 5: mod_base = OTHER; note = 2'-O-methyluridine-3'-phosphate
  modified_base 6: mod_base = OTHER; note = 2'-O-methylguanosine-3'-phosphate
  modified_base 7: mod_base = OTHER; note = 2'-O-methyluridine-3'-phosphate
  modified_base 8: mod_base = OTHER; note = 2'-O-methylguanosine-3'-phosphate
  modified_base 9: mod_base = OTHER; note = 2'-fluoroguanosine-3'-phosphate
  modified_base 10: mod_base = OTHER; note = 2'-fluorocytidine-3'-phosphate
  modified_base 11: mod_base = OTHER; note = 2'-fluorouridine-3'-phosphate
  modified_base 12: mod_base = OTHER; note = 2'-O-methylcytidine-3'-phosphate
  modified_base 13: mod_base = OTHER; note = 2'-O-methylcytidine-3'-phosphate
  modified_base 14: mod_base = OTHER; note = 2'-O-methyladenosine-3'-phosphate
  modified_base 15: mod_base = OTHER; note = 2'-O-methylguanosine-3'-phosphate
  modified_base 16: mod_base = OTHER; note = 2'-O-methylguanosine-3'-phosphate
  modified_base 17: mod_base = OTHER; note = 2'-O-methylguanosine-3'-phosphate
  modified_base 18: mod_base = OTHER; note = 2'-O-methyladenosine-3'-phosphate
  modified_base 19: mod_base = OTHER; note = 2'-O-methyladenosine-3'-phosphate
  modified_base 20: mod_base = OTHER; note = 2'-O-methyluridine-3'-phosphate
  modified_base 21: mod_base = OTHER; note = 2'-O-methyluridine-3'-phosphate N-[tris(GalNAc-alkyl)-amidodecanoyl)]-4-hydroxyprolinol (Hyp-(GalNAc-alkyl)3)
ggagtgtggctccagggaatt

SEQ ID NO: 6693 - RNA, 21 nt, synthetic construct
  source 1..21: mol_type = other RNA
  modified_base 1: mod_base = OTHER; note = 2'-O-methylguanosine-3'-phosphorothioate
  modified_base 2: mod_base = OTHER; note = 2'-O-methyladenosine-3'-phosphorothioate
  modified_base 3: mod_base = OTHER; note = 2'-O-methylguanosine-3'-phosphate
  modified_base 4: mod_base = OTHER; note = 2'-O-methyluridine-3'-phosphate
  modified_base 5: mod_base = OTHER; note = 2'-O-methylguanosine-3'-phosphate
  modified_base 6: mod_base = OTHER; note = 2'-O-methyluridine-3'-phosphate
  modified_base 7: mod_base = OTHER; note = 2'-O-methylguanosine-3'-phosphate
  modified_base 8: mod_base = OTHER; note = 2'-O-methylguanosine-3'-phosphate
  modified_base 9: mod_base = OTHER; note = 2'-fluorocytidine-3'-phosphate
  modified_base 10: mod_base = OTHER; note = 2'-fluorouridine-3'-phosphate
  modified_base 11: mod_base = OTHER; note = 2'-fluorocytidine-3'-phosphate
  modified_base 12: mod_base = OTHER; note = 2'-O-methylcytidine-3'-phosphate
  modified_base 13: mod_base = OTHER; note = 2'-O-methyladenosine-3'-phosphate
  modified_base 14: mod_base = OTHER; note = 2'-O-methylguanosine-3'-phosphate
  modified_base 15: mod_base = OTHER; note = 2'-O-methylguanosine-3'-phosphate
  modified_base 16: mod_base = OTHER; note = 2'-O-methylguanosine-3'-phosphate
  modified_base 17: mod_base = OTHER; note = 2'-O-methyladenosine-3'-phosphate
  modified_base 18: mod_base = OTHER; note = 2'-O-methyladenosine-3'-phosphate
  modified_base 19: mod_base = OTHER; note = 2'-O-methyluridine-3'-phosphate
  modified_base 20: mod_base = OTHER; note = 2'-O-methylguanosine-3'-phosphate
  modified_base 21: mod_base = OTHER; note = 2'-O-methyluridine-3'-phosphate N-[tris(GalNAc-alkyl)-amidodecanoyl)]-4-hydroxyprolinol (Hyp-(GalNAc-alkyl)3)
gagtgtggctccagggaatgt

SEQ ID NO: 6694 - RNA, 21 nt, synthetic construct
  source 1..21: mol_type = other RNA
  modified_base 1: mod_base = OTHER; note = 2'-O-methyladenosine-3'-phosphorothioate
  modified_base 2: mod_base = OTHER; note = 2'-O-methylguanosine-3'-phosphorothioate
  modified_base 3: mod_base = OTHER; note = 2'-O-methyluridine-3'-phosphate
  modified_base 4: mod_base = OTHER; note = 2'-O-methylguanosine-3'-phosphate
  modified_base 5: mod_base = OTHER; note = 2'-O-methyluridine-3'-phosphate
  modified_base 6: mod_base = OTHER; note = 2'-O-methylguanosine-3'-phosphate
  modified_base 7: mod_base = OTHER; note = 2'-O-methylguanosine-3'-phosphate
  modified_base 8: mod_base = OTHER; note = 2'-O-methylcytidine-3'-phosphate
  modified_base 9: mod_base = OTHER; note = 2'-fluorouridine-3'-phosphate
  modified_base 10: mod_base = OTHER; note = 2'-fluorocytidine-3'-phosphate
  modified_base 11: mod_base = OTHER; note = 2'-fluorocytidine-3'-phosphate
  modified_base 12: mod_base = OTHER; note = 2'-O-methyladenosine-3'-phosphate
  modified_base 13: mod_base = OTHER; note = 2'-O-methylguanosine-3'-phosphate
  modified_base 14: mod_base = OTHER; note = 2'-O-methylguanosine-3'-phosphate
  modified_base 15: mod_base = OTHER; note = 2'-O-methylguanosine-3'-phosphate
  modified_base 16: mod_base = OTHER; note = 2'-O-methyladenosine-3'-phosphate
  modified_base 17: mod_base = OTHER; note = 2'-O-methyladenosine-3'-phosphate
  modified_base 18: mod_base = OTHER; note = 2'-O-methyluridine-3'-phosphate
  modified_base 19: mod_base = OTHER; note = 2'-O-methylguanosine-3'-phosphate
  modified_base 20: mod_base = OTHER; note = 2'-O-methylguanosine-3'-phosphate
  modified_base 21: mod_base = OTHER; note = 2'-O-methyluridine-3'-phosphate N-[tris(GalNAc-alkyl)-amidodecanoyl)]-4-hydroxyprolinol (Hyp-(GalNAc-alkyl)3)
agtgtggctccagggaatggt

SEQ ID NO: 6695 - RNA, 21 nt, synthetic construct
  source 1..21: mol_type = other RNA
  modified_base 1: mod_base = OTHER; note = 2'-O-methylguanosine-3'-phosphorothioate
  modified_base 2: mod_base = OTHER; note = 2'-O-methyladenosine-3'-phosphorothioate
  modified_base 3: mod_base = OTHER; note = 2'-O-methylguanosine-3'-phosphate
  modified_base 4: mod_base = OTHER; note = 2'-O-methylguanosine-3'-phosphate
  modified_base 5: mod_base = OTHER; note = 2'-O-methyladenosine-3'-phosphate
  modified_base 6: mod_base = OTHER; note = 2'-O-methylguanosine-3'-phosphate
  modified_base 7: mod_base = OTHER; note = 2'-O-methylguanosine-3'-phosphate
  modified_base 8: mod_base = OTHER; note = 2'-O-methyluridine-3'-phosphate
  modified_base 9: mod_base = OTHER; note = 2'-fluorocytidine-3'-phosphate
  modified_base 10: mod_base = OTHER; note = 2'-fluoroadenosine-3'-phosphate
  modified_base 11: mod_base = OTHER; note = 2'-fluorouridine-3'-phosphate
  modified_base 12: mod_base = OTHER; note = 2'-O-methylcytidine-3'-phosphate
  modified_base 13: mod_base = OTHER; note = 2'-O-methyladenosine-3'-phosphate
  modified_base 14: mod_base = OTHER; note = 2'-O-methylguanosine-3'-phosphate
  modified_base 15: mod_base = OTHER; note = 2'-O-methylcytidine-3'-phosphate
  modified_base 16: mod_base = OTHER; note = 2'-O-methyluridine-3'-phosphate
  modified_base 17: mod_base = OTHER; note = 2'-O-methyluridine-3'-phosphate
  modified_base 18: mod_base = OTHER; note = 2'-O-methyluridine-3'-phosphate
  modified_base 19: mod_base = OTHER; note = 2'-O-methylguanosine-3'-phosphate
  modified_base 20: mod_base = OTHER; note = 2'-O-methylcytidine-3'-phosphate
  modified_base 21: mod_base = OTHER; note = 2'-O-methyluridine-3'-phosphate N-[tris(GalNAc-alkyl)-amidodecanoyl)]-4-hydroxyprolinol (Hyp-(GalNAc-alkyl)3)
gaggaggtcatcagctttgct

SEQ ID NO: 6696 - RNA, 21 nt, synthetic construct
  source 1..21: mol_type = other RNA
  modified_base 1: mod_base = OTHER; note = 2'-O-methyladenosine-3'-phosphorothioate
  modified_base 2: mod_base = OTHER; note = 2'-O-methylguanosine-3'-phosphorothioate
  modified_base 3: mod_base = OTHER; note = 2'-O-methylguanosine-3'-phosphate
  modified_base 4: mod_base = OTHER; note = 2'-O-methyladenosine-3'-phosphate
  modified_base 5: mod_base = OTHER; note = 2'-O-methylguanosine-3'-phosphate
  modified_base 6: mod_base = OTHER; note = 2'-O-methylguanosine-3'-phosphate
  modified_base 7: mod_base = OTHER; note = 2'-O-methyluridine-3'-phosphate
  modified_base 8: mod_base = OTHER; note = 2'-O-methylcytidine-3'-phosphate
  modified_base 9: mod_base = OTHER; note = 2'-fluoroadenosine-3'-phosphate
  modified_base 10: mod_base = OTHER; note = 2'-fluorouridine-3'-phosphate
  modified_base 11: mod_base = OTHER; note = 2'-fluorocytidine-3'-phosphate
  modified_base 12: mod_base = OTHER; note = 2'-O-methyladenosine-3'-phosphate
  modified_base 13: mod_base = OTHER; note = 2'-O-methylguanosine-3'-phosphate
  modified_base 14: mod_base = OTHER; note = 2'-O-methylcytidine-3'-phosphate
  modified_base 15: mod_base = OTHER; note = 2'-O-methyluridine-3'-phosphate
  modified_base 16: mod_base = OTHER; note = 2'-O-methyluridine-3'-phosphate
  modified_base 17: mod_base = OTHER; note = 2'-O-methyluridine-3'-phosphate
  modified_base 18: mod_base = OTHER; note = 2'-O-methylguanosine-3'-phosphate
  modified_base 19: mod_base = OTHER; note = 2'-O-methylcytidine-3'-phosphate
  modified_base 20: mod_base = OTHER; note = 2'-O-methyluridine-3'-phosphate
  modified_base 21: mod_base = OTHER; note = 2'-O-methyluridine-3'-phosphate N-[tris(GalNAc-alkyl)-amidodecanoyl)]-4-hydroxyprolinol (Hyp-(GalNAc-alkyl)3)
aggaggtcatcagctttgctt

SEQ ID NO: 6697 - RNA, 21 nt, synthetic construct
  source 1..21: mol_type = other RNA
  modified_base 1: mod_base = OTHER; note = 2'-O-methylguanosine-3'-phosphorothioate
  modified_base 2: mod_base = OTHER; note = 2'-O-methylguanosine-3'-phosphorothioate
  modified_base 3: mod_base = OTHER; note = 2'-O-methyladenosine-3'-phosphate
  modified_base 4: mod_base = OTHER; note = 2'-O-methylguanosine-3'-phosphate
  modified_base 5: mod_base = OTHER; note = 2'-O-methylguanosine-3'-phosphate
  modified_base 6: mod_base = OTHER; note = 2'-O-methyluridine-3'-phosphate
  modified_base 7: mod_base = OTHER; note = 2'-O-methylcytidine-3'-phosphate
  modified_base 8: mod_base = OTHER; note = 2'-O-methyladenosine-3'-phosphate
  modified_base 9: mod_base = OTHER; note = 2'-fluorouridine-3'-phosphate
  modified_base 10: mod_base = OTHER; note = 2'-fluorocytidine-3'-phosphate
  modified_base 11: mod_base = OTHER; note = 2'-fluoroadenosine-3'-phosphate
  modified_base 12: mod_base = OTHER; note = 2'-O-methylguanosine-3'-phosphate
  modified_base 13: mod_base = OTHER; note = 2'-O-methylcytidine-3'-phosphate
  modified_base 14: mod_base = OTHER; note = 2'-O-methyluridine-3'-phosphate
  modified_base 15: mod_base = OTHER; note = 2'-O-methyluridine-3'-phosphate
  modified_base 16: mod_base = OTHER; note = 2'-O-methyluridine-3'-phosphate
  modified_base 17: mod_base = OTHER; note = 2'-O-methylguanosine-3'-phosphate
  modified_base 18: mod_base = OTHER; note = 2'-O-methylcytidine-3'-phosphate
  modified_base 19: mod_base = OTHER; note = 2'-O-methyluridine-3'-phosphate
  modified_base 20: mod_base = OTHER; note = 2'-O-methyladenosine-3'-phosphate
  modified_base 21: mod_base = OTHER; note = 2'-O-methyluridine-3'-phosphate N-[tris(GalNAc-alkyl)-amidodecanoyl)]-4-hydroxyprolinol (Hyp-(GalNAc-alkyl)3)
ggaggtcatcagctttgctat

SEQ ID NO: 6698 - RNA, 21 nt, synthetic construct
  source 1..21: mol_type = other RNA
  modified_base 1: mod_base = OTHER; note = 2'-O-methylguanosine-3'-phosphorothioate
  modified_base 2: mod_base = OTHER; note = 2'-O-methyladenosine-3'-phosphorothioate
  modified_base 3: mod_base = OTHER; note = 2'-O-methylguanosine-3'-phosphate
  modified_base 4: mod_base = OTHER; note = 2'-O-methylguanosine-3'-phosphate
  modified_base 5: mod_base = OTHER; note = 2'-O-methyluridine-3'-phosphate
  modified_base 6: mod_base = OTHER; note = 2'-O-methylcytidine-3'-phosphate
  modified_base 7: mod_base = OTHER; note = 2'-O-methyladenosine-3'-phosphate
  modified_base 8: mod_base = OTHER; note = 2'-O-methyluridine-3'-phosphate
  modified_base 9: mod_base = OTHER; note = 2'-fluorocytidine-3'-phosphate
  modified_base 10: mod_base = OTHER; note = 2'-fluoroadenosine-3'-phosphate
  modified_base 11: mod_base = OTHER; note = 2'-fluoroguanosine-3'-phosphate
  modified_base 12: mod_base = OTHER; note = 2'-O-methylcytidine-3'-phosphate
  modified_base 13: mod_base = OTHER; note = 2'-O-methyluridine-3'-phosphate
  modified_base 14: mod_base = OTHER; note = 2'-O-methyluridine-3'-phosphate
  modified_base 15: mod_base = OTHER; note = 2'-O-methyluridine-3'-phosphate
  modified_base 16: mod_base = OTHER; note = 2'-O-methylguanosine-3'-phosphate
  modified_base 17: mod_base = OTHER; note = 2'-O-methylcytidine-3'-phosphate
  modified_base 18: mod_base = OTHER; note = 2'-O-methyluridine-3'-phosphate
  modified_base 19: mod_base = OTHER; note = 2'-O-methyladenosine-3'-phosphate
  modified_base 20: mod_base = OTHER; note = 2'-O-methylcytidine-3'-phosphate
  modified_base 21: mod_base = OTHER; note = 2'-O-methyluridine-3'-phosphate N-[tris(GalNAc-alkyl)-amidodecanoyl)]-4-hydroxyprolinol (Hyp-(GalNAc-alkyl)3)
gaggtcatcagctttgctact

SEQ ID NO: 6699 - RNA, 21 nt, synthetic construct
  source 1..21: mol_type = other RNA
  modified_base 1: mod_base = OTHER; note = 2'-O-methyladenosine-3'-phosphorothioate
  modified_base 2: mod_base = OTHER; note = 2'-O-methylguanosine-3'-phosphorothioate
  modified_base 3: mod_base = OTHER; note = 2'-O-methylguanosine-3'-phosphate
  modified_base 4: mod_base = OTHER; note = 2'-O-methyluridine-3'-phosphate
  modified_base 5: mod_base = OTHER; note = 2'-O-methylcytidine-3'-phosphate
  modified_base 6: mod_base = OTHER; note = 2'-O-methyladenosine-3'-phosphate
  modified_base 7: mod_base = OTHER; note = 2'-O-methyluridine-3'-phosphate
  modified_base 8: mod_base = OTHER; note = 2'-O-methylcytidine-3'-phosphate
  modified_base 9: mod_base = OTHER; note = 2'-fluoroadenosine-3'-phosphate
  modified_base 10: mod_base = OTHER; note = 2'-fluoroguanosine-3'-phosphate
  modified_base 11: mod_base = OTHER; note = 2'-fluorocytidine-3'-phosphate
  modified_base 12: mod_base = OTHER; note = 2'-O-methyluridine-3'-phosphate
  modified_base 13: mod_base = OTHER; note = 2'-O-methyluridine-3'-phosphate
  modified_base 14: mod_base = OTHER; note = 2'-O-methyluridine-3'-phosphate
  modified_base 15: mod_base = OTHER; note = 2'-O-methylguanosine-3'-phosphate
  modified_base 16: mod_base = OTHER; note = 2'-O-methylcytidine-3'-phosphate
  modified_base 17: mod_base = OTHER; note = 2'-O-methyluridine-3'-phosphate
  modified_base 18: mod_base = OTHER; note = 2'-O-methyladenosine-3'-phosphate
  modified_base 19: mod_base = OTHER; note = 2'-O-methylcytidine-3'-phosphate
  modified_base 20: mod_base = OTHER; note = 2'-O-methyluridine-3'-phosphate
  modified_base 21: mod_base = OTHER; note = 2'-O-methyluridine-3'-phosphate N-[tris(GalNAc-alkyl)-amidodecanoyl)]-4-hydroxyprolinol (Hyp-(GalNAc-alkyl)3)
aggtcatcagctttgctactt

SEQ ID NO: 6700 - RNA, 21 nt, synthetic construct
  source 1..21: mol_type = other RNA
  modified_base 1: mod_base = OTHER; note = 2'-O-methylguanosine-3'-phosphorothioate
  modified_base 2: mod_base = OTHER; note = 2'-O-methylguanosine-3'-phosphorothioate
  modified_base 3: mod_base = OTHER; note = 2'-O-methyluridine-3'-phosphate
  modified_base 4: mod_base = OTHER; note = 2'-O-methylcytidine-3'-phosphate
  modified_base 5: mod_base = OTHER; note = 2'-O-methyladenosine-3'-phosphate
  modified_base 6: mod_base = OTHER; note = 2'-O-methyluridine-3'-phosphate
  modified_base 7: mod_base = OTHER; note = 2'-O-methylcytidine-3'-phosphate
  modified_base 8: mod_base = OTHER; note = 2'-O-methyladenosine-3'-phosphate
  modified_base 9: mod_base = OTHER; note = 2'-fluoroguanosine-3'-phosphate
  modified_base 10: mod_base = OTHER; note = 2'-fluorocytidine-3'-phosphate
  modified_base 11: mod_base = OTHER; note = 2'-fluorouridine-3'-phosphate
  modified_base 12: mod_base = OTHER; note = 2'-O-methyluridine-3'-phosphate
  modified_base 13: mod_base = OTHER; note = 2'-O-methyluridine-3'-phosphate
  modified_base 14: mod_base = OTHER; note = 2'-O-methylguanosine-3'-phosphate
  modified_base 15: mod_base = OTHER; note = 2'-O-methylcytidine-3'-phosphate
  modified_base 16: mod_base = OTHER; note = 2'-O-methyluridine-3'-phosphate
  modified_base 17: mod_base = OTHER; note = 2'-O-methyladenosine-3'-phosphate
  modified_base 18: mod_base = OTHER; note = 2'-O-methylcytidine-3'-phosphate
  modified_base 19: mod_base = OTHER; note = 2'-O-methyluridine-3'-phosphate
  modified_base 20: mod_base = OTHER; note = 2'-O-methylguanosine-3'-phosphate
  modified_base 21: mod_base = OTHER; note = 2'-O-methyluridine-3'-phosphate N-[tris(GalNAc-alkyl)-amidodecanoyl)]-4-hydroxyprolinol (Hyp-(GalNAc-alkyl)3)
ggtcatcagctttgctactgt

SEQ ID NO: 6701 - RNA, 21 nt, synthetic construct
  source 1..21: mol_type = other RNA
  modified_base 1: mod_base = OTHER; note = 2'-O-methylguanosine-3'-phosphorothioate
  modified_base 2: mod_base = OTHER; note = 2'-O-methyluridine-3'-phosphorothioate
  modified_base 3: mod_base = OTHER; note = 2'-O-methylcytidine-3'-phosphate
  modified_base 4: mod_base = OTHER; note = 2'-O-methyladenosine-3'-phosphate
  modified_base 5: mod_base = OTHER; note = 2'-O-methyluridine-3'-phosphate
  modified_base 6: mod_base = OTHER; note = 2'-O-methylcytidine-3'-phosphate
  modified_base 7: mod_base = OTHER; note = 2'-O-methyladenosine-3'-phosphate
  modified_base 8: mod_base = OTHER; note = 2'-O-methylguanosine-3'-phosphate
  modified_base 9: mod_base = OTHER; note = 2'-fluorocytidine-3'-phosphate
  modified_base 10: mod_base = OTHER; note = 2'-fluorouridine-3'-phosphate
  modified_base 11: mod_base = OTHER; note = 2'-fluorouridine-3'-phosphate
  modified_base 12: mod_base = OTHER; note = 2'-O-methyluridine-3'-phosphate
  modified_base 13: mod_base = OTHER; note = 2'-O-methylguanosine-3'-phosphate
  modified_base 14: mod_base = OTHER; note = 2'-O-methylcytidine-3'-phosphate
  modified_base 15: mod_base = OTHER; note = 2'-O-methyluridine-3'-phosphate
  modified_base 16: mod_base = OTHER; note = 2'-O-methyladenosine-3'-phosphate
  modified_base 17: mod_base = OTHER; note = 2'-O-methylcytidine-3'-phosphate
  modified_base 18: mod_base = OTHER; note = 2'-O-methyluridine-3'-phosphate
  modified_base 19: mod_base = OTHER; note = 2'-O-methylguanosine-3'-phosphate
  modified_base 20: mod_base = OTHER; note = 2'-O-methyluridine-3'-phosphate
  modified_base 21: mod_base = OTHER; note = 2'-O-methyluridine-3'-phosphate N-[tris(GalNAc-alkyl)-amidodecanoyl)]-4-hydroxyprolinol (Hyp-(GalNAc-alkyl)3)
gtcatcagctttgctactgtt

SEQ ID NO: 6702 - RNA, 21 nt, synthetic construct
  source 1..21: mol_type = other RNA
  modified_base 1: mod_base = OTHER; note = 2'-O-methyluridine-3'-phosphorothioate
  modified_base 2: mod_base = OTHER; note = 2'-O-methylcytidine-3'-phosphorothioate
  modified_base 3: mod_base = OTHER; note = 2'-O-methyladenosine-3'-phosphate
  modified_base 4: mod_base = OTHER; note = 2'-O-methyluridine-3'-phosphate
  modified_base 5: mod_base = OTHER; note = 2'-O-methylcytidine-3'-phosphate
  modified_base 6: mod_base = OTHER; note = 2'-O-methyladenosine-3'-phosphate
  modified_base 7: mod_base = OTHER; note = 2'-O-methylguanosine-3'-phosphate
  modified_base 8: mod_base = OTHER; note = 2'-O-methylcytidine-3'-phosphate
  modified_base 9: mod_base = OTHER; note = 2'-fluorouridine-3'-phosphate
  modified_base 10: mod_base = OTHER; note = 2'-fluorouridine-3'-phosphate
  modified_base 11: mod_base = OTHER; note = 2'-fluorouridine-3'-phosphate
  modified_base 12: mod_base = OTHER; note = 2'-O-methylguanosine-3'-phosphate
  modified_base 13: mod_base = OTHER; note = 2'-O-methylcytidine-3'-phosphate
  modified_base 14: mod_base = OTHER; note = 2'-O-methyluridine-3'-phosphate
  modified_base 15: mod_base = OTHER; note = 2'-O-methyladenosine-3'-phosphate
  modified_base 16: mod_base = OTHER; note = 2'-O-methylcytidine-3'-phosphate
  modified_base 17: mod_base = OTHER; note = 2'-O-methyluridine-3'-phosphate
  modified_base 18: mod_base = OTHER; note = 2'-O-methylguanosine-3'-phosphate
  modified_base 19: mod_base = OTHER; note = 2'-O-methyluridine-3'-phosphate
  modified_base 20: mod_base = OTHER; note = 2'-O-methylcytidine-3'-phosphate
  modified_base 21: mod_base = OTHER; note = 2'-O-methyluridine-3'-phosphate N-[tris(GalNAc-alkyl)-amidodecanoyl)]-4-hydroxyprolinol (Hyp-(GalNAc-alkyl)3)
tcatcagctttgctactgtct

SEQ ID NO: 6703 - RNA, 21 nt, synthetic construct
  source 1..21: mol_type = other RNA
  modified_base 1: mod_base = OTHER; note = 2'-O-methyluridine-3'-phosphorothioate
  modified_base 2: mod_base = OTHER; note = 2'-O-methylcytidine-3'-phosphorothioate
  modified_base 3: mod_base = OTHER; note = 2'-O-methyladenosine-3'-phosphate
  modified_base 4: mod_base = OTHER; note = 2'-O-methylguanosine-3'-phosphate
  modified_base 5: mod_base = OTHER; note = 2'-O-methylcytidine-3'-phosphate
  modified_base 6: mod_base = OTHER; note = 2'-O-methyluridine-3'-phosphate
  modified_base 7: mod_base = OTHER; note = 2'-O-methyluridine-3'-phosphate
  modified_base 8: mod_base = OTHER; note = 2'-O-methyluridine-3'-phosphate
  modified_base 9: mod_base = OTHER; note = 2'-fluoroguanosine-3'-phosphate
  modified_base 10: mod_base = OTHER; note = 2'-fluorocytidine-3'-phosphate
  modified_base 11: mod_base = OTHER; note = 2'-fluorouridine-3'-phosphate
  modified_base 12: mod_base = OTHER; note = 2'-O-methyladenosine-3'-phosphate
  modified_base 13: mod_base = OTHER; note = 2'-O-methylcytidine-3'-phosphate
  modified_base 14: mod_base = OTHER; note = 2'-O-methyluridine-3'-phosphate
  modified_base 15: mod_base = OTHER; note = 2'-O-methylguanosine-3'-phosphate
  modified_base 16: mod_base = OTHER; note = 2'-O-methyluridine-3'-phosphate
  modified_base 17: mod_base = OTHER; note = 2'-O-methylcytidine-3'-phosphate
  modified_base 18: mod_base = OTHER; note = 2'-O-methyladenosine-3'-phosphate
  modified_base 19: mod_base = OTHER; note = 2'-O-methylcytidine-3'-phosphate
  modified_base 20: mod_base = OTHER; note = 2'-O-methyladenosine-3'-phosphate
  modified_base 21: mod_base = OTHER; note = 2'-O-methyluridine-3'-phosphate N-[tris(GalNAc-alkyl)-amidodecanoyl)]-4-hydroxyprolinol (Hyp-(GalNAc-alkyl)3)
tcagctttgctactgtcacat

SEQ ID NO: 6704 - RNA, 21 nt, synthetic construct
  source 1..21: mol_type = other RNA
  modified_base 1: mod_base = OTHER; note = 2'-O-methylcytidine-3'-phosphorothioate
  modified_base 2: mod_base = OTHER; note = 2'-O-methyladenosine-3'-phosphorothioate
  modified_base 3: mod_base = OTHER; note = 2'-O-methylguanosine-3'-phosphate
  modified_base 4: mod_base = OTHER; note = 2'-O-methylcytidine-3'-phosphate
  modified_base 5: mod_base = OTHER; note = 2'-O-methyluridine-3'-phosphate
  modified_base 6: mod_base = OTHER; note = 2'-O-methyluridine-3'-phosphate
  modified_base 7: mod_base = OTHER; note = 2'-O-methyluridine-3'-phosphate
  modified_base 8: mod_base = OTHER; note = 2'-O-methylguanosine-3'-phosphate
  modified_base 9: mod_base = OTHER; note = 2'-fluorocytidine-3'-phosphate
  modified_base 10: mod_base = OTHER; note = 2'-fluorouridine-3'-phosphate
  modified_base 11: mod_base = OTHER; note = 2'-fluoroadenosine-3'-phosphate
  modified_base 12: mod_base = OTHER; note = 2'-O-methylcytidine-3'-phosphate
  modified_base 13: mod_base = OTHER; note = 2'-O-methyluridine-3'-phosphate
  modified_base 14: mod_base = OTHER; note = 2'-O-methylguanosine-3'-phosphate
  modified_base 15: mod_base = OTHER; note = 2'-O-methyluridine-3'-phosphate
  modified_base 16: mod_base = OTHER; note = 2'-O-methylcytidine-3'-phosphate
  modified_base 17: mod_base = OTHER; note = 2'-O-methyladenosine-3'-phosphate
  modified_base 18: mod_base = OTHER; note = 2'-O-methylcytidine-3'-phosphate
  modified_base 19: mod_base = OTHER; note = 2'-O-methyladenosine-3'-phosphate
  modified_base 20: mod_base = OTHER; note = 2'-O-methylguanosine-3'-phosphate
  modified_base 21: mod_base = OTHER; note = 2'-O-methyluridine-3'-phosphate N-[tris(GalNAc-alkyl)-amidodecanoyl)]-4-hydroxyprolinol (Hyp-(GalNAc-alkyl)3)
cagctttgctactgtcacagt

SEQ ID NO: 6705 - RNA, 21 nt, synthetic construct
  source 1..21: mol_type = other RNA
  modified_base 1: mod_base = OTHER; note = 2'-O-methyladenosine-3'-phosphorothioate
  modified_base 2: mod_base = OTHER; note = 2'-O-methylguanosine-3'-phosphorothioate
  modified_base 3: mod_base = OTHER; note = 2'-O-methylcytidine-3'-phosphate
  modified_base 4: mod_base = OTHER; note = 2'-O-methyluridine-3'-phosphate
  modified_base 5: mod_base = OTHER; note = 2'-O-methyluridine-3'-phosphate
  modified_base 6: mod_base = OTHER; note = 2'-O-methyluridine-3'-phosphate
  modified_base 7: mod_base = OTHER; note = 2'-O-methylguanosine-3'-phosphate
  modified_base 8: mod_base = OTHER; note = 2'-O-methylcytidine-3'-phosphate
  modified_base 9: mod_base = OTHER; note = 2'-fluorouridine-3'-phosphate
  modified_base 10: mod_base = OTHER; note = 2'-fluoroadenosine-3'-phosphate
  modified_base 11: mod_base = OTHER; note = 2'-fluorocytidine-3'-phosphate
  modified_base 12: mod_base = OTHER; note = 2'-O-methyluridine-3'-phosphate
  modified_base 13: mod_base = OTHER; note = 2'-O-methylguanosine-3'-phosphate
  modified_base 14: mod_base = OTHER; note = 2'-O-methyluridine-3'-phosphate
  modified_base 15: mod_base = OTHER; note = 2'-O-methylcytidine-3'-phosphate
  modified_base 16: mod_base = OTHER; note = 2'-O-methyladenosine-3'-phosphate
  modified_base 17: mod_base = OTHER; note = 2'-O-methylcytidine-3'-phosphate
  modified_base 18: mod_base = OTHER; note = 2'-O-methyladenosine-3'-phosphate
  modified_base 19: mod_base = OTHER; note = 2'-O-methylguanosine-3'-phosphate
  modified_base 20: mod_base = OTHER; note = 2'-O-methyladenosine-3'-phosphate
  modified_base 21: mod_base = OTHER; note = 2'-O-methyluridine-3'-phosphate N-[tris(GalNAc-alkyl)-amidodecanoyl)]-4-hydroxyprolinol (Hyp-(GalNAc-alkyl)3)
agctttgctactgtcacagat

SEQ ID NO: 6706 - RNA, 21 nt, synthetic construct
  source 1..21: mol_type = other RNA
  modified_base 1: mod_base = OTHER; note = 2'-O-methylguanosine-3'-phosphorothioate
  modified_base 2: mod_base = OTHER; note = 2'-O-methylcytidine-3'-phosphorothioate
  modified_base 3: mod_base = OTHER; note = 2'-O-methyluridine-3'-phosphate
  modified_base 4: mod_base = OTHER; note = 2'-O-methyluridine-3'-phosphate
  modified_base 5: mod_base = OTHER; note = 2'-O-methyluridine-3'-phosphate
  modified_base 6: mod_base = OTHER; note = 2'-O-methylguanosine-3'-phosphate
  modified_base 7: mod_base = OTHER; note = 2'-O-methylcytidine-3'-phosphate
  modified_base 8: mod_base = OTHER; note = 2'-O-methyluridine-3'-phosphate
  modified_base 9: mod_base = OTHER; note = 2'-fluoroadenosine-3'-phosphate
  modified_base 10: mod_base = OTHER; note = 2'-fluorocytidine-3'-phosphate
  modified_base 11: mod_base = OTHER; note = 2'-fluorouridine-3'-phosphate
  modified_base 12: mod_base = OTHER; note = 2'-O-methylguanosine-3'-phosphate
  modified_base 13: mod_base = OTHER; note = 2'-O-methyluridine-3'-phosphate
  modified_base 14: mod_base = OTHER; note = 2'-O-methylcytidine-3'-phosphate
  modified_base 15: mod_base = OTHER; note = 2'-O-methyladenosine-3'-phosphate
  modified_base 16: mod_base = OTHER; note = 2'-O-methylcytidine-3'-phosphate
  modified_base 17: mod_base = OTHER; note = 2'-O-methyladenosine-3'-phosphate
  modified_base 18: mod_base = OTHER; note = 2'-O-methylguanosine-3'-phosphate
  modified_base 19: mod_base = OTHER; note = 2'-O-methyladenosine-3'-phosphate
  modified_base 20: mod_base = OTHER; note = 2'-O-methylcytidine-3'-phosphate
  modified_base 21: mod_base = OTHER; note = 2'-O-methyluridine-3'-phosphate N-[tris(GalNAc-alkyl)-amidodecanoyl)]-4-hydroxyprolinol (Hyp-(GalNAc-alkyl)3)
gctttgctactgtcacagact

SEQ ID NO: 6707 - RNA, 21 nt, synthetic construct
  source 1..21: mol_type = other RNA
  modified_base 1: mod_base = OTHER; note = 2'-O-methylcytidine-3'-phosphorothioate
  modified_base 2: mod_base = OTHER; note = 2'-O-methyluridine-3'-phosphorothioate
  modified_base 3: mod_base = OTHER; note = 2'-O-methyluridine-3'-phosphate
  modified_base 4: mod_base = OTHER; note = 2'-O-methyluridine-3'-phosphate
  modified_base 5: mod_base = OTHER; note = 2'-O-methylguanosine-3'-phosphate
  modified_base 6: mod_base = OTHER; note = 2'-O-methylcytidine-3'-phosphate
  modified_base 7: mod_base = OTHER; note = 2'-O-methyluridine-3'-phosphate
  modified_base 8: mod_base = OTHER; note = 2'-O-methyladenosine-3'-phosphate
  modified_base 9: mod_base = OTHER; note = 2'-fluorocytidine-3'-phosphate
  modified_base 10: mod_base = OTHER; note = 2'-fluorouridine-3'-phosphate
  modified_base 11: mod_base = OTHER; note = 2'-fluoroguanosine-3'-phosphate
  modified_base 12: mod_base = OTHER; note = 2'-O-methyluridine-3'-phosphate
  modified_base 13: mod_base = OTHER; note = 2'-O-methylcytidine-3'-phosphate
  modified_base 14: mod_base = OTHER; note = 2'-O-methyladenosine-3'-phosphate
  modified_base 15: mod_base = OTHER; note = 2'-O-methylcytidine-3'-phosphate
  modified_base 16: mod_base = OTHER; note = 2'-O-methyladenosine-3'-phosphate
  modified_base 17: mod_base = OTHER; note = 2'-O-methylguanosine-3'-phosphate
  modified_base 18: mod_base = OTHER; note = 2'-O-methyladenosine-3'-phosphate
  modified_base 19: mod_base = OTHER; note = 2'-O-methylcytidine-3'-phosphate
  modified_base 20: mod_base = OTHER; note = 2'-O-methyluridine-3'-phosphate
  modified_base 21: mod_base = OTHER; note = 2'-O-methyluridine-3'-phosphate N-[tris(GalNAc-alkyl)-amidodecanoyl)]-4-hydroxyprolinol (Hyp-(GalNAc-alkyl)3)
ctttgctactgtcacagactt

SEQ ID NO: 6708 - RNA, 21 nt, synthetic construct
  source 1..21: mol_type = other RNA
  modified_base 1: mod_base = OTHER; note = 2'-O-methyluridine-3'-phosphorothioate
  modified_base 2: mod_base = OTHER; note = 2'-O-methyluridine-3'-phosphorothioate
  modified_base 3: mod_base = OTHER; note = 2'-O-methyluridine-3'-phosphate
  modified_base 4: mod_base = OTHER; note = 2'-O-methylguanosine-3'-phosphate
  modified_base 5: mod_base = OTHER; note = 2'-O-methylcytidine-3'-phosphate
  modified_base 6: mod_base = OTHER; note = 2'-O-methyluridine-3'-phosphate
  modified_base 7: mod_base = OTHER; note = 2'-O-methyladenosine-3'-phosphate
  modified_base 8: mod_base = OTHER; note = 2'-O-methylcytidine-3'-phosphate
  modified_base 9: mod_base = OTHER; note = 2'-fluorouridine-3'-phosphate
  modified_base 10: mod_base = OTHER; note = 2'-fluoroguanosine-3'-phosphate
  modified_base 11: mod_base = OTHER; note = 2'-fluorouridine-3'-phosphate
  modified_base 12: mod_base = OTHER; note = 2'-O-methylcytidine-3'-phosphate
  modified_base 13: mod_base = OTHER; note = 2'-O-methyladenosine-3'-phosphate
  modified_base 14: mod_base = OTHER; note = 2'-O-methylcytidine-3'-phosphate
  modified_base 15: mod_base = OTHER; note = 2'-O-methyladenosine-3'-phosphate
  modified_base 16: mod_base = OTHER; note = 2'-O-methylguanosine-3'-phosphate
  modified_base 17: mod_base = OTHER; note = 2'-O-methyladenosine-3'-phosphate
  modified_base 18: mod_base = OTHER; note = 2'-O-methylcytidine-3'-phosphate
  modified_base 19: mod_base = OTHER; note = 2'-O-methyluridine-3'-phosphate
  modified_base 20: mod_base = OTHER; note = 2'-O-methylcytidine-3'-phosphate
  modified_base 21: mod_base = OTHER; note = 2'-O-methyluridine-3'-phosphate N-[tris(GalNAc-alkyl)-amidodecanoyl)]-4-hydroxyprolinol (Hyp-(GalNAc-alkyl)3)
tttgctactgtcacagactct

SEQ ID NO: 6709 - RNA, 21 nt, synthetic construct
  source 1..21: mol_type = other RNA
  modified_base 1: mod_base = OTHER; note = 2'-O-methyluridine-3'-phosphorothioate
  modified_base 2: mod_base = OTHER; note = 2'-O-methyluridine-3'-phosphorothioate
  modified_base 3: mod_base = OTHER; note = 2'-O-methylguanosine-3'-phosphate
  modified_base 4: mod_base = OTHER; note = 2'-O-methylcytidine-3'-phosphate
  modified_base 5: mod_base = OTHER; note = 2'-O-methyluridine-3'-phosphate
  modified_base 6: mod_base = OTHER; note = 2'-O-methyladenosine-3'-phosphate
  modified_base 7: mod_base = OTHER; note = 2'-O-methylcytidine-3'-phosphate
  modified_base 8: mod_base = OTHER; note = 2'-O-methyluridine-3'-phosphate
  modified_base 9: mod_base = OTHER; note = 2'-fluoroguanosine-3'-phosphate
  modified_base 10: mod_base = OTHER; note = 2'-fluorouridine-3'-phosphate
  modified_base 11: mod_base = OTHER; note = 2'-fluorocytidine-3'-phosphate
  modified_base 12: mod_base = OTHER; note = 2'-O-methyladenosine-3'-phosphate
  modified_base 13: mod_base = OTHER; note = 2'-O-methylcytidine-3'-phosphate
  modified_base 14: mod_base = OTHER; note = 2'-O-methyladenosine-3'-phosphate
  modified_base 15: mod_base = OTHER; note = 2'-O-methylguanosine-3'-phosphate
  modified_base 16: mod_base = OTHER; note = 2'-O-methyladenosine-3'-phosphate
  modified_base 17: mod_base = OTHER; note = 2'-O-methylcytidine-3'-phosphate
  modified_base 18: mod_base = OTHER; note = 2'-O-methyluridine-3'-phosphate
  modified_base 19: mod_base = OTHER; note = 2'-O-methylcytidine-3'-phosphate
  modified_base 20: mod_base = OTHER; note = 2'-O-methylcytidine-3'-phosphate
  modified_base 21: mod_base = OTHER; note = 2'-O-methyluridine-3'-phosphate N-[tris(GalNAc-alkyl)-amidodecanoyl)]-4-hydroxyprolinol (Hyp-(GalNAc-alkyl)3)
ttgctactgtcacagactcct

SEQ ID NO: 6710 - RNA, 21 nt, synthetic construct
  source 1..21: mol_type = other RNA
  modified_base 1: mod_base = OTHER; note = 2'-O-methyluridine-3'-phosphorothioate
  modified_base 2: mod_base = OTHER; note = 2'-O-methylguanosine-3'-phosphorothioate
  modified_base 3: mod_base = OTHER; note = 2'-O-methylcytidine-3'-phosphate
  modified_base 4: mod_base = OTHER; note = 2'-O-methyluridine-3'-phosphate
  modified_base 5: mod_base = OTHER; note = 2'-O-methyladenosine-3'-phosphate
  modified_base 6: mod_base = OTHER; note = 2'-O-methylcytidine-3'-phosphate
  modified_base 7: mod_base = OTHER; note = 2'-O-methyluridine-3'-phosphate
  modified_base 8: mod_base = OTHER; note = 2'-O-methylguanosine-3'-phosphate
  modified_base 9: mod_base = OTHER; note = 2'-fluorouridine-3'-phosphate
  modified_base 10: mod_base = OTHER; note = 2'-fluorocytidine-3'-phosphate
  modified_base 11: mod_base = OTHER; note = 2'-fluoroadenosine-3'-phosphate
  modified_base 12: mod_base = OTHER; note = 2'-O-methylcytidine-3'-phosphate
  modified_base 13: mod_base = OTHER; note = 2'-O-methyladenosine-3'-phosphate
  modified_base 14: mod_base = OTHER; note = 2'-O-methylguanosine-3'-phosphate
  modified_base 15: mod_base = OTHER; note = 2'-O-methyladenosine-3'-phosphate
  modified_base 16: mod_base = OTHER; note = 2'-O-methylcytidine-3'-phosphate
  modified_base 17: mod_base = OTHER; note = 2'-O-methyluridine-3'-phosphate
  modified_base 18: mod_base = OTHER; note = 2'-O-methylcytidine-3'-phosphate
  modified_base 19: mod_base = OTHER; note = 2'-O-methylcytidine-3'-phosphate
  modified_base 20: mod_base = OTHER; note = 2'-O-methyladenosine-3'-phosphate
  modified_base 21: mod_base = OTHER; note = 2'-O-methyluridine-3'-phosphate N-[tris(GalNAc-alkyl)-amidodecanoyl)]-4-hydroxyprolinol (Hyp-(GalNAc-alkyl)3)
tgctactgtcacagactccat

SEQ ID NO: 6711 - RNA, 21 nt, synthetic construct
  source 1..21: mol_type = other RNA
  modified_base 1: mod_base = OTHER; note = 2'-O-methyladenosine-3'-phosphorothioate
  modified_base 2: mod_base = OTHER; note = 2'-O-methylcytidine-3'-phosphorothioate
  modified_base 3: mod_base = OTHER; note = 2'-O-methyluridine-3'-phosphate
  modified_base 4: mod_base = OTHER; note = 2'-O-methylguanosine-3'-phosphate
  modified_base 5: mod_base = OTHER; note = 2'-O-methyluridine-3'-phosphate
  modified_base 6: mod_base = OTHER; note = 2'-O-methylcytidine-3'-phosphate
  modified_base 7: mod_base = OTHER; note = 2'-O-methyladenosine-3'-phosphate
  modified_base 8: mod_base = OTHER; note = 2'-O-methylcytidine-3'-phosphate
  modified_base 9: mod_base = OTHER; note = 2'-fluoroadenosine-3'-phosphate
  modified_base 10: mod_base = OTHER; note = 2'-fluoroguanosine-3'-phosphate
  modified_base 11: mod_base = OTHER; note = 2'-fluoroadenosine-3'-phosphate
  modified_base 12: mod_base = OTHER; note = 2'-O-methylcytidine-3'-phosphate
  modified_base 13: mod_base = OTHER; note = 2'-O-methyluridine-3'-phosphate
  modified_base 14: mod_base = OTHER; note = 2'-O-methylcytidine-3'-phosphate
  modified_base 15: mod_base = OTHER; note = 2'-O-methylcytidine-3'-phosphate
  modified_base 16: mod_base = OTHER; note = 2'-O-methyladenosine-3'-phosphate
  modified_base 17: mod_base = OTHER; note = 2'-O-methylcytidine-3'-phosphate
  modified_base 18: mod_base = OTHER; note = 2'-O-methyluridine-3'-phosphate
  modified_base 19: mod_base = OTHER; note = 2'-O-methyluridine-3'-phosphate
  modified_base 20: mod_base = OTHER; note = 2'-O-methylcytidine-3'-phosphate
  modified_base 21: mod_base = OTHER; note = 2'-O-methyluridine-3'-phosphate N-[tris(GalNAc-alkyl)-amidodecanoyl)]-4-hydroxyprolinol (Hyp-(GalNAc-alkyl)3)
actgtcacagactccacttct

SEQ ID NO: 6712 - RNA, 21 nt, synthetic construct
  source 1..21: mol_type = other RNA
  modified_base 1: mod_base = OTHER; note = 2'-O-methylcytidine-3'-phosphorothioate
  modified_base 2: mod_base = OTHER; note = 2'-O-methyluridine-3'-phosphorothioate
  modified_base 3: mod_base = OTHER; note = 2'-O-methylguanosine-3'-phosphate
  modified_base 4: mod_base = OTHER; note = 2'-O-methyluridine-3'-phosphate
  modified_base 5: mod_base = OTHER; note = 2'-O-methylcytidine-3'-phosphate
  modified_base 6: mod_base = OTHER; note = 2'-O-methyladenosine-3'-phosphate
  modified_base 7: mod_base = OTHER; note = 2'-O-methylcytidine-3'-phosphate
  modified_base 8: mod_base = OTHER; note = 2'-O-methyladenosine-3'-phosphate
  modified_base 9: mod_base = OTHER; note = 2'-fluoroguanosine-3'-phosphate
  modified_base 10: mod_base = OTHER; note = 2'-fluoroadenosine-3'-phosphate
  modified_base 11: mod_base = OTHER; note = 2'-fluorocytidine-3'-phosphate
  modified_base 12: mod_base = OTHER; note = 2'-O-methyluridine-3'-phosphate
  modified_base 13: mod_base = OTHER; note = 2'-O-methylcytidine-3'-phosphate
  modified_base 14: mod_base = OTHER; note = 2'-O-methylcytidine-3'-phosphate
  modified_base 15: mod_base = OTHER; note = 2'-O-methyladenosine-3'-phosphate
  modified_base 16: mod_base = OTHER; note = 2'-O-methylcytidine-3'-phosphate
  modified_base 17: mod_base = OTHER; note = 2'-O-methyluridine-3'-phosphate
  modified_base 18: mod_base = OTHER; note = 2'-O-methyluridine-3'-phosphate
  modified_base 19: mod_base = OTHER; note = 2'-O-methylcytidine-3'-phosphate
  modified_base 20: mod_base = OTHER; note = 2'-O-methyladenosine-3'-phosphate
  modified_base 21: mod_base = OTHER; note = 2'-O-methyluridine-3'-phosphate N-[tris(GalNAc-alkyl)-amidodecanoyl)]-4-hydroxyprolinol (Hyp-(GalNAc-alkyl)3)
ctgtcacagactccacttcat

SEQ ID NO: 6713 - RNA, 21 nt, synthetic construct
  source 1..21: mol_type = other RNA
  modified_base 1: mod_base = OTHER; note = 2'-O-methyluridine-3'-phosphorothioate
  modified_base 2: mod_base = OTHER; note = 2'-O-methylguanosine-3'-phosphorothioate
  modified_base 3: mod_base = OTHER; note = 2'-O-methyluridine-3'-phosphate
  modified_base 4: mod_base = OTHER; note = 2'-O-methylcytidine-3'-phosphate
  modified_base 5: mod_base = OTHER; note = 2'-O-methyladenosine-3'-phosphate
  modified_base 6: mod_base = OTHER; note = 2'-O-methylcytidine-3'-phosphate
  modified_base 7: mod_base = OTHER; note = 2'-O-methyladenosine-3'-phosphate
  modified_base 8: mod_base = OTHER; note = 2'-O-methylguanosine-3'-phosphate
  modified_base 9: mod_base = OTHER; note = 2'-fluoroadenosine-3'-phosphate
  modified_base 10: mod_base = OTHER; note = 2'-fluorocytidine-3'-phosphate
  modified_base 11: mod_base = OTHER; note = 2'-fluorouridine-3'-phosphate
  modified_base 12: mod_base = OTHER; note = 2'-O-methylcytidine-3'-phosphate
  modified_base 13: mod_base = OTHER; note = 2'-O-methylcytidine-3'-phosphate
  modified_base 14: mod_base = OTHER; note = 2'-O-methyladenosine-3'-phosphate
  modified_base 15: mod_base = OTHER; note = 2'-O-methylcytidine-3'-phosphate
  modified_base 16: mod_base = OTHER; note = 2'-O-methyluridine-3'-phosphate
  modified_base 17: mod_base = OTHER; note = 2'-O-methyluridine-3'-phosphate
  modified_base 18: mod_base = OTHER; note = 2'-O-methylcytidine-3'-phosphate
  modified_base 19: mod_base = OTHER; note = 2'-O-methyladenosine-3'-phosphate
  modified_base 20: mod_base = OTHER; note = 2'-O-methylguanosine-3'-phosphate
  modified_base 21: mod_base = OTHER; note = 2'-O-methyluridine-3'-phosphate N-[tris(GalNAc-alkyl)-amidodecanoyl)]-4-hydroxyprolinol (Hyp-(GalNAc-alkyl)3)
tgtcacagactccacttcagt

SEQ ID NO: 6714 - RNA, 21 nt, synthetic construct
  source 1..21: mol_type = other RNA
  modified_base 1: mod_base = OTHER; note = 2'-O-methyluridine-3'-phosphorothioate
  modified_base 2: mod_base = OTHER; note = 2'-O-methylcytidine-3'-phosphorothioate
  modified_base 3: mod_base = OTHER; note = 2'-O-methyladenosine-3'-phosphate
  modified_base 4: mod_base = OTHER; note = 2'-O-methylcytidine-3'-phosphate
  modified_base 5: mod_base = OTHER; note = 2'-O-methyladenosine-3'-phosphate
  modified_base 6: mod_base = OTHER; note = 2'-O-methylguanosine-3'-phosphate
  modified_base 7: mod_base = OTHER; note = 2'-O-methyladenosine-3'-phosphate
  modified_base 8: mod_base = OTHER; note = 2'-O-methylcytidine-3'-phosphate
  modified_base 9: mod_base = OTHER; note = 2'-fluorouridine-3'-phosphate
  modified_base 10: mod_base = OTHER; note = 2'-fluorocytidine-3'-phosphate
  modified_base 11: mod_base = OTHER; note = 2'-fluorocytidine-3'-phosphate
  modified_base 12: mod_base = OTHER; note = 2'-O-methyladenosine-3'-phosphate
  modified_base 13: mod_base = OTHER; note = 2'-O-methylcytidine-3'-phosphate
  modified_base 14: mod_base = OTHER; note = 2'-O-methyluridine-3'-phosphate
  modified_base 15: mod_base = OTHER; note = 2'-O-methyluridine-3'-phosphate
  modified_base 16: mod_base = OTHER; note = 2'-O-methylcytidine-3'-phosphate
  modified_base 17: mod_base = OTHER; note = 2'-O-methyladenosine-3'-phosphate
  modified_base 18: mod_base = OTHER; note = 2'-O-methylguanosine-3'-phosphate
  modified_base 19: mod_base = OTHER; note = 2'-O-methylcytidine-3'-phosphate
  modified_base 20: mod_base = OTHER; note = 2'-O-methylcytidine-3'-phosphate
  modified_base 21: mod_base = OTHER; note = 2'-O-methyluridine-3'-phosphate N-[tris(GalNAc-alkyl)-amidodecanoyl)]-4-hydroxyprolinol (Hyp-(GalNAc-alkyl)3)
tcacagactccacttcagcct

SEQ ID NO: 6715 - RNA, 21 nt, synthetic construct
  source 1..21: mol_type = other RNA
  modified_base 1: mod_base = OTHER; note = 2'-O-methylcytidine-3'-phosphorothioate
  modified_base 2: mod_base = OTHER; note = 2'-O-methyladenosine-3'-phosphorothioate
  modified_base 3: mod_base = OTHER; note = 2'-O-methylcytidine-3'-phosphate
  modified_base 4: mod_base = OTHER; note = 2'-O-methyladenosine-3'-phosphate
  modified_base 5: mod_base = OTHER; note = 2'-O-methylguanosine-3'-phosphate
  modified_base 6: mod_base = OTHER; note = 2'-O-methyladenosine-3'-phosphate
  modified_base 7: mod_base = OTHER; note = 2'-O-methylcytidine-3'-phosphate
  modified_base 8: mod_base = OTHER; note = 2'-O-methyluridine-3'-phosphate
  modified_base 9: mod_base = OTHER; note = 2'-fluorocytidine-3'-phosphate
  modified_base 10: mod_base = OTHER; note = 2'-fluorocytidine-3'-phosphate
  modified_base 11: mod_base = OTHER; note = 2'-fluoroadenosine-3'-phosphate
  modified_base 12: mod_base = OTHER; note = 2'-O-methylcytidine-3'-phosphate
  modified_base 13: mod_base = OTHER; note = 2'-O-methyluridine-3'-phosphate
  modified_base 14: mod_base = OTHER; note = 2'-O-methyluridine-3'-phosphate
  modified_base 15: mod_base = OTHER; note = 2'-O-methylcytidine-3'-phosphate
  modified_base 16: mod_base = OTHER; note = 2'-O-methyladenosine-3'-phosphate
  modified_base 17: mod_base = OTHER; note = 2'-O-methylguanosine-3'-phosphate
  modified_base 18: mod_base = OTHER; note = 2'-O-methylcytidine-3'-phosphate
  modified_base 19: mod_base = OTHER; note = 2'-O-methylcytidine-3'-phosphate
  modified_base 20: mod_base = OTHER; note = 2'-O-methyluridine-3'-phosphate
  modified_base 21: mod_base = OTHER; note = 2'-O-methyluridine-3'-phosphate N-[tris(GalNAc-alkyl)-amidodecanoyl)]-4-hydroxyprolinol (Hyp-(GalNAc-alkyl)3)
cacagactccacttcagcctt

SEQ ID NO: 6716 - RNA, 21 nt, synthetic construct
  source 1..21: mol_type = other RNA
  modified_base 1: mod_base = OTHER; note = 2'-O-methyladenosine-3'-phosphorothioate
  modified_base 2: mod_base = OTHER; note = 2'-O-methylcytidine-3'-phosphorothioate
  modified_base 3: mod_base = OTHER; note = 2'-O-methyladenosine-3'-phosphate
  modified_base 4: mod_base = OTHER; note = 2'-O-methylguanosine-3'-phosphate
  modified_base 5: mod_base = OTHER; note = 2'-O-methyladenosine-3'-phosphate
  modified_base 6: mod_base = OTHER; note = 2'-O-methylcytidine-3'-phosphate
  modified_base 7: mod_base = OTHER; note = 2'-O-methyluridine-3'-phosphate
  modified_base 8: mod_base = OTHER; note = 2'-O-methylcytidine-3'-phosphate
  modified_base 9: mod_base = OTHER; note = 2'-fluorocytidine-3'-phosphate
  modified_base 10: mod_base = OTHER; note = 2'-fluoroadenosine-3'-phosphate
  modified_base 11: mod_base = OTHER; note = 2'-fluorocytidine-3'-phosphate
  modified_base 12: mod_base = OTHER; note = 2'-O-methyluridine-3'-phosphate
  modified_base 13: mod_base = OTHER; note = 2'-O-methyluridine-3'-phosphate
  modified_base 14: mod_base = OTHER; note = 2'-O-methylcytidine-3'-phosphate
  modified_base 15: mod_base = OTHER; note = 2'-O-methyladenosine-3'-phosphate
  modified_base 16: mod_base = OTHER; note = 2'-O-methylguanosine-3'-phosphate
  modified_base 17: mod_base = OTHER; note = 2'-O-methylcytidine-3'-phosphate
  modified_base 18: mod_base = OTHER; note = 2'-O-methylcytidine-3'-phosphate
  modified_base 19: mod_base = OTHER; note = 2'-O-methyluridine-3'-phosphate
  modified_base 20: mod_base = OTHER; note = 2'-O-methyladenosine-3'-phosphate
  modified_base 21: mod_base = OTHER; note = 2'-O-methyluridine-3'-phosphate N-[tris(GalNAc-alkyl)-amidodecanoyl)]-4-hydroxyprolinol (Hyp-(GalNAc-alkyl)3)
acagactccacttcagcctat

SEQ ID NO: 6717 - RNA, 21 nt, synthetic construct
  source 1..21: mol_type = other RNA
  modified_base 1: mod_base = OTHER; note = 2'-O-methylcytidine-3'-phosphorothioate
  modified_base 2: mod_base = OTHER; note = 2'-O-methyladenosine-3'-phosphorothioate
  modified_base 3: mod_base = OTHER; note = 2'-O-methylguanosine-3'-phosphate
  modified_base 4: mod_base = OTHER; note = 2'-O-methyladenosine-3'-phosphate
  modified_base 5: mod_base = OTHER; note = 2'-O-methylcytidine-3'-phosphate
  modified_base 6: mod_base = OTHER; note = 2'-O-methyluridine-3'-phosphate
  modified_base 7: mod_base = OTHER; note = 2'-O-methylcytidine-3'-phosphate
  modified_base 8: mod_base = OTHER; note = 2'-O-methylcytidine-3'-phosphate
  modified_base 9: mod_base = OTHER; note = 2'-fluoroadenosine-3'-phosphate
  modified_base 10: mod_base = OTHER; note = 2'-fluorocytidine-3'-phosphate
  modified_base 11: mod_base = OTHER; note = 2'-fluorouridine-3'-phosphate
  modified_base 12: mod_base = OTHER; note = 2'-O-methyluridine-3'-phosphate
  modified_base 13: mod_base = OTHER; note = 2'-O-methylcytidine-3'-phosphate
  modified_base 14: mod_base = OTHER; note = 2'-O-methyladenosine-3'-phosphate
  modified_base 15: mod_base = OTHER; note = 2'-O-methylguanosine-3'-phosphate
  modified_base 16: mod_base = OTHER; note = 2'-O-methylcytidine-3'-phosphate
  modified_base 17: mod_base = OTHER; note = 2'-O-methylcytidine-3'-phosphate
  modified_base 18: mod_base = OTHER; note = 2'-O-methyluridine-3'-phosphate
  modified_base 19: mod_base = OTHER; note = 2'-O-methyladenosine-3'-phosphate
  modified_base 20: mod_base = OTHER; note = 2'-O-methylcytidine-3'-phosphate
  modified_base 21: mod_base = OTHER; note = 2'-O-methyluridine-3'-phosphate N-[tris(GalNAc-alkyl)-amidodecanoyl)]-4-hydroxyprolinol (Hyp-(GalNAc-alkyl)3)
cagactccacttcagcctact

SEQ ID NO: 6718 - RNA, 21 nt, synthetic construct
  source 1..21: mol_type = other RNA
  modified_base 1: mod_base = OTHER; note = 2'-O-methyladenosine-3'-phosphorothioate
  modified_base 2: mod_base = OTHER; note = 2'-O-methylguanosine-3'-phosphorothioate
  modified_base 3: mod_base = OTHER; note = 2'-O-methyladenosine-3'-phosphate
  modified_base 4: mod_base = OTHER; note = 2'-O-methylcytidine-3'-phosphate
  modified_base 5: mod_base = OTHER; note = 2'-O-methyluridine-3'-phosphate
  modified_base 6: mod_base = OTHER; note = 2'-O-methylcytidine-3'-phosphate
  modified_base 7: mod_base = OTHER; note = 2'-O-methylcytidine-3'-phosphate
  modified_base 8: mod_base = OTHER; note = 2'-O-methyladenosine-3'-phosphate
  modified_base 9: mod_base = OTHER; note = 2'-fluorocytidine-3'-phosphate
  modified_base 10: mod_base = OTHER; note = 2'-fluorouridine-3'-phosphate
  modified_base 11: mod_base = OTHER; note = 2'-fluorouridine-3'-phosphate
  modified_base 12: mod_base = OTHER; note = 2'-O-methylcytidine-3'-phosphate
  modified_base 13: mod_base = OTHER; note = 2'-O-methyladenosine-3'-phosphate
  modified_base 14: mod_base = OTHER; note = 2'-O-methylguanosine-3'-phosphate
  modified_base 15: mod_base = OTHER; note = 2'-O-methylcytidine-3'-phosphate
  modified_base 16: mod_base = OTHER; note = 2'-O-methylcytidine-3'-phosphate
  modified_base 17: mod_base = OTHER; note = 2'-O-methyluridine-3'-phosphate
  modified_base 18: mod_base = OTHER; note = 2'-O-methyladenosine-3'-phosphate
  modified_base 19: mod_base = OTHER; note = 2'-O-methylcytidine-3'-phosphate
  modified_base 20: mod_base = OTHER; note = 2'-O-methyladenosine-3'-phosphate
  modified_base 21: mod_base = OTHER; note = 2'-O-methyluridine-3'-phosphate N-[tris(GalNAc-alkyl)-amidodecanoyl)]-4-hydroxyprolinol (Hyp-(GalNAc-alkyl)3)
agactccacttcagcctacat

SEQ ID NO: 6719 - RNA, 21 nt, synthetic construct
  source 1..21: mol_type = other RNA
  modified_base 1: mod_base = OTHER; note = 2'-O-methylguanosine-3'-phosphorothioate
  modified_base 2: mod_base = OTHER; note = 2'-O-methyladenosine-3'-phosphorothioate
  modified_base 3: mod_base = OTHER; note = 2'-O-methylcytidine-3'-phosphate
  modified_base 4: mod_base = OTHER; note = 2'-O-methyluridine-3'-phosphate
  modified_base 5: mod_base = OTHER; note = 2'-O-methylcytidine-3'-phosphate
  modified_base 6: mod_base = OTHER; note = 2'-O-methylcytidine-3'-phosphate
  modified_base 7: mod_base = OTHER; note = 2'-O-methyladenosine-3'-phosphate
  modified_base 8: mod_base = OTHER; note = 2'-O-methylcytidine-3'-phosphate
  modified_base 9: mod_base = OTHER; note = 2'-fluorouridine-3'-phosphate
  modified_base 10: mod_base = OTHER; note = 2'-fluorouridine-3'-phosphate
  modified_base 11: mod_base = OTHER; note = 2'-fluorocytidine-3'-phosphate
  modified_base 12: mod_base = OTHER; note = 2'-O-methyladenosine-3'-phosphate
  modified_base 13: mod_base = OTHER; note = 2'-O-methylguanosine-3'-phosphate
  modified_base 14: mod_base = OTHER; note = 2'-O-methylcytidine-3'-phosphate
  modified_base 15: mod_base = OTHER; note = 2'-O-methylcytidine-3'-phosphate
  modified_base 16: mod_base = OTHER; note = 2'-O-methyluridine-3'-phosphate
  modified_base 17: mod_base = OTHER; note = 2'-O-methyladenosine-3'-phosphate
  modified_base 18: mod_base = OTHER; note = 2'-O-methylcytidine-3'-phosphate
  modified_base 19: mod_base = OTHER; note = 2'-O-methyladenosine-3'-phosphate
  modified_base 20: mod_base = OTHER; note = 2'-O-methylguanosine-3'-phosphate
  modified_base 21: mod_base = OTHER; note = 2'-O-methyluridine-3'-phosphate N-[tris(GalNAc-alkyl)-amidodecanoyl)]-4-hydroxyprolinol (Hyp-(GalNAc-alkyl)3)
gactccacttcagcctacagt

SEQ ID NO: 6720 - RNA, 21 nt, synthetic construct
  source 1..21: mol_type = other RNA
  modified_base 1: mod_base = OTHER; note = 2'-O-methyladenosine-3'-phosphorothioate
  modified_base 2: mod_base = OTHER; note = 2'-O-methylcytidine-3'-phosphorothioate
  modified_base 3: mod_base = OTHER; note = 2'-O-methyluridine-3'-phosphate
  modified_base 4: mod_base = OTHER; note = 2'-O-methylcytidine-3'-phosphate
  modified_base 5: mod_base = OTHER; note = 2'-O-methylcytidine-3'-phosphate
  modified_base 6: mod_base = OTHER; note = 2'-O-methyladenosine-3'-phosphate
  modified_base 7: mod_base = OTHER; note = 2'-O-methylcytidine-3'-phosphate
  modified_base 8: mod_base = OTHER; note = 2'-O-methyluridine-3'-phosphate
  modified_base 9: mod_base = OTHER; note = 2'-fluorouridine-3'-phosphate
  modified_base 10: mod_base = OTHER; note = 2'-fluorocytidine-3'-phosphate
  modified_base 11: mod_base = OTHER; note = 2'-fluoroadenosine-3'-phosphate
  modified_base 12: mod_base = OTHER; note = 2'-O-methylguanosine-3'-phosphate
  modified_base 13: mod_base = OTHER; note = 2'-O-methylcytidine-3'-phosphate
  modified_base 14: mod_base = OTHER; note = 2'-O-methylcytidine-3'-phosphate
  modified_base 15: mod_base = OTHER; note = 2'-O-methyluridine-3'-phosphate
  modified_base 16: mod_base = OTHER; note = 2'-O-methyladenosine-3'-phosphate
  modified_base 17: mod_base = OTHER; note = 2'-O-methylcytidine-3'-phosphate
  modified_base 18: mod_base = OTHER; note = 2'-O-methyladenosine-3'-phosphate
  modified_base 19: mod_base = OTHER; note = 2'-O-methylguanosine-3'-phosphate
  modified_base 20: mod_base = OTHER; note = 2'-O-methylcytidine-3'-phosphate
  modified_base 21: mod_base = OTHER; note = 2'-O-methyluridine-3'-phosphate N-[tris(GalNAc-alkyl)-amidodecanoyl)]-4-hydroxyprolinol (Hyp-(GalNAc-alkyl)3)
actccacttcagcctacagct

SEQ ID NO: 6721 - RNA, 21 nt, synthetic construct
  source 1..21: mol_type = other RNA
  modified_base 1: mod_base = OTHER; note = 2'-O-methylcytidine-3'-phosphorothioate
  modified_base 2: mod_base = OTHER; note = 2'-O-methyluridine-3'-phosphorothioate
  modified_base 3: mod_base = OTHER; note = 2'-O-methylcytidine-3'-phosphate
  modified_base 4: mod_base = OTHER; note = 2'-O-methylcytidine-3'-phosphate
  modified_base 5: mod_base = OTHER; note = 2'-O-methyladenosine-3'-phosphate
  modified_base 6: mod_base = OTHER; note = 2'-O-methylcytidine-3'-phosphate
  modified_base 7: mod_base = OTHER; note = 2'-O-methyluridine-3'-phosphate
  modified_base 8: mod_base = OTHER; note = 2'-O-methyluridine-3'-phosphate
  modified_base 9: mod_base = OTHER; note = 2'-fluorocytidine-3'-phosphate
  modified_base 10: mod_base = OTHER; note = 2'-fluoroadenosine-3'-phosphate
  modified_base 11: mod_base = OTHER; note = 2'-fluoroguanosine-3'-phosphate
  modified_base 12: mod_base = OTHER; note = 2'-O-methylcytidine-3'-phosphate
  modified_base 13: mod_base = OTHER; note = 2'-O-methylcytidine-3'-phosphate
  modified_base 14: mod_base = OTHER; note = 2'-O-methyluridine-3'-phosphate
  modified_base 15: mod_base = OTHER; note = 2'-O-methyladenosine-3'-phosphate
  modified_base 16: mod_base = OTHER; note = 2'-O-methylcytidine-3'-phosphate
  modified_base 17: mod_base = OTHER; note = 2'-O-methyladenosine-3'-phosphate
  modified_base 18: mod_base = OTHER; note = 2'-O-methylguanosine-3'-phosphate
  modified_base 19: mod_base = OTHER; note = 2'-O-methylcytidine-3'-phosphate
  modified_base 20: mod_base = OTHER; note = 2'-O-methyluridine-3'-phosphate
  modified_base 21: mod_base = OTHER; note = 2'-O-methyluridine-3'-phosphate N-[tris(GalNAc-alkyl)-amidodecanoyl)]-4-hydroxyprolinol (Hyp-(GalNAc-alkyl)3)
ctccacttcagcctacagctt

SEQ ID NO: 6722 - RNA, 21 nt, synthetic construct
  source 1..21: mol_type = other RNA
  modified_base 1: mod_base = OTHER; note = 2'-O-methyluridine-3'-phosphorothioate
  modified_base 2: mod_base = OTHER; note = 2'-O-methylcytidine-3'-phosphorothioate
  modified_base 3: mod_base = OTHER; note = 2'-O-methylcytidine-3'-phosphate
  modified_base 4: mod_base = OTHER; note = 2'-O-methyladenosine-3'-phosphate
  modified_base 5: mod_base = OTHER; note = 2'-O-methylcytidine-3'-phosphate
  modified_base 6: mod_base = OTHER; note = 2'-O-methyluridine-3'-phosphate
  modified_base 7: mod_base = OTHER; note = 2'-O-methyluridine-3'-phosphate
  modified_base 8: mod_base = OTHER; note = 2'-O-methylcytidine-3'-phosphate
  modified_base 9: mod_base = OTHER; note = 2'-fluoroadenosine-3'-phosphate
  modified_base 10: mod_base = OTHER; note = 2'-fluoroguanosine-3'-phosphate
  modified_base 11: mod_base = OTHER; note = 2'-fluorocytidine-3'-phosphate
  modified_base 12: mod_base = OTHER; note = 2'-O-methylcytidine-3'-phosphate
  modified_base 13: mod_base = OTHER; note = 2'-O-methyluridine-3'-phosphate
  modified_base 14: mod_base = OTHER; note = 2'-O-methyladenosine-3'-phosphate
  modified_base 15: mod_base = OTHER; note = 2'-O-methylcytidine-3'-phosphate
  modified_base 16: mod_base = OTHER; note = 2'-O-methyladenosine-3'-phosphate
  modified_base 17: mod_base = OTHER; note = 2'-O-methylguanosine-3'-phosphate
  modified_base 18: mod_base = OTHER; note = 2'-O-methylcytidine-3'-phosphate
  modified_base 19: mod_base = OTHER; note = 2'-O-methyluridine-3'-phosphate
  modified_base 20: mod_base = OTHER; note = 2'-O-methylcytidine-3'-phosphate
  modified_base 21: mod_base = OTHER; note = 2'-O-methyluridine-3'-phosphate N-[tris(GalNAc-alkyl)-amidodecanoyl)]-4-hydroxyprolinol (Hyp-(GalNAc-alkyl)3)
tccacttcagcctacagctct

SEQ ID NO: 6723 - RNA, 21 nt, synthetic construct
  source 1..21: mol_type = other RNA
  modified_base 1: mod_base = OTHER; note = 2'-O-methylcytidine-3'-phosphorothioate
  modified_base 2: mod_base = OTHER; note = 2'-O-methylcytidine-3'-phosphorothioate
  modified_base 3: mod_base = OTHER; note = 2'-O-methyladenosine-3'-phosphate
  modified_base 4: mod_base = OTHER; note = 2'-O-methylcytidine-3'-phosphate
  modified_base 5: mod_base = OTHER; note = 2'-O-methyluridine-3'-phosphate
  modified_base 6: mod_base = OTHER; note = 2'-O-methyluridine-3'-phosphate
  modified_base 7: mod_base = OTHER; note = 2'-O-methylcytidine-3'-phosphate
  modified_base 8: mod_base = OTHER; note = 2'-O-methyladenosine-3'-phosphate
  modified_base 9: mod_base = OTHER; note = 2'-fluoroguanosine-3'-phosphate
  modified_base 10: mod_base = OTHER; note = 2'-fluorocytidine-3'-phosphate
  modified_base 11: mod_base = OTHER; note = 2'-fluorocytidine-3'-phosphate
  modified_base 12: mod_base = OTHER; note = 2'-O-methyluridine-3'-phosphate
  modified_base 13: mod_base = OTHER; note = 2'-O-methyladenosine-3'-phosphate
  modified_base 14: mod_base = OTHER; note = 2'-O-methylcytidine-3'-phosphate
  modified_base 15: mod_base = OTHER; note = 2'-O-methyladenosine-3'-phosphate
  modified_base 16: mod_base = OTHER; note = 2'-O-methylguanosine-3'-phosphate
  modified_base 17: mod_base = OTHER; note = 2'-O-methylcytidine-3'-phosphate
  modified_base 18: mod_base = OTHER; note = 2'-O-methyluridine-3'-phosphate
  modified_base 19: mod_base = OTHER; note = 2'-O-methylcytidine-3'-phosphate
  modified_base 20: mod_base = OTHER; note = 2'-O-methylcytidine-3'-phosphate
  modified_base 21: mod_base = OTHER; note = 2'-O-methyluridine-3'-phosphate N-[tris(GalNAc-alkyl)-amidodecanoyl)]-4-hydroxyprolinol (Hyp-(GalNAc-alkyl)3)
ccacttcagcctacagctcct

SEQ ID NO: 6724 - RNA, 21 nt, synthetic construct
  source 1..21: mol_type = other RNA
  modified_base 1: mod_base = OTHER; note = 2'-O-methylcytidine-3'-phosphorothioate
  modified_base 2: mod_base = OTHER; note = 2'-O-methyladenosine-3'-phosphorothioate
  modified_base 3: mod_base = OTHER; note = 2'-O-methylcytidine-3'-phosphate
  modified_base 4: mod_base = OTHER; note = 2'-O-methyluridine-3'-phosphate
  modified_base 5: mod_base = OTHER; note = 2'-O-methyluridine-3'-phosphate
  modified_base 6: mod_base = OTHER; note = 2'-O-methylcytidine-3'-phosphate
  modified_base 7: mod_base = OTHER; note = 2'-O-methyladenosine-3'-phosphate
  modified_base 8: mod_base = OTHER; note = 2'-O-methylguanosine-3'-phosphate
  modified_base 9: mod_base = OTHER; note = 2'-fluorocytidine-3'-phosphate
  modified_base 10: mod_base = OTHER; note = 2'-fluorocytidine-3'-phosphate
  modified_base 11: mod_base = OTHER; note = 2'-fluorouridine-3'-phosphate
  modified_base 12: mod_base = OTHER; note = 2'-O-methyladenosine-3'-phosphate
  modified_base 13: mod_base = OTHER; note = 2'-O-methylcytidine-3'-phosphate
  modified_base 14: mod_base = OTHER; note = 2'-O-methyladenosine-3'-phosphate
  modified_base 15: mod_base = OTHER; note = 2'-O-methylguanosine-3'-phosphate
  modified_base 16: mod_base = OTHER; note = 2'-O-methylcytidine-3'-phosphate
  modified_base 17: mod_base = OTHER; note = 2'-O-methyluridine-3'-phosphate
  modified_base 18: mod_base = OTHER; note = 2'-O-methylcytidine-3'-phosphate
  modified_base 19: mod_base = OTHER; note = 2'-O-methylcytidine-3'-phosphate
  modified_base 20: mod_base = OTHER; note = 2'-O-methylcytidine-3'-phosphate
  modified_base 21: mod_base = OTHER; note = 2'-O-methyluridine-3'-phosphate N-[tris(GalNAc-alkyl)-amidodecanoyl)]-4-hydroxyprolinol (Hyp-(GalNAc-alkyl)3)
cacttcagcctacagctccct

SEQ ID NO: 6725 - RNA, 21 nt, synthetic construct
  source 1..21: mol_type = other RNA
  modified_base 1: mod_base = OTHER; note = 2'-O-methyladenosine-3'-phosphorothioate
  modified_base 2: mod_base = OTHER; note = 2'-O-methylcytidine-3'-phosphorothioate
  modified_base 3: mod_base = OTHER; note = 2'-O-methyluridine-3'-phosphate
  modified_base 4: mod_base = OTHER; note = 2'-O-methyluridine-3'-phosphate
  modified_base 5: mod_base = OTHER; note = 2'-O-methylcytidine-3'-phosphate
  modified_base 6: mod_base = OTHER; note = 2'-O-methyladenosine-3'-phosphate
  modified_base 7: mod_base = OTHER; note = 2'-O-methylguanosine-3'-phosphate
  modified_base 8: mod_base = OTHER; note = 2'-O-methylcytidine-3'-phosphate
  modified_base 9: mod_base = OTHER; note = 2'-fluorocytidine-3'-phosphate
  modified_base 10: mod_base = OTHER; note = 2'-fluorouridine-3'-phosphate
  modified_base 11: mod_base = OTHER; note = 2'-fluoroadenosine-3'-phosphate
  modified_base 12: mod_base = OTHER; note = 2'-O-methylcytidine-3'-phosphate
  modified_base 13: mod_base = OTHER; note = 2'-O-methyladenosine-3'-phosphate
  modified_base 14: mod_base = OTHER; note = 2'-O-methylguanosine-3'-phosphate
  modified_base 15: mod_base = OTHER; note = 2'-O-methylcytidine-3'-phosphate
  modified_base 16: mod_base = OTHER; note = 2'-O-methyluridine-3'-phosphate
  modified_base 17: mod_base = OTHER; note = 2'-O-methylcytidine-3'-phosphate
  modified_base 18: mod_base = OTHER; note = 2'-O-methylcytidine-3'-phosphate
  modified_base 19: mod_base = OTHER; note = 2'-O-methylcytidine-3'-phosphate
  modified_base 20: mod_base = OTHER; note = 2'-O-methyluridine-3'-phosphate
  modified_base 21: mod_base = OTHER; note = 2'-O-methyluridine-3'-phosphate N-[tris(GalNAc-alkyl)-amidodecanoyl)]-4-hydroxyprolinol (Hyp-(GalNAc-alkyl)3)
acttcagcctacagctccctt

SEQ ID NO: 6726 - RNA, 21 nt, synthetic construct
  source 1..21: mol_type = other RNA
  modified_base 1: mod_base = OTHER; note = 2'-O-methyluridine-3'-phosphorothioate
  modified_base 2: mod_base = OTHER; note = 2'-O-methylcytidine-3'-phosphorothioate
  modified_base 3: mod_base = OTHER; note = 2'-O-methyladenosine-3'-phosphate
  modified_base 4: mod_base = OTHER; note = 2'-O-methylguanosine-3'-phosphate
  modified_base 5: mod_base = OTHER; note = 2'-O-methylcytidine-3'-phosphate
  modified_base 6: mod_base = OTHER; note = 2'-O-methylcytidine-3'-phosphate
  modified_base 7: mod_base = OTHER; note = 2'-O-methyluridine-3'-phosphate
  modified_base 8: mod_base = OTHER; note = 2'-O-methyladenosine-3'-phosphate
  modified_base 9: mod_base = OTHER; note = 2'-fluorocytidine-3'-phosphate
  modified_base 10: mod_base = OTHER; note = 2'-fluoroadenosine-3'-phosphate
  modified_base 11: mod_base = OTHER; note = 2'-fluoroguanosine-3'-phosphate
  modified_base 12: mod_base = OTHER; note = 2'-O-methylcytidine-3'-phosphate
  modified_base 13: mod_base = OTHER; note = 2'-O-methyluridine-3'-phosphate
  modified_base 14: mod_base = OTHER; note = 2'-O-methylcytidine-3'-phosphate
  modified_base 15: mod_base = OTHER; note = 2'-O-methylcytidine-3'-phosphate
  modified_base 16: mod_base = OTHER; note = 2'-O-methylcytidine-3'-phosphate
  modified_base 17: mod_base = OTHER; note = 2'-O-methyluridine-3'-phosphate
  modified_base 18: mod_base = OTHER; note = 2'-O-methylguanosine-3'-phosphate
  modified_base 19: mod_base = OTHER; note = 2'-O-methylcytidine-3'-phosphate
  modified_base 20: mod_base = OTHER; note = 2'-O-methyluridine-3'-phosphate
  modified_base 21: mod_base = OTHER; note = 2'-O-methyluridine-3'-phosphate N-[tris(GalNAc-alkyl)-amidodecanoyl)]-4-hydroxyprolinol (Hyp-(GalNAc-alkyl)3)
tcagcctacagctccctgctt

SEQ ID NO: 6727 - RNA, 21 nt, synthetic construct
  source 1..21: mol_type = other RNA
  modified_base 1: mod_base = OTHER; note = 2'-O-methylcytidine-3'-phosphorothioate
  modified_base 2: mod_base = OTHER; note = 2'-O-methyladenosine-3'-phosphorothioate
  modified_base 3: mod_base = OTHER; note = 2'-O-methylcytidine-3'-phosphate
  modified_base 4: mod_base = OTHER; note = 2'-O-methylcytidine-3'-phosphate
  modified_base 5: mod_base = OTHER; note = 2'-O-methyluridine-3'-phosphate
  modified_base 6: mod_base = OTHER; note = 2'-O-methylguanosine-3'-phosphate
  modified_base 7: mod_base = OTHER; note = 2'-O-methyluridine-3'-phosphate
  modified_base 8: mod_base = OTHER; note = 2'-O-methyladenosine-3'-phosphate
  modified_base 9: mod_base = OTHER; note = 2'-fluorocytidine-3'-phosphate
  modified_base 10: mod_base = OTHER; note = 2'-fluorocytidine-3'-phosphate
  modified_base 11: mod_base = OTHER; note = 2'-fluoroadenosine-3'-phosphate
  modified_base 12: mod_base = OTHER; note = 2'-O-methyluridine-3'-phosphate
  modified_base 13: mod_base = OTHER; note = 2'-O-methylguanosine-3'-phosphate
  modified_base 14: mod_base = OTHER; note = 2'-O-methylcytidine-3'-phosphate
  modified_base 15: mod_base = OTHER; note = 2'-O-methylcytidine-3'-phosphate
  modified_base 16: mod_base = OTHER; note = 2'-O-methylcytidine-3'-phosphate
  modified_base 17: mod_base = OTHER; note = 2'-O-methylguanosine-3'-phosphate
  modified_base 18: mod_base = OTHER; note = 2'-O-methylcytidine-3'-phosphate
  modified_base 19: mod_base = OTHER; note = 2'-O-methylcytidine-3'-phosphate
  modified_base 20: mod_base = OTHER; note = 2'-O-methyluridine-3'-phosphate
  modified_base 21: mod_base = OTHER; note = 2'-O-methyluridine-3'-phosphate N-[tris(GalNAc-alkyl)-amidodecanoyl)]-4-hydroxyprolinol (Hyp-(GalNAc-alkyl)3)
cacctgtaccatgcccgcctt

SEQ ID NO: 6728 - RNA, 21 nt, synthetic construct
  source 1..21: mol_type = other RNA
  modified_base 1: mod_base = OTHER; note = 2'-O-methylcytidine-3'-phosphorothioate
  modified_base 2: mod_base = OTHER; note = 2'-O-methylcytidine-3'-phosphorothioate
  modified_base 3: mod_base = OTHER; note = 2'-O-methyluridine-3'-phosphate
  modified_base 4: mod_base = OTHER; note = 2'-O-methylguanosine-3'-phosphate
  modified_base 5: mod_base = OTHER; note = 2'-O-methyluridine-3'-phosphate
  modified_base 6: mod_base = OTHER; note = 2'-O-methyladenosine-3'-phosphate
  modified_base 7: mod_base = OTHER; note = 2'-O-methylcytidine-3'-phosphate
  modified_base 8: mod_base = OTHER; note = 2'-O-methylcytidine-3'-phosphate
  modified_base 9: mod_base = OTHER; note = 2'-fluoroadenosine-3'-phosphate
  modified_base 10: mod_base = OTHER; note = 2'-fluorouridine-3'-phosphate
  modified_base 11: mod_base = OTHER; note = 2'-fluoroguanosine-3'-phosphate
  modified_base 12: mod_base = OTHER; note = 2'-O-methylcytidine-3'-phosphate
  modified_base 13: mod_base = OTHER; note = 2'-O-methylcytidine-3'-phosphate
  modified_base 14: mod_base = OTHER; note = 2'-O-methylcytidine-3'-phosphate
  modified_base 15: mod_base = OTHER; note = 2'-O-methylguanosine-3'-phosphate
  modified_base 16: mod_base = OTHER; note = 2'-O-methylcytidine-3'-phosphate
  modified_base 17: mod_base = OTHER; note = 2'-O-methylcytidine-3'-phosphate
  modified_base 18: mod_base = OTHER; note = 2'-O-methyluridine-3'-phosphate
  modified_base 19: mod_base = OTHER; note = 2'-O-methylguanosine-3'-phosphate
  modified_base 20: mod_base = OTHER; note = 2'-O-methyluridine-3'-phosphate
  modified_base 21: mod_base = OTHER; note = 2'-O-methyluridine-3'-phosphate N-[tris(GalNAc-alkyl)-amidodecanoyl)]-4-hydroxyprolinol (Hyp-(GalNAc-alkyl)3)
cctgtaccatgcccgcctgtt

SEQ ID NO: 6729 - RNA, 21 nt, synthetic construct
  source 1..21: mol_type = other RNA
  modified_base 1: mod_base = OTHER; note = 2'-O-methylcytidine-3'-phosphorothioate
  modified_base 2: mod_base = OTHER; note = 2'-O-methyluridine-3'-phosphorothioate
  modified_base 3: mod_base = OTHER; note = 2'-O-methylguanosine-3'-phosphate
  modified_base 4: mod_base = OTHER; note = 2'-O-methyluridine-3'-phosphate
  modified_base 5: mod_base = OTHER; note = 2'-O-methyladenosine-3'-phosphate
  modified_base 6: mod_base = OTHER; note = 2'-O-methylcytidine-3'-phosphate
  modified_base 7: mod_base = OTHER; note = 2'-O-methylcytidine-3'-phosphate
  modified_base 8: mod_base = OTHER; note = 2'-O-methyladenosine-3'-phosphate
  modified_base 9: mod_base = OTHER; note = 2'-fluorouridine-3'-phosphate
  modified_base 10: mod_base = OTHER; note = 2'-fluoroguanosine-3'-phosphate
  modified_base 11: mod_base = OTHER; note = 2'-fluorocytidine-3'-phosphate
  modified_base 12: mod_base = OTHER; note = 2'-O-methylcytidine-3'-phosphate
  modified_base 13: mod_base = OTHER; note = 2'-O-methylcytidine-3'-phosphate
  modified_base 14: mod_base = OTHER; note = 2'-O-methylguanosine-3'-phosphate
  modified_base 15: mod_base = OTHER; note = 2'-O-methylcytidine-3'-phosphate
  modified_base 16: mod_base = OTHER; note = 2'-O-methylcytidine-3'-phosphate
  modified_base 17: mod_base = OTHER; note = 2'-O-methyluridine-3'-phosphate
  modified_base 18: mod_base = OTHER; note = 2'-O-methylguanosine-3'-phosphate
  modified_base 19: mod_base = OTHER; note = 2'-O-methyluridine-3'-phosphate
  modified_base 20: mod_base = OTHER; note = 2'-O-methylguanosine-3'-phosphate
  modified_base 21: mod_base = OTHER; note = 2'-O-methyluridine-3'-phosphate N-[tris(GalNAc-alkyl)-amidodecanoyl)]-4-hydroxyprolinol (Hyp-(GalNAc-alkyl)3)
ctgtaccatgcccgcctgtgt

SEQ ID NO: 6730 - RNA, 21 nt, synthetic construct
  source 1..21: mol_type = other RNA
  modified_base 1: mod_base = OTHER; note = 2'-O-methyluridine-3'-phosphorothioate
  modified_base 2: mod_base = OTHER; note = 2'-O-methyladenosine-3'-phosphorothioate
  modified_base 3: mod_base = OTHER; note = 2'-O-methylcytidine-3'-phosphate
  modified_base 4: mod_base = OTHER; note = 2'-O-methylcytidine-3'-phosphate
  modified_base 5: mod_base = OTHER; note = 2'-O-methyladenosine-3'-phosphate
  modified_base 6: mod_base = OTHER; note = 2'-O-methyluridine-3'-phosphate
  modified_base 7: mod_base = OTHER; note = 2'-O-methylguanosine-3'-phosphate
  modified_base 8: mod_base = OTHER; note = 2'-O-methylcytidine-3'-phosphate
  modified_base 9: mod_base = OTHER; note = 2'-fluorocytidine-3'-phosphate
  modified_base 10: mod_base = OTHER; note = 2'-fluorocytidine-3'-phosphate
  modified_base 11: mod_base = OTHER; note = 2'-fluoroguanosine-3'-phosphate
  modified_base 12: mod_base = OTHER; note = 2'-O-methylcytidine-3'-phosphate
  modified_base 13: mod_base = OTHER; note = 2'-O-methylcytidine-3'-phosphate
  modified_base 14: mod_base = OTHER; note = 2'-O-methyluridine-3'-phosphate
  modified_base 15: mod_base = OTHER; note = 2'-O-methylguanosine-3'-phosphate
  modified_base 16: mod_base = OTHER; note = 2'-O-methyluridine-3'-phosphate
  modified_base 17: mod_base = OTHER; note = 2'-O-methylguanosine-3'-phosphate
  modified_base 18: mod_base = OTHER; note = 2'-O-methylguanosine-3'-phosphate
  modified_base 19: mod_base = OTHER; note = 2'-O-methylcytidine-3'-phosphate
  modified_base 20: mod_base = OTHER; note = 2'-O-methyluridine-3'-phosphate
  modified_base 21: mod_base = OTHER; note = 2'-O-methyluridine-3'-phosphate N-[tris(GalNAc-alkyl)-amidodecanoyl)]-4-hydroxyprolinol (Hyp-(GalNAc-alkyl)3)
taccatgcccgcctgtggctt

SEQ ID NO: 6731 - RNA, 21 nt, synthetic construct
  source 1..21: mol_type = other RNA
  modified_base 1: mod_base = OTHER; note = 2'-O-methylcytidine-3'-phosphorothioate
  modified_base 2: mod_base = OTHER; note = 2'-O-methyladenosine-3'-phosphorothioate
  modified_base 3: mod_base = OTHER; note = 2'-O-methylcytidine-3'-phosphate
  modified_base 4: mod_base = OTHER; note = 2'-O-methylcytidine-3'-phosphate
  modified_base 5: mod_base = OTHER; note = 2'-O-methylcytidine-3'-phosphate
  modified_base 6: mod_base = OTHER; note = 2'-O-methyluridine-3'-phosphate
  modified_base 7: mod_base = OTHER; note = 2'-O-methyluridine-3'-phosphate
  modified_base 8: mod_base = OTHER; note = 2'-O-methylcytidine-3'-phosphate
  modified_base 9: mod_base = OTHER; note = 2'-fluorocytidine-3'-phosphate
  modified_base 10: mod_base = OTHER; note = 2'-fluorouridine-3'-phosphate
  modified_base 11: mod_base = OTHER; note = 2'-fluoroguanosine-3'-phosphate
  modified_base 12: mod_base = OTHER; note = 2'-O-methylguanosine-3'-phosphate
  modified_base 13: mod_base = OTHER; note = 2'-O-methylcytidine-3'-phosphate
  modified_base 14: mod_base = OTHER; note = 2'-O-methyladenosine-3'-phosphate
  modified_base 15: mod_base = OTHER; note = 2'-O-methylcytidine-3'-phosphate
  modified_base 16: mod_base = OTHER; note = 2'-O-methyluridine-3'-phosphate
  modified_base 17: mod_base = OTHER; note = 2'-O-methylcytidine-3'-phosphate
  modified_base 18: mod_base = OTHER; note = 2'-O-methyluridine-3'-phosphate
  modified_base 19: mod_base = OTHER; note = 2'-O-methyluridine-3'-phosphate
  modified_base 20: mod_base = OTHER; note = 2'-O-methyluridine-3'-phosphate
  modified_base 21: mod_base = OTHER; note = 2'-O-methyluridine-3'-phosphate N-[tris(GalNAc-alkyl)-amidodecanoyl)]-4-hydroxyprolinol (Hyp-(GalNAc-alkyl)3)
cacccttcctggcactctttt

SEQ ID NO: 6732 - RNA, 21 nt, synthetic construct
  source 1..21: mol_type = other RNA
  modified_base 1: mod_base = OTHER; note = 2'-O-methyladenosine-3'-phosphorothioate
  modified_base 2: mod_base = OTHER; note = 2'-O-methylcytidine-3'-phosphorothioate
  modified_base 3: mod_base = OTHER; note = 2'-O-methylcytidine-3'-phosphate
  modified_base 4: mod_base = OTHER; note = 2'-O-methylcytidine-3'-phosphate
  modified_base 5: mod_base = OTHER; note = 2'-O-methyluridine-3'-phosphate
  modified_base 6: mod_base = OTHER; note = 2'-O-methyluridine-3'-phosphate
  modified_base 7: mod_base = OTHER; note = 2'-O-methylcytidine-3'-phosphate
  modified_base 8: mod_base = OTHER; note = 2'-O-methylcytidine-3'-phosphate
  modified_base 9: mod_base = OTHER; note = 2'-fluorouridine-3'-phosphate
  modified_base 10: mod_base = OTHER; note = 2'-fluoroguanosine-3'-phosphate
  modified_base 11: mod_base = OTHER; note = 2'-fluoroguanosine-3'-phosphate
  modified_base 12: mod_base = OTHER; note = 2'-O-methylcytidine-3'-phosphate
  modified_base 13: mod_base = OTHER; note = 2'-O-methyladenosine-3'-phosphate
  modified_base 14: mod_base = OTHER; note = 2'-O-methylcytidine-3'-phosphate
  modified_base 15: mod_base = OTHER; note = 2'-O-methyluridine-3'-phosphate
  modified_base 16: mod_base = OTHER; note = 2'-O-methylcytidine-3'-phosphate
  modified_base 17: mod_base = OTHER; note = 2'-O-methyluridine-3'-phosphate
  modified_base 18: mod_base = OTHER; note = 2'-O-methyluridine-3'-phosphate
  modified_base 19: mod_base = OTHER; note = 2'-O-methyluridine-3'-phosphate
  modified_base 20: mod_base = OTHER; note = 2'-O-methylguanosine-3'-phosphate
  modified_base 21: mod_base = OTHER; note = 2'-O-methyluridine-3'-phosphate N-[tris(GalNAc-alkyl)-amidodecanoyl)]-4-hydroxyprolinol (Hyp-(GalNAc-alkyl)3)
acccttcctggcactctttgt

SEQ ID NO: 6733 - RNA, 21 nt, synthetic construct
  source 1..21: mol_type = other RNA
  modified_base 1: mod_base = OTHER; note = 2'-O-methylcytidine-3'-phosphorothioate
  modified_base 2: mod_base = OTHER; note = 2'-O-methylcytidine-3'-phosphorothioate
  modified_base 3: mod_base = OTHER; note = 2'-O-methylcytidine-3'-phosphate
  modified_base 4: mod_base = OTHER; note = 2'-O-methyluridine-3'-phosphate
  modified_base 5: mod_base = OTHER; note = 2'-O-methyluridine-3'-phosphate
  modified_base 6: mod_base = OTHER; note = 2'-O-methylcytidine-3'-phosphate
  modified_base 7: mod_base = OTHER; note = 2'-O-methylcytidine-3'-phosphate
  modified_base 8: mod_base = OTHER; note = 2'-O-methyluridine-3'-phosphate
  modified_base 9: mod_base = OTHER; note = 2'-fluoroguanosine-3'-phosphate
  modified_base 10: mod_base = OTHER; note = 2'-fluoroguanosine-3'-phosphate
  modified_base 11: mod_base = OTHER; note = 2'-fluorocytidine-3'-phosphate
  modified_base 12: mod_base = OTHER; note = 2'-O-methyladenosine-3'-phosphate
  modified_base 13: mod_base = OTHER; note = 2'-O-methylcytidine-3'-phosphate
  modified_base 14: mod_base = OTHER; note = 2'-O-methyluridine-3'-phosphate
  modified_base 15: mod_base = OTHER; note = 2'-O-methylcytidine-3'-phosphate
  modified_base 16: mod_base = OTHER; note = 2'-O-methyluridine-3'-phosphate
  modified_base 17: mod_base = OTHER; note = 2'-O-methyluridine-3'-phosphate
  modified_base 18: mod_base = OTHER; note = 2'-O-methyluridine-3'-phosphate
  modified_base 19: mod_base = OTHER; note = 2'-O-methylguanosine-3'-phosphate
  modified_base 20: mod_base = OTHER; note = 2'-O-methylcytidine-3'-phosphate
  modified_base 21: mod_base = OTHER; note = 2'-O-methyluridine-3'-phosphate N-[tris(GalNAc-alkyl)-amidodecanoyl)]-4-hydroxyprolinol (Hyp-(GalNAc-alkyl)3)
cccttcctggcactctttgct

SEQ ID NO: 6734 - RNA, 21 nt, synthetic construct
  source 1..21: mol_type = other RNA
  modified_base 1: mod_base = OTHER; note = 2'-O-methylcytidine-3'-phosphorothioate
  modified_base 2: mod_base = OTHER; note = 2'-O-methylcytidine-3'-phosphorothioate
  modified_base 3: mod_base = OTHER; note = 2'-O-methyluridine-3'-phosphate
  modified_base 4: mod_base = OTHER; note = 2'-O-methyluridine-3'-phosphate
  modified_base 5: mod_base = OTHER; note = 2'-O-methylcytidine-3'-phosphate
  modified_base 6: mod_base = OTHER; note = 2'-O-methylcytidine-3'-phosphate
  modified_base 7: mod_base = OTHER; note = 2'-O-methyluridine-3'-phosphate
  modified_base 8: mod_base = OTHER; note = 2'-O-methylguanosine-3'-phosphate
  modified_base 9: mod_base = OTHER; note = 2'-fluoroguanosine-3'-phosphate
  modified_base 10: mod_base = OTHER; note = 2'-fluorocytidine-3'-phosphate
  modified_base 11: mod_base = OTHER; note = 2'-fluoroadenosine-3'-phosphate
  modified_base 12: mod_base = OTHER; note = 2'-O-methylcytidine-3'-phosphate
  modified_base 13: mod_base = OTHER; note = 2'-O-methyluridine-3'-phosphate
  modified_base 14: mod_base = OTHER; note = 2'-O-methylcytidine-3'-phosphate
  modified_base 15: mod_base = OTHER; note = 2'-O-methyluridine-3'-phosphate
  modified_base 16: mod_base = OTHER; note = 2'-O-methyluridine-3'-phosphate
  modified_base 17: mod_base = OTHER; note = 2'-O-methyluridine-3'-phosphate
  modified_base 18: mod_base = OTHER; note = 2'-O-methylguanosine-3'-phosphate
  modified_base 19: mod_base = OTHER; note = 2'-O-methylcytidine-3'-phosphate
  modified_base 20: mod_base = OTHER; note = 2'-O-methyluridine-3'-phosphate
  modified_base 21: mod_base = OTHER; note = 2'-O-methyluridine-3'-phosphate N-[tris(GalNAc-alkyl)-amidodecanoyl)]-4-hydroxyprolinol (Hyp-(GalNAc-alkyl)3)
ccttcctggcactctttgctt

SEQ ID NO: 6735 - RNA, 21 nt, synthetic construct
  source 1..21: mol_type = other RNA
  modified_base 1: mod_base = OTHER; note = 2'-O-methylcytidine-3'-phosphorothioate
  modified_base 2: mod_base = OTHER; note = 2'-O-methyluridine-3'-phosphorothioate
  modified_base 3: mod_base = OTHER; note = 2'-O-methyluridine-3'-phosphate
  modified_base 4: mod_base = OTHER; note = 2'-O-methylcytidine-3'-phosphate
  modified_base 5: mod_base = OTHER; note = 2'-O-methylcytidine-3'-phosphate
  modified_base 6: mod_base = OTHER; note = 2'-O-methyluridine-3'-phosphate
  modified_base 7: mod_base = OTHER; note = 2'-O-methylguanosine-3'-phosphate
  modified_base 8: mod_base = OTHER; note = 2'-O-methylguanosine-3'-phosphate
  modified_base 9: mod_base = OTHER; note = 2'-fluorocytidine-3'-phosphate
  modified_base 10: mod_base = OTHER; note = 2'-fluoroadenosine-3'-phosphate
  modified_base 11: mod_base = OTHER; note = 2'-fluorocytidine-3'-phosphate
  modified_base 12: mod_base = OTHER; note = 2'-O-methyluridine-3'-phosphate
  modified_base 13: mod_base = OTHER; note = 2'-O-methylcytidine-3'-phosphate
  modified_base 14: mod_base = OTHER; note = 2'-O-methyluridine-3'-phosphate
  modified_base 15: mod_base = OTHER; note = 2'-O-methyluridine-3'-phosphate
  modified_base 16: mod_base = OTHER; note = 2'-O-methyluridine-3'-phosphate
  modified_base 17: mod_base = OTHER; note = 2'-O-methylguanosine-3'-phosphate
  modified_base 18: mod_base = OTHER; note = 2'-O-methylcytidine-3'-phosphate
  modified_base 19: mod_base = OTHER; note = 2'-O-methyluridine-3'-phosphate
  modified_base 20: mod_base = OTHER; note = 2'-O-methyluridine-3'-phosphate
  modified_base 21: mod_base = OTHER; note = 2'-O-methyluridine-3'-phosphate N-[tris(GalNAc-alkyl)-amidodecanoyl)]-4-hydroxyprolinol (Hyp-(GalNAc-alkyl)3)
cttcctggcactctttgcttt

SEQ ID NO: 6736 - RNA, 21 nt, synthetic construct
  source 1..21: mol_type = other RNA
  modified_base 1: mod_base = OTHER; note = 2'-O-methyluridine-3'-phosphorothioate
  modified_base 2: mod_base = OTHER; note = 2'-O-methyluridine-3'-phosphorothioate
  modified_base 3: mod_base = OTHER; note = 2'-O-methylcytidine-3'-phosphate
  modified_base 4: mod_base = OTHER; note = 2'-O-methylcytidine-3'-phosphate
  modified_base 5: mod_base = OTHER; note = 2'-O-methyluridine-3'-phosphate
  modified_base 6: mod_base = OTHER; note = 2'-O-methylguanosine-3'-phosphate
  modified_base 7: mod_base = OTHER; note = 2'-O-methylguanosine-3'-phosphate
  modified_base 8: mod_base = OTHER; note = 2'-O-methylcytidine-3'-phosphate
  modified_base 9: mod_base = OTHER; note = 2'-fluoroadenosine-3'-phosphate
  modified_base 10: mod_base = OTHER; note = 2'-fluorocytidine-3'-phosphate
  modified_base 11: mod_base = OTHER; note = 2'-fluorouridine-3'-phosphate
  modified_base 12: mod_base = OTHER; note = 2'-O-methylcytidine-3'-phosphate
  modified_base 13: mod_base = OTHER; note = 2'-O-methyluridine-3'-phosphate
  modified_base 14: mod_base = OTHER; note = 2'-O-methyluridine-3'-phosphate
  modified_base 15: mod_base = OTHER; note = 2'-O-methyluridine-3'-phosphate
  modified_base 16: mod_base = OTHER; note = 2'-O-methylguanosine-3'-phosphate
  modified_base 17: mod_base = OTHER; note = 2'-O-methylcytidine-3'-phosphate
  modified_base 18: mod_base = OTHER; note = 2'-O-methyluridine-3'-phosphate
  modified_base 19: mod_base = OTHER; note = 2'-O-methyluridine-3'-phosphate
  modified_base 20: mod_base = OTHER; note = 2'-O-methylguanosine-3'-phosphate
  modified_base 21: mod_base = OTHER; note = 2'-O-methyluridine-3'-phosphate N-[tris(GalNAc-alkyl)-amidodecanoyl)]-4-hydroxyprolinol (Hyp-(GalNAc-alkyl)3)
ttcctggcactctttgcttgt

SEQ ID NO: 6737 - RNA, 21 nt, synthetic construct
  source 1..21: mol_type = other RNA
  modified_base 1: mod_base = OTHER; note = 2'-O-methyluridine-3'-phosphorothioate
  modified_base 2: mod_base = OTHER; note = 2'-O-methylcytidine-3'-phosphorothioate
  modified_base 3: mod_base = OTHER; note = 2'-O-methylcytidine-3'-phosphate
  modified_base 4: mod_base = OTHER; note = 2'-O-methyluridine-3'-phosphate
  modified_base 5: mod_base = OTHER; note = 2'-O-methylguanosine-3'-phosphate
  modified_base 6: mod_base = OTHER; note = 2'-O-methylguanosine-3'-phosphate
  modified_base 7: mod_base = OTHER; note = 2'-O-methylcytidine-3'-phosphate
  modified_base 8: mod_base = OTHER; note = 2'-O-methyladenosine-3'-phosphate
  modified_base 9: mod_base = OTHER; note = 2'-fluorocytidine-3'-phosphate
  modified_base 10: mod_base = OTHER; note = 2'-fluorouridine-3'-phosphate
  modified_base 11: mod_base = OTHER; note = 2'-fluorocytidine-3'-phosphate
  modified_base 12: mod_base = OTHER; note = 2'-O-methyluridine-3'-phosphate
  modified_base 13: mod_base = OTHER; note = 2'-O-methyluridine-3'-phosphate
  modified_base 14: mod_base = OTHER; note = 2'-O-methyluridine-3'-phosphate
  modified_base 15: mod_base = OTHER; note = 2'-O-methylguanosine-3'-phosphate
  modified_base 16: mod_base = OTHER; note = 2'-O-methylcytidine-3'-phosphate
  modified_base 17: mod_base = OTHER; note = 2'-O-methyluridine-3'-phosphate
  modified_base 18: mod_base = OTHER; note = 2'-O-methyluridine-3'-phosphate
  modified_base 19: mod_base = OTHER; note = 2'-O-methylguanosine-3'-phosphate
  modified_base 20: mod_base = OTHER; note = 2'-O-methyladenosine-3'-phosphate
  modified_base 21: mod_base = OTHER; note = 2'-O-methyluridine-3'-phosphate N-[tris(GalNAc-alkyl)-amidodecanoyl)]-4-hydroxyprolinol (Hyp-(GalNAc-alkyl)3)
tcctggcactctttgcttgat

SEQ ID NO: 6738 - RNA, 21 nt, synthetic construct
  source 1..21: mol_type = other RNA
  modified_base 1: mod_base = OTHER; note = 2'-O-methylcytidine-3'-phosphorothioate
  modified_base 2: mod_base = OTHER; note = 2'-O-methylcytidine-3'-phosphorothioate
  modified_base 3: mod_base = OTHER; note = 2'-O-methyluridine-3'-phosphate
  modified_base 4: mod_base = OTHER; note = 2'-O-methylguanosine-3'-phosphate
  modified_base 5: mod_base = OTHER; note = 2'-O-methylguanosine-3'-phosphate
  modified_base 6: mod_base = OTHER; note = 2'-O-methylcytidine-3'-phosphate
  modified_base 7: mod_base = OTHER; note = 2'-O-methyladenosine-3'-phosphate
  modified_base 8: mod_base = OTHER; note = 2'-O-methylcytidine-3'-phosphate
  modified_base 9: mod_base = OTHER; note = 2'-fluorouridine-3'-phosphate
  modified_base 10: mod_base = OTHER; note = 2'-fluorocytidine-3'-phosphate
  modified_base 11: mod_base = OTHER; note = 2'-fluorouridine-3'-phosphate
  modified_base 12: mod_base = OTHER; note = 2'-O-methyluridine-3'-phosphate
  modified_base 13: mod_base = OTHER; note = 2'-O-methyluridine-3'-phosphate
  modified_base 14: mod_base = OTHER; note = 2'-O-methylguanosine-3'-phosphate
  modified_base 15: mod_base = OTHER; note = 2'-O-methylcytidine-3'-phosphate
  modified_base 16: mod_base = OTHER; note = 2'-O-methyluridine-3'-phosphate
  modified_base 17: mod_base = OTHER; note = 2'-O-methyluridine-3'-phosphate
  modified_base 18: mod_base = OTHER; note = 2'-O-methylguanosine-3'-phosphate
  modified_base 19: mod_base = OTHER; note = 2'-O-methyladenosine-3'-phosphate
  modified_base 20: mod_base = OTHER; note = 2'-O-methylguanosine-3'-phosphate
  modified_base 21: mod_base = OTHER; note = 2'-O-methyluridine-3'-phosphate N-[tris(GalNAc-alkyl)-amidodecanoyl)]-4-hydroxyprolinol (Hyp-(GalNAc-alkyl)3)
cctggcactctttgcttgagt

SEQ ID NO: 6739 - RNA, 21 nt, synthetic construct
  source 1..21: mol_type = other RNA
  modified_base 1: mod_base = OTHER; note = 2'-O-methylcytidine-3'-phosphorothioate
  modified_base 2: mod_base = OTHER; note = 2'-O-methyluridine-3'-phosphorothioate
  modified_base 3: mod_base = OTHER; note = 2'-O-methylguanosine-3'-phosphate
  modified_base 4: mod_base = OTHER; note = 2'-O-methylguanosine-3'-phosphate
  modified_base 5: mod_base = OTHER; note = 2'-O-methylcytidine-3'-phosphate
  modified_base 6: mod_base = OTHER; note = 2'-O-methyladenosine-3'-phosphate
  modified_base 7: mod_base = OTHER; note = 2'-O-methylcytidine-3'-phosphate
  modified_base 8: mod_base = OTHER; note = 2'-O-methyluridine-3'-phosphate
  modified_base 9: mod_base = OTHER; note = 2'-fluorocytidine-3'-phosphate
  modified_base 10: mod_base = OTHER; note = 2'-fluorouridine-3'-phosphate
  modified_base 11: mod_base = OTHER; note = 2'-fluorouridine-3'-phosphate
  modified_base 12: mod_base = OTHER; note = 2'-O-methyluridine-3'-phosphate
  modified_base 13: mod_base = OTHER; note = 2'-O-methylguanosine-3'-phosphate
  modified_base 14: mod_base = OTHER; note = 2'-O-methylcytidine-3'-phosphate
  modified_base 15: mod_base = OTHER; note = 2'-O-methyluridine-3'-phosphate
  modified_base 16: mod_base = OTHER; note = 2'-O-methyluridine-3'-phosphate
  modified_base 17: mod_base = OTHER; note = 2'-O-methylguanosine-3'-phosphate
  modified_base 18: mod_base = OTHER; note = 2'-O-methyladenosine-3'-phosphate
  modified_base 19: mod_base = OTHER; note = 2'-O-methylguanosine-3'-phosphate
  modified_base 20: mod_base = OTHER; note = 2'-O-methylguanosine-3'-phosphate
  modified_base 21: mod_base = OTHER; note = 2'-O-methyluridine-3'-phosphate N-[tris(GalNAc-alkyl)-amidodecanoyl)]-4-hydroxyprolinol (Hyp-(GalNAc-alkyl)3)
ctggcactctttgcttgaggt

SEQ ID NO: 6740 - RNA, 21 nt, synthetic construct
  source 1..21: mol_type = other RNA
  modified_base 1: mod_base = OTHER; note = 2'-O-methyluridine-3'-phosphorothioate
  modified_base 2: mod_base = OTHER; note = 2'-O-methylguanosine-3'-phosphorothioate
  modified_base 3: mod_base = OTHER; note = 2'-O-methylguanosine-3'-phosphate
  modified_base 4: mod_base = OTHER; note = 2'-O-methylcytidine-3'-phosphate
  modified_base 5: mod_base = OTHER; note = 2'-O-methyladenosine-3'-phosphate
  modified_base 6: mod_base = OTHER; note = 2'-O-methylcytidine-3'-phosphate
  modified_base 7: mod_base = OTHER; note = 2'-O-methyluridine-3'-phosphate
  modified_base 8: mod_base = OTHER; note = 2'-O-methylcytidine-3'-phosphate
  modified_base 9: mod_base = OTHER; note = 2'-fluorouridine-3'-phosphate
  modified_base 10: mod_base = OTHER; note = 2'-fluorouridine-3'-phosphate
  modified_base 11: mod_base = OTHER; note = 2'-fluorouridine-3'-phosphate
  modified_base 12: mod_base = OTHER; note = 2'-O-methylguanosine-3'-phosphate
  modified_base 13: mod_base = OTHER; note = 2'-O-methylcytidine-3'-phosphate
  modified_base 14: mod_base = OTHER; note = 2'-O-methyluridine-3'-phosphate
  modified_base 15: mod_base = OTHER; note = 2'-O-methyluridine-3'-phosphate
  modified_base 16: mod_base = OTHER; note = 2'-O-methylguanosine-3'-phosphate
  modified_base 17: mod_base = OTHER; note = 2'-O-methyladenosine-3'-phosphate
  modified_base 18: mod_base = OTHER; note = 2'-O-methylguanosine-3'-phosphate
  modified_base 19: mod_base = OTHER; note = 2'-O-methylguanosine-3'-phosphate
  modified_base 20: mod_base = OTHER; note = 2'-O-methyladenosine-3'-phosphate
  modified_base 21: mod_base = OTHER; note = 2'-O-methyluridine-3'-phosphate N-[tris(GalNAc-alkyl)-amidodecanoyl)]-4-hydroxyprolinol (Hyp-(GalNAc-alkyl)3)
tggcactctttgcttgaggat

SEQ ID NO: 6741 - RNA, 21 nt, synthetic construct
  source 1..21: mol_type = other RNA
  modified_base 1: mod_base = OTHER; note = 2'-O-methylguanosine-3'-phosphorothioate
  modified_base 2: mod_base = OTHER; note = 2'-O-methylguanosine-3'-phosphorothioate
  modified_base 3: mod_base = OTHER; note = 2'-O-methylcytidine-3'-phosphate
  modified_base 4: mod_base = OTHER; note = 2'-O-methyladenosine-3'-phosphate
  modified_base 5: mod_base = OTHER; note = 2'-O-methylcytidine-3'-phosphate
  modified_base 6: mod_base = OTHER; note = 2'-O-methyluridine-3'-phosphate
  modified_base 7: mod_base = OTHER; note = 2'-O-methylcytidine-3'-phosphate
  modified_base 8: mod_base = OTHER; note = 2'-O-methyluridine-3'-phosphate
  modified_base 9: mod_base = OTHER; note = 2'-fluorouridine-3'-phosphate
  modified_base 10: mod_base = OTHER; note = 2'-fluorouridine-3'-phosphate
  modified_base 11: mod_base = OTHER; note = 2'-fluoroguanosine-3'-phosphate
  modified_base 12: mod_base = OTHER; note = 2'-O-methylcytidine-3'-phosphate
  modified_base 13: mod_base = OTHER; note = 2'-O-methyluridine-3'-phosphate
  modified_base 14: mod_base = OTHER; note = 2'-O-methyluridine-3'-phosphate
  modified_base 15: mod_base = OTHER; note = 2'-O-methylguanosine-3'-phosphate
  modified_base 16: mod_base = OTHER; note = 2'-O-methyladenosine-3'-phosphate
  modified_base 17: mod_base = OTHER; note = 2'-O-methylguanosine-3'-phosphate
  modified_base 18: mod_base = OTHER; note = 2'-O-methylguanosine-3'-phosphate
  modified_base 19: mod_base = OTHER; note = 2'-O-methyladenosine-3'-phosphate
  modified_base 20: mod_base = OTHER; note = 2'-O-methyluridine-3'-phosphate
  modified_base 21: mod_base = OTHER; note = 2'-O-methyluridine-3'-phosphate N-[tris(GalNAc-alkyl)-amidodecanoyl)]-4-hydroxyprolinol (Hyp-(GalNAc-alkyl)3)
ggcactctttgcttgaggatt

SEQ ID NO: 6742 - RNA, 21 nt, synthetic construct
  source 1..21: mol_type = other RNA
  modified_base 1: mod_base = OTHER; note = 2'-O-methylguanosine-3'-phosphorothioate
  modified_base 2: mod_base = OTHER; note = 2'-O-methylcytidine-3'-phosphorothioate
  modified_base 3: mod_base = OTHER; note = 2'-O-methyladenosine-3'-phosphate
  modified_base 4: mod_base = OTHER; note = 2'-O-methylcytidine-3'-phosphate
  modified_base 5: mod_base = OTHER; note = 2'-O-methyluridine-3'-phosphate
  modified_base 6: mod_base = OTHER; note = 2'-O-methylcytidine-3'-phosphate
  modified_base 7: mod_base = OTHER; note = 2'-O-methyluridine-3'-phosphate
  modified_base 8: mod_base = OTHER; note = 2'-O-methyluridine-3'-phosphate
  modified_base 9: mod_base = OTHER; note = 2'-fluorouridine-3'-phosphate
  modified_base 10: mod_base = OTHER; note = 2'-fluoroguanosine-3'-phosphate
  modified_base 11: mod_base = OTHER; note = 2'-fluorocytidine-3'-phosphate
  modified_base 12: mod_base = OTHER; note = 2'-O-methyluridine-3'-phosphate
  modified_base 13: mod_base = OTHER; note = 2'-O-methyluridine-3'-phosphate
  modified_base 14: mod_base = OTHER; note = 2'-O-methylguanosine-3'-phosphate
  modified_base 15: mod_base = OTHER; note = 2'-O-methyladenosine-3'-phosphate
  modified_base 16: mod_base = OTHER; note = 2'-O-methylguanosine-3'-phosphate
  modified_base 17: mod_base = OTHER; note = 2'-O-methylguanosine-3'-phosphate
  modified_base 18: mod_base = OTHER; note = 2'-O-methyladenosine-3'-phosphate
  modified_base 19: mod_base = OTHER; note = 2'-O-methyluridine-3'-phosphate
  modified_base 20: mod_base = OTHER; note = 2'-O-methylcytidine-3'-phosphate
  modified_base 21: mod_base = OTHER; note = 2'-O-methyluridine-3'-phosphate N-[tris(GalNAc-alkyl)-amidodecanoyl)]-4-hydroxyprolinol (Hyp-(GalNAc-alkyl)3)
gcactctttgcttgaggatct

SEQ ID NO: 6743 - RNA, 21 nt, synthetic construct
  source 1..21: mol_type = other RNA
  modified_base 1: mod_base = OTHER; note = 2'-O-methyladenosine-3'-phosphorothioate
  modified_base 2: mod_base = OTHER; note = 2'-O-methylcytidine-3'-phosphorothioate
  modified_base 3: mod_base = OTHER; note = 2'-O-methyluridine-3'-phosphate
  modified_base 4: mod_base = OTHER; note = 2'-O-methylcytidine-3'-phosphate
  modified_base 5: mod_base = OTHER; note = 2'-O-methyluridine-3'-phosphate
  modified_base 6: mod_base = OTHER; note = 2'-O-methyluridine-3'-phosphate
  modified_base 7: mod_base = OTHER; note = 2'-O-methyluridine-3'-phosphate
  modified_base 8: mod_base = OTHER; note = 2'-O-methylguanosine-3'-phosphate
  modified_base 9: mod_base = OTHER; note = 2'-fluorocytidine-3'-phosphate
  modified_base 10: mod_base = OTHER; note = 2'-fluorouridine-3'-phosphate
  modified_base 11: mod_base = OTHER; note = 2'-fluorouridine-3'-phosphate
  modified_base 12: mod_base = OTHER; note = 2'-O-methylguanosine-3'-phosphate
  modified_base 13: mod_base = OTHER; note = 2'-O-methyladenosine-3'-phosphate
  modified_base 14: mod_base = OTHER; note = 2'-O-methylguanosine-3'-phosphate
  modified_base 15: mod_base = OTHER; note = 2'-O-methylguanosine-3'-phosphate
  modified_base 16: mod_base = OTHER; note = 2'-O-methyladenosine-3'-phosphate
  modified_base 17: mod_base = OTHER; note = 2'-O-methyluridine-3'-phosphate
  modified_base 18: mod_base = OTHER; note = 2'-O-methylcytidine-3'-phosphate
  modified_base 19: mod_base = OTHER; note = 2'-O-methyluridine-3'-phosphate
  modified_base 20: mod_base = OTHER; note = 2'-O-methyluridine-3'-phosphate
  modified_base 21: mod_base = OTHER; note = 2'-O-methyluridine-3'-phosphate N-[tris(GalNAc-alkyl)-amidodecanoyl)]-4-hydroxyprolinol (Hyp-(GalNAc-alkyl)3)
actctttgcttgaggatcttt

SEQ ID NO: 6744 - RNA, 21 nt, synthetic construct
  source 1..21: mol_type = other RNA
  modified_base 1: mod_base = OTHER; note = 2'-O-methylcytidine-3'-phosphorothioate
  modified_base 2: mod_base = OTHER; note = 2'-O-methyluridine-3'-phosphorothioate
  modified_base 3: mod_base = OTHER; note = 2'-O-methylcytidine-3'-phosphate
  modified_base 4: mod_base = OTHER; note = 2'-O-methyluridine-3'-phosphate
  modified_base 5: mod_base = OTHER; note = 2'-O-methyluridine-3'-phosphate
  modified_base 6: mod_base = OTHER; note = 2'-O-methyluridine-3'-phosphate
  modified_base 7: mod_base = OTHER; note = 2'-O-methylguanosine-3'-phosphate
  modified_base 8: mod_base = OTHER; note = 2'-O-methylcytidine-3'-phosphate
  modified_base 9: mod_base = OTHER; note = 2'-fluorouridine-3'-phosphate
  modified_base 10: mod_base = OTHER; note = 2'-fluorouridine-3'-phosphate
  modified_base 11: mod_base = OTHER; note = 2'-fluoroguanosine-3'-phosphate
  modified_base 12: mod_base = OTHER; note = 2'-O-methyladenosine-3'-phosphate
  modified_base 13: mod_base = OTHER; note = 2'-O-methylguanosine-3'-phosphate
  modified_base 14: mod_base = OTHER; note = 2'-O-methylguanosine-3'-phosphate
  modified_base 15: mod_base = OTHER; note = 2'-O-methyladenosine-3'-phosphate
  modified_base 16: mod_base = OTHER; note = 2'-O-methyluridine-3'-phosphate
  modified_base 17: mod_base = OTHER; note = 2'-O-methylcytidine-3'-phosphate
  modified_base 18: mod_base = OTHER; note = 2'-O-methyluridine-3'-phosphate
  modified_base 19: mod_base = OTHER; note = 2'-O-methyluridine-3'-phosphate
  modified_base 20: mod_base = OTHER; note = 2'-O-methylcytidine-3'-phosphate
  modified_base 21: mod_base = OTHER; note = 2'-O-methyluridine-3'-phosphate N-[tris(GalNAc-alkyl)-amidodecanoyl)]-4-hydroxyprolinol (Hyp-(GalNAc-alkyl)3)
ctctttgcttgaggatcttct

SEQ ID NO: 6745 - RNA, 21 nt, synthetic construct
  source 1..21: mol_type = other RNA
  modified_base 1: mod_base = OTHER; note = 2'-O-methyluridine-3'-phosphorothioate
  modified_base 2: mod_base = OTHER; note = 2'-O-methylcytidine-3'-phosphorothioate
  modified_base 3: mod_base = OTHER; note = 2'-O-methyluridine-3'-phosphate
  modified_base 4: mod_base = OTHER; note = 2'-O-methyluridine-3'-phosphate
  modified_base 5: mod_base = OTHER; note = 2'-O-methyluridine-3'-phosphate
  modified_base 6: mod_base = OTHER; note = 2'-O-methylguanosine-3'-phosphate
  modified_base 7: mod_base = OTHER; note = 2'-O-methylcytidine-3'-phosphate
  modified_base 8: mod_base = OTHER; note = 2'-O-methyluridine-3'-phosphate
  modified_base 9: mod_base = OTHER; note = 2'-fluorouridine-3'-phosphate
  modified_base 10: mod_base = OTHER; note = 2'-fluoroguanosine-3'-phosphate
  modified_base 11: mod_base = OTHER; note = 2'-fluoroadenosine-3'-phosphate
  modified_base 12: mod_base = OTHER; note = 2'-O-methylguanosine-3'-phosphate
  modified_base 13: mod_base = OTHER; note = 2'-O-methylguanosine-3'-phosphate
  modified_base 14: mod_base = OTHER; note = 2'-O-methyladenosine-3'-phosphate
  modified_base 15: mod_base = OTHER; note = 2'-O-methyluridine-3'-phosphate
  modified_base 16: mod_base = OTHER; note = 2'-O-methylcytidine-3'-phosphate
  modified_base 17: mod_base = OTHER; note = 2'-O-methyluridine-3'-phosphate
  modified_base 18: mod_base = OTHER; note = 2'-O-methyluridine-3'-phosphate
  modified_base 19: mod_base = OTHER; note = 2'-O-methylcytidine-3'-phosphate
  modified_base 20: mod_base = OTHER; note = 2'-O-methylcytidine-3'-phosphate
  modified_base 21: mod_base = OTHER; note = 2'-O-methyluridine-3'-phosphate N-[tris(GalNAc-alkyl)-amidodecanoyl)]-4-hydroxyprolinol (Hyp-(GalNAc-alkyl)3)
tctttgcttgaggatcttcct

SEQ ID NO: 6746 - RNA, 21 nt, synthetic construct
  source 1..21: mol_type = other RNA
  modified_base 1: mod_base = OTHER; note = 2'-O-methylcytidine-3'-phosphorothioate
  modified_base 2: mod_base = OTHER; note = 2'-O-methyluridine-3'-phosphorothioate
  modified_base 3: mod_base = OTHER; note = 2'-O-methyluridine-3'-phosphate
  modified_base 4: mod_base = OTHER; note = 2'-O-methyluridine-3'-phosphate
  modified_base 5: mod_base = OTHER; note = 2'-O-methylguanosine-3'-phosphate
  modified_base 6: mod_base = OTHER; note = 2'-O-methylcytidine-3'-phosphate
  modified_base 7: mod_base = OTHER; note = 2'-O-methyluridine-3'-phosphate
  modified_base 8: mod_base = OTHER; note = 2'-O-methyluridine-3'-phosphate
  modified_base 9: mod_base = OTHER; note = 2'-fluoroguanosine-3'-phosphate
  modified_base 10: mod_base = OTHER; note = 2'-fluoroadenosine-3'-phosphate
  modified_base 11: mod_base = OTHER; note = 2'-fluoroguanosine-3'-phosphate
  modified_base 12: mod_base = OTHER; note = 2'-O-methylguanosine-3'-phosphate
  modified_base 13: mod_base = OTHER; note = 2'-O-methyladenosine-3'-phosphate
  modified_base 14: mod_base = OTHER; note = 2'-O-methyluridine-3'-phosphate
  modified_base 15: mod_base = OTHER; note = 2'-O-methylcytidine-3'-phosphate
  modified_base 16: mod_base = OTHER; note = 2'-O-methyluridine-3'-phosphate
  modified_base 17: mod_base = OTHER; note = 2'-O-methyluridine-3'-phosphate
  modified_base 18: mod_base = OTHER; note = 2'-O-methylcytidine-3'-phosphate
  modified_base 19: mod_base = OTHER; note = 2'-O-methylcytidine-3'-phosphate
  modified_base 20: mod_base = OTHER; note = 2'-O-methylguanosine-3'-phosphate
  modified_base 21: mod_base = OTHER; note = 2'-O-methyluridine-3'-phosphate N-[tris(GalNAc-alkyl)-amidodecanoyl)]-4-hydroxyprolinol (Hyp-(GalNAc-alkyl)3)
ctttgcttgaggatcttccgt

SEQ ID NO: 6747 - RNA, 21 nt, synthetic construct
  source 1..21: mol_type = other RNA
  modified_base 1: mod_base = OTHER; note = 2'-O-methyluridine-3'-phosphorothioate
  modified_base 2: mod_base = OTHER; note = 2'-O-methyluridine-3'-phosphorothioate
  modified_base 3: mod_base = OTHER; note = 2'-O-methyluridine-3'-phosphate
  modified_base 4: mod_base = OTHER; note = 2'-O-methylguanosine-3'-phosphate
  modified_base 5: mod_base = OTHER; note = 2'-O-methylcytidine-3'-phosphate
  modified_base 6: mod_base = OTHER; note = 2'-O-methyluridine-3'-phosphate
  modified_base 7: mod_base = OTHER; note = 2'-O-methyluridine-3'-phosphate
  modified_base 8: mod_base = OTHER; note = 2'-O-methylguanosine-3'-phosphate
  modified_base 9: mod_base = OTHER; note = 2'-fluoroadenosine-3'-phosphate
  modified_base 10: mod_base = OTHER; note = 2'-fluoroguanosine-3'-phosphate
  modified_base 11: mod_base = OTHER; note = 2'-fluoroguanosine-3'-phosphate
  modified_base 12: mod_base = OTHER; note = 2'-O-methyladenosine-3'-phosphate
  modified_base 13: mod_base = OTHER; note = 2'-O-methyluridine-3'-phosphate
  modified_base 14: mod_base = OTHER; note = 2'-O-methylcytidine-3'-phosphate
  modified_base 15: mod_base = OTHER; note = 2'-O-methyluridine-3'-phosphate
  modified_base 16: mod_base = OTHER; note = 2'-O-methyluridine-3'-phosphate
  modified_base 17: mod_base = OTHER; note = 2'-O-methylcytidine-3'-phosphate
  modified_base 18: mod_base = OTHER; note = 2'-O-methylcytidine-3'-phosphate
  modified_base 19: mod_base = OTHER; note = 2'-O-methylguanosine-3'-phosphate
  modified_base 20: mod_base = OTHER; note = 2'-O-methyladenosine-3'-phosphate
  modified_base 21: mod_base = OTHER; note = 2'-O-methyluridine-3'-phosphate N-[tris(GalNAc-alkyl)-amidodecanoyl)]-4-hydroxyprolinol (Hyp-(GalNAc-alkyl)3)
tttgcttgaggatcttccgat

SEQ ID NO: 6748 - RNA, 21 nt, synthetic construct
  source 1..21: mol_type = other RNA
  modified_base 1: mod_base = OTHER; note = 2'-O-methyluridine-3'-phosphorothioate
  modified_base 2: mod_base = OTHER; note = 2'-O-methyluridine-3'-phosphorothioate
  modified_base 3: mod_base = OTHER; note = 2'-O-methylguanosine-3'-phosphate
  modified_base 4: mod_base = OTHER; note = 2'-O-methylcytidine-3'-phosphate
  modified_base 5: mod_base = OTHER; note = 2'-O-methyluridine-3'-phosphate
  modified_base 6: mod_base = OTHER; note = 2'-O-methyluridine-3'-phosphate
  modified_base 7: mod_base = OTHER; note = 2'-O-methylguanosine-3'-phosphate
  modified_base 8: mod_base = OTHER; note = 2'-O-methyladenosine-3'-phosphate
  modified_base 9: mod_base = OTHER; note = 2'-fluoroguanosine-3'-phosphate
  modified_base 10: mod_base = OTHER; note = 2'-fluoroguanosine-3'-phosphate
  modified_base 11: mod_base = OTHER; note = 2'-fluoroadenosine-3'-phosphate
  modified_base 12: mod_base = OTHER; note = 2'-O-methyluridine-3'-phosphate
  modified_base 13: mod_base = OTHER; note = 2'-O-methylcytidine-3'-phosphate
  modified_base 14: mod_base = OTHER; note = 2'-O-methyluridine-3'-phosphate
  modified_base 15: mod_base = OTHER; note = 2'-O-methyluridine-3'-phosphate
  modified_base 16: mod_base = OTHER; note = 2'-O-methylcytidine-3'-phosphate
  modified_base 17: mod_base = OTHER; note = 2'-O-methylcytidine-3'-phosphate
  modified_base 18: mod_base = OTHER; note = 2'-O-methylguanosine-3'-phosphate
  modified_base 19: mod_base = OTHER; note = 2'-O-methyladenosine-3'-phosphate
  modified_base 20: mod_base = OTHER; note = 2'-O-methyluridine-3'-phosphate
  modified_base 21: mod_base = OTHER; note = 2'-O-methyluridine-3'-phosphate N-[tris(GalNAc-alkyl)-amidodecanoyl)]-4-hydroxyprolinol (Hyp-(GalNAc-alkyl)3)
ttgcttgaggatcttccgatt

SEQ ID NO: 6749 - RNA, 21 nt, synthetic construct
  source 1..21: mol_type = other RNA
  modified_base 1: mod_base = OTHER; note = 2'-O-methyluridine-3'-phosphorothioate
  modified_base 2: mod_base = OTHER; note = 2'-O-methylguanosine-3'-phosphorothioate
  modified_base 3: mod_base = OTHER; note = 2'-O-methylcytidine-3'-phosphate
  modified_base 4: mod_base = OTHER; note = 2'-O-methyluridine-3'-phosphate
  modified_base 5: mod_base = OTHER; note = 2'-O-methyluridine-3'-phosphate
  modified_base 6: mod_base = OTHER; note = 2'-O-methylguanosine-3'-phosphate
  modified_base 7: mod_base = OTHER; note = 2'-O-methyladenosine-3'-phosphate
  modified_base 8: mod_base = OTHER; note = 2'-O-methylguanosine-3'-phosphate
  modified_base 9: mod_base = OTHER; note = 2'-fluoroguanosine-3'-phosphate
  modified_base 10: mod_base = OTHER; note = 2'-fluoroadenosine-3'-phosphate
  modified_base 11: mod_base = OTHER; note = 2'-fluorouridine-3'-phosphate
  modified_base 12: mod_base = OTHER; note = 2'-O-methylcytidine-3'-phosphate
  modified_base 13: mod_base = OTHER; note = 2'-O-methyluridine-3'-phosphate
  modified_base 14: mod_base = OTHER; note = 2'-O-methyluridine-3'-phosphate
  modified_base 15: mod_base = OTHER; note = 2'-O-methylcytidine-3'-phosphate
  modified_base 16: mod_base = OTHER; note = 2'-O-methylcytidine-3'-phosphate
  modified_base 17: mod_base = OTHER; note = 2'-O-methylguanosine-3'-phosphate
  modified_base 18: mod_base = OTHER; note = 2'-O-methyladenosine-3'-phosphate
  modified_base 19: mod_base = OTHER; note = 2'-O-methyluridine-3'-phosphate
  modified_base 20: mod_base = OTHER; note = 2'-O-methylguanosine-3'-phosphate
  modified_base 21: mod_base = OTHER; note = 2'-O-methyluridine-3'-phosphate N-[tris(GalNAc-alkyl)-amidodecanoyl)]-4-hydroxyprolinol (Hyp-(GalNAc-alkyl)3)
tgcttgaggatcttccgatgt

SEQ ID NO: 6750 - RNA, 21 nt, synthetic construct
  source 1..21: mol_type = other RNA
  modified_base 1: mod_base = OTHER; note = 2'-O-methylguanosine-3'-phosphorothioate
  modified_base 2: mod_base = OTHER; note = 2'-O-methylcytidine-3'-phosphorothioate
  modified_base 3: mod_base = OTHER; note = 2'-O-methyluridine-3'-phosphate
  modified_base 4: mod_base = OTHER; note = 2'-O-methyluridine-3'-phosphate
  modified_base 5: mod_base = OTHER; note = 2'-O-methylguanosine-3'-phosphate
  modified_base 6: mod_base = OTHER; note = 2'-O-methyladenosine-3'-phosphate
  modified_base 7: mod_base = OTHER; note = 2'-O-methylguanosine-3'-phosphate
  modified_base 8: mod_base = OTHER; note = 2'-O-methylguanosine-3'-phosphate
  modified_base 9: mod_base = OTHER; note = 2'-fluoroadenosine-3'-phosphate
  modified_base 10: mod_base = OTHER; note = 2'-fluorouridine-3'-phosphate
  modified_base 11: mod_base = OTHER; note = 2'-fluorocytidine-3'-phosphate
  modified_base 12: mod_base = OTHER; note = 2'-O-methyluridine-3'-phosphate
  modified_base 13: mod_base = OTHER; note = 2'-O-methyluridine-3'-phosphate
  modified_base 14: mod_base = OTHER; note = 2'-O-methylcytidine-3'-phosphate
  modified_base 15: mod_base = OTHER; note = 2'-O-methylcytidine-3'-phosphate
  modified_base 16: mod_base = OTHER; note = 2'-O-methylguanosine-3'-phosphate
  modified_base 17: mod_base = OTHER; note = 2'-O-methyladenosine-3'-phosphate
  modified_base 18: mod_base = OTHER; note = 2'-O-methyluridine-3'-phosphate
  modified_base 19: mod_base = OTHER; note = 2'-O-methylguanosine-3'-phosphate
  modified_base 20: mod_base = OTHER; note = 2'-O-methylguanosine-3'-phosphate
  modified_base 21: mod_base = OTHER; note = 2'-O-methyluridine-3'-phosphate N-[tris(GalNAc-alkyl)-amidodecanoyl)]-4-hydroxyprolinol (Hyp-(GalNAc-alkyl)3)
gcttgaggatcttccgatggt

SEQ ID NO: 6751 - RNA, 21 nt, synthetic construct
  source 1..21: mol_type = other RNA
  modified_base 1: mod_base = OTHER; note = 2'-O-methylcytidine-3'-phosphorothioate
  modified_base 2: mod_base = OTHER; note = 2'-O-methyluridine-3'-phosphorothioate
  modified_base 3: mod_base = OTHER; note = 2'-O-methylguanosine-3'-phosphate
  modified_base 4: mod_base = OTHER; note = 2'-O-methylguanosine-3'-phosphate
  modified_base 5: mod_base = OTHER; note = 2'-O-methylcytidine-3'-phosphate
  modified_base 6: mod_base = OTHER; note = 2'-O-methyluridine-3'-phosphate
  modified_base 7: mod_base = OTHER; note = 2'-O-methylguanosine-3'-phosphate
  modified_base 8: mod_base = OTHER; note = 2'-O-methyladenosine-3'-phosphate
  modified_base 9: mod_base = OTHER; note = 2'-fluoroguanosine-3'-phosphate
  modified_base 10: mod_base = OTHER; note = 2'-fluorocytidine-3'-phosphate
  modified_base 11: mod_base = OTHER; note = 2'-fluoroadenosine-3'-phosphate
  modified_base 12: mod_base = OTHER; note = 2'-O-methylcytidine-3'-phosphate
  modified_base 13: mod_base = OTHER; note = 2'-O-methylcytidine-3'-phosphate
  modified_base 14: mod_base = OTHER; note = 2'-O-methyladenosine-3'-phosphate
  modified_base 15: mod_base = OTHER; note = 2'-O-methylcytidine-3'-phosphate
  modified_base 16: mod_base = OTHER; note = 2'-O-methyladenosine-3'-phosphate
  modified_base 17: mod_base = OTHER; note = 2'-O-methyluridine-3'-phosphate
  modified_base 18: mod_base = OTHER; note = 2'-O-methylcytidine-3'-phosphate
  modified_base 19: mod_base = OTHER; note = 2'-O-methyladenosine-3'-phosphate
  modified_base 20: mod_base = OTHER; note = 2'-O-methylcytidine-3'-phosphate
  modified_base 21: mod_base = OTHER; note = 2'-O-methyluridine-3'-phosphate N-[tris(GalNAc-alkyl)-amidodecanoyl)]-4-hydroxyprolinol (Hyp-(GalNAc-alkyl)3)
ctggctgagcaccacatcact

SEQ ID NO: 6752 - RNA, 21 nt, synthetic construct
  source 1..21: mol_type = other RNA
  modified_base 1: mod_base = OTHER; note = 2'-O-methyluridine-3'-phosphorothioate
  modified_base 2: mod_base = OTHER; note = 2'-O-methylguanosine-3'-phosphorothioate
  modified_base 3: mod_base = OTHER; note = 2'-O-methylguanosine-3'-phosphate
  modified_base 4: mod_base = OTHER; note = 2'-O-methylcytidine-3'-phosphate
  modified_base 5: mod_base = OTHER; note = 2'-O-methyluridine-3'-phosphate
  modified_base 6: mod_base = OTHER; note = 2'-O-methylguanosine-3'-phosphate
  modified_base 7: mod_base = OTHER; note = 2'-O-methyladenosine-3'-phosphate
  modified_base 8: mod_base = OTHER; note = 2'-O-methylguanosine-3'-phosphate
  modified_base 9: mod_base = OTHER; note = 2'-fluorocytidine-3'-phosphate
  modified_base 10: mod_base = OTHER; note = 2'-fluoroadenosine-3'-phosphate
  modified_base 11: mod_base = OTHER; note = 2'-fluorocytidine-3'-phosphate
  modified_base 12: mod_base = OTHER; note = 2'-O-methylcytidine-3'-phosphate
  modified_base 13: mod_base = OTHER; note = 2'-O-methyladenosine-3'-phosphate
  modified_base 14: mod_base = OTHER; note = 2'-O-methylcytidine-3'-phosphate
  modified_base 15: mod_base = OTHER; note = 2'-O-methyladenosine-3'-phosphate
  modified_base 16: mod_base = OTHER; note = 2'-O-methyluridine-3'-phosphate
  modified_base 17: mod_base = OTHER; note = 2'-O-methylcytidine-3'-phosphate
  modified_base 18: mod_base = OTHER; note = 2'-O-methyladenosine-3'-phosphate
  modified_base 19: mod_base = OTHER; note = 2'-O-methylcytidine-3'-phosphate
  modified_base 20: mod_base = OTHER; note = 2'-O-methylcytidine-3'-phosphate
  modified_base 21: mod_base = OTHER; note = 2'-O-methyluridine-3'-phosphate N-[tris(GalNAc-alkyl)-amidodecanoyl)]-4-hydroxyprolinol (Hyp-(GalNAc-alkyl)3)
tggctgagcaccacatcacct

SEQ ID NO: 6753 - RNA, 21 nt, synthetic construct
  source 1..21: mol_type = other RNA
  modified_base 1: mod_base = OTHER; note = 2'-O-methylguanosine-3'-phosphorothioate
  modified_base 2: mod_base = OTHER; note = 2'-O-methylguanosine-3'-phosphorothioate
  modified_base 3: mod_base = OTHER; note = 2'-O-methylcytidine-3'-phosphate
  modified_base 4: mod_base = OTHER; note = 2'-O-methyluridine-3'-phosphate
  modified_base 5: mod_base = OTHER; note = 2'-O-methylguanosine-3'-phosphate
  modified_base 6: mod_base = OTHER; note = 2'-O-methyladenosine-3'-phosphate
  modified_base 7: mod_base = OTHER; note = 2'-O-methylguanosine-3'-phosphate
  modified_base 8: mod_base = OTHER; note = 2'-O-methylcytidine-3'-phosphate
  modified_base 9: mod_base = OTHER; note = 2'-fluoroadenosine-3'-phosphate
  modified_base 10: mod_base = OTHER; note = 2'-fluorocytidine-3'-phosphate
  modified_base 11: mod_base = OTHER; note = 2'-fluorocytidine-3'-phosphate
  modified_base 12: mod_base = OTHER; note = 2'-O-methyladenosine-3'-phosphate
  modified_base 13: mod_base = OTHER; note = 2'-O-methylcytidine-3'-phosphate
  modified_base 14: mod_base = OTHER; note = 2'-O-methyladenosine-3'-phosphate
  modified_base 15: mod_base = OTHER; note = 2'-O-methyluridine-3'-phosphate
  modified_base 16: mod_base = OTHER; note = 2'-O-methylcytidine-3'-phosphate
  modified_base 17: mod_base = OTHER; note = 2'-O-methyladenosine-3'-phosphate
  modified_base 18: mod_base = OTHER; note = 2'-O-methylcytidine-3'-phosphate
  modified_base 19: mod_base = OTHER; note = 2'-O-methylcytidine-3'-phosphate
  modified_base 20: mod_base = OTHER; note = 2'-O-methyladenosine-3'-phosphate
  modified_base 21: mod_base = OTHER; note = 2'-O-methyluridine-3'-phosphate N-[tris(GalNAc-alkyl)-amidodecanoyl)]-4-hydroxyprolinol (Hyp-(GalNAc-alkyl)3)
ggctgagcaccacatcaccat

SEQ ID NO: 6754 - RNA, 21 nt, synthetic construct
  source 1..21: mol_type = other RNA
  modified_base 1: mod_base = OTHER; note = 2'-O-methylguanosine-3'-phosphorothioate
  modified_base 2: mod_base = OTHER; note = 2'-O-methylcytidine-3'-phosphorothioate
  modified_base 3: mod_base = OTHER; note = 2'-O-methyluridine-3'-phosphate
  modified_base 4: mod_base = OTHER; note = 2'-O-methylguanosine-3'-phosphate
  modified_base 5: mod_base = OTHER; note = 2'-O-methyladenosine-3'-phosphate
  modified_base 6: mod_base = OTHER; note = 2'-O-methylguanosine-3'-phosphate
  modified_base 7: mod_base = OTHER; note = 2'-O-methylcytidine-3'-phosphate
  modified_base 8: mod_base = OTHER; note = 2'-O-methyladenosine-3'-phosphate
  modified_base 9: mod_base = OTHER; note = 2'-fluorocytidine-3'-phosphate
  modified_base 10: mod_base = OTHER; note = 2'-fluorocytidine-3'-phosphate
  modified_base 11: mod_base = OTHER; note = 2'-fluoroadenosine-3'-phosphate
  modified_base 12: mod_base = OTHER; note = 2'-O-methylcytidine-3'-phosphate
  modified_base 13: mod_base = OTHER; note = 2'-O-methyladenosine-3'-phosphate
  modified_base 14: mod_base = OTHER; note = 2'-O-methyluridine-3'-phosphate
  modified_base 15: mod_base = OTHER; note = 2'-O-methylcytidine-3'-phosphate
  modified_base 16: mod_base = OTHER; note = 2'-O-methyladenosine-3'-phosphate
  modified_base 17: mod_base = OTHER; note = 2'-O-methylcytidine-3'-phosphate
  modified_base 18: mod_base = OTHER; note = 2'-O-methylcytidine-3'-phosphate
  modified_base 19: mod_base = OTHER; note = 2'-O-methyladenosine-3'-phosphate
  modified_base 20: mod_base = OTHER; note = 2'-O-methyladenosine-3'-phosphate
  modified_base 21: mod_base = OTHER; note = 2'-O-methyluridine-3'-phosphate N-[tris(GalNAc-alkyl)-amidodecanoyl)]-4-hydroxyprolinol (Hyp-(GalNAc-alkyl)3)
gctgagcaccacatcaccaat

SEQ ID NO: 6755 - RNA, 21 nt, synthetic construct
  source 1..21: mol_type = other RNA
  modified_base 1: mod_base = OTHER; note = 2'-O-methylcytidine-3'-phosphorothioate
  modified_base 2: mod_base = OTHER; note = 2'-O-methyluridine-3'-phosphorothioate
  modified_base 3: mod_base = OTHER; note = 2'-O-methylguanosine-3'-phosphate
  modified_base 4: mod_base = OTHER; note = 2'-O-methyladenosine-3'-phosphate
  modified_base 5: mod_base = OTHER; note = 2'-O-methylguanosine-3'-phosphate
  modified_base 6: mod_base = OTHER; note = 2'-O-methylcytidine-3'-phosphate
  modified_base 7: mod_base = OTHER; note = 2'-O-methyladenosine-3'-phosphate
  modified_base 8: mod_base = OTHER; note = 2'-O-methylcytidine-3'-phosphate
  modified_base 9: mod_base = OTHER; note = 2'-fluorocytidine-3'-phosphate
  modified_base 10: mod_base = OTHER; note = 2'-fluoroadenosine-3'-phosphate
  modified_base 11: mod_base = OTHER; note = 2'-fluorocytidine-3'-phosphate
  modified_base 12: mod_base = OTHER; note = 2'-O-methyladenosine-3'-phosphate
  modified_base 13: mod_base = OTHER; note = 2'-O-methyluridine-3'-phosphate
  modified_base 14: mod_base = OTHER; note = 2'-O-methylcytidine-3'-phosphate
  modified_base 15: mod_base = OTHER; note = 2'-O-methyladenosine-3'-phosphate
  modified_base 16: mod_base = OTHER; note = 2'-O-methylcytidine-3'-phosphate
  modified_base 17: mod_base = OTHER; note = 2'-O-methylcytidine-3'-phosphate
  modified_base 18: mod_base = OTHER; note = 2'-O-methyladenosine-3'-phosphate
  modified_base 19: mod_base = OTHER; note = 2'-O-methyladenosine-3'-phosphate
  modified_base 20: mod_base = OTHER; note = 2'-O-methylcytidine-3'-phosphate
  modified_base 21: mod_base = OTHER; note = 2'-O-methyluridine-3'-phosphate N-[tris(GalNAc-alkyl)-amidodecanoyl)]-4-hydroxyprolinol (Hyp-(GalNAc-alkyl)3)
ctgagcaccacatcaccaact

SEQ ID NO: 6756 - RNA, 21 nt, synthetic construct
  source 1..21: mol_type = other RNA
  modified_base 1: mod_base = OTHER; note = 2'-O-methyluridine-3'-phosphorothioate
  modified_base 2: mod_base = OTHER; note = 2'-O-methylguanosine-3'-phosphorothioate
  modified_base 3: mod_base = OTHER; note = 2'-O-methyladenosine-3'-phosphate
  modified_base 4: mod_base = OTHER; note = 2'-O-methylguanosine-3'-phosphate
  modified_base 5: mod_base = OTHER; note = 2'-O-methylcytidine-3'-phosphate
  modified_base 6: mod_base = OTHER; note = 2'-O-methyladenosine-3'-phosphate
  modified_base 7: mod_base = OTHER; note = 2'-O-methylcytidine-3'-phosphate
  modified_base 8: mod_base = OTHER; note = 2'-O-methylcytidine-3'-phosphate
  modified_base 9: mod_base = OTHER; note = 2'-fluoroadenosine-3'-phosphate
  modified_base 10: mod_base = OTHER; note = 2'-fluorocytidine-3'-phosphate
  modified_base 11: mod_base = OTHER; note = 2'-fluoroadenosine-3'-phosphate
  modified_base 12: mod_base = OTHER; note = 2'-O-methyluridine-3'-phosphate
  modified_base 13: mod_base = OTHER; note = 2'-O-methylcytidine-3'-phosphate
  modified_base 14: mod_base = OTHER; note = 2'-O-methyladenosine-3'-phosphate
  modified_base 15: mod_base = OTHER; note = 2'-O-methylcytidine-3'-phosphate
  modified_base 16: mod_base = OTHER; note = 2'-O-methylcytidine-3'-phosphate
  modified_base 17: mod_base = OTHER; note = 2'-O-methyladenosine-3'-phosphate
  modified_base 18: mod_base = OTHER; note = 2'-O-methyladenosine-3'-phosphate
  modified_base 19: mod_base = OTHER; note = 2'-O-methylcytidine-3'-phosphate
  modified_base 20: mod_base = OTHER; note = 2'-O-methylcytidine-3'-phosphate
  modified_base 21: mod_base = OTHER; note = 2'-O-methyluridine-3'-phosphate N-[tris(GalNAc-alkyl)-amidodecanoyl)]-4-hydroxyprolinol (Hyp-(GalNAc-alkyl)3)
tgagcaccacatcaccaacct

SEQ ID NO: 6757 - RNA, 21 nt, synthetic construct
  source 1..21: mol_type = other RNA
  modified_base 1: mod_base = OTHER; note = 2'-O-methylguanosine-3'-phosphorothioate
  modified_base 2: mod_base = OTHER; note = 2'-O-methyladenosine-3'-phosphorothioate
  modified_base 3: mod_base = OTHER; note = 2'-O-methylguanosine-3'-phosphate
  modified_base 4: mod_base = OTHER; note = 2'-O-methylcytidine-3'-phosphate
  modified_base 5: mod_base = OTHER; note = 2'-O-methyladenosine-3'-phosphate
  modified_base 6: mod_base = OTHER; note = 2'-O-methylcytidine-3'-phosphate
  modified_base 7: mod_base = OTHER; note = 2'-O-methylcytidine-3'-phosphate
  modified_base 8: mod_base = OTHER; note = 2'-O-methyladenosine-3'-phosphate
  modified_base 9: mod_base = OTHER; note = 2'-fluorocytidine-3'-phosphate
  modified_base 10: mod_base = OTHER; note = 2'-fluoroadenosine-3'-phosphate
  modified_base 11: mod_base = OTHER; note = 2'-fluorouridine-3'-phosphate
  modified_base 12: mod_base = OTHER; note = 2'-O-methylcytidine-3'-phosphate
  modified_base 13: mod_base = OTHER; note = 2'-O-methyladenosine-3'-phosphate
  modified_base 14: mod_base = OTHER; note = 2'-O-methylcytidine-3'-phosphate
  modified_base 15: mod_base = OTHER; note = 2'-O-methylcytidine-3'-phosphate
  modified_base 16: mod_base = OTHER; note = 2'-O-methyladenosine-3'-phosphate
  modified_base 17: mod_base = OTHER; note = 2'-O-methyladenosine-3'-phosphate
  modified_base 18: mod_base = OTHER; note = 2'-O-methylcytidine-3'-phosphate
  modified_base 19: mod_base = OTHER; note = 2'-O-methylcytidine-3'-phosphate
  modified_base 20: mod_base = OTHER; note = 2'-O-methyluridine-3'-phosphate
  modified_base 21: mod_base = OTHER; note = 2'-O-methyluridine-3'-phosphate N-[tris(GalNAc-alkyl)-amidodecanoyl)]-4-hydroxyprolinol (Hyp-(GalNAc-alkyl)3)
gagcaccacatcaccaacctt

SEQ ID NO: 6758 - RNA, 21 nt, synthetic construct
  source 1..21: mol_type = other RNA
  modified_base 1: mod_base = OTHER; note = 2'-O-methyladenosine-3'-phosphorothioate
  modified_base 2: mod_base = OTHER; note = 2'-O-methylguanosine-3'-phosphorothioate
  modified_base 3: mod_base = OTHER; note = 2'-O-methylcytidine-3'-phosphate
  modified_base 4: mod_base = OTHER; note = 2'-O-methyladenosine-3'-phosphate
  modified_base 5: mod_base = OTHER; note = 2'-O-methylcytidine-3'-phosphate
  modified_base 6: mod_base = OTHER; note = 2'-O-methylcytidine-3'-phosphate
  modified_base 7: mod_base = OTHER; note = 2'-O-methyladenosine-3'-phosphate
  modified_base 8: mod_base = OTHER; note = 2'-O-methylcytidine-3'-phosphate
  modified_base 9: mod_base = OTHER; note = 2'-fluoroadenosine-3'-phosphate
  modified_base 10: mod_base = OTHER; note = 2'-fluorouridine-3'-phosphate
  modified_base 11: mod_base = OTHER; note = 2'-fluorocytidine-3'-phosphate
  modified_base 12: mod_base = OTHER; note = 2'-O-methyladenosine-3'-phosphate
  modified_base 13: mod_base = OTHER; note = 2'-O-methylcytidine-3'-phosphate
  modified_base 14: mod_base = OTHER; note = 2'-O-methylcytidine-3'-phosphate
  modified_base 15: mod_base = OTHER; note = 2'-O-methyladenosine-3'-phosphate
  modified_base 16: mod_base = OTHER; note = 2'-O-methyladenosine-3'-phosphate
  modified_base 17: mod_base = OTHER; note = 2'-O-methylcytidine-3'-phosphate
  modified_base 18: mod_base = OTHER; note = 2'-O-methylcytidine-3'-phosphate
  modified_base 19: mod_base = OTHER; note = 2'-O-methyluridine-3'-phosphate
  modified_base 20: mod_base = OTHER; note = 2'-O-methylguanosine-3'-phosphate
  modified_base 21: mod_base = OTHER; note = 2'-O-methyluridine-3'-phosphate N-[tris(GalNAc-alkyl)-amidodecanoyl)]-4-hydroxyprolinol (Hyp-(GalNAc-alkyl)3)
agcaccacatcaccaacctgt

SEQ ID NO: 6759 - RNA, 21 nt, synthetic construct
  source 1..21: mol_type = other RNA
  modified_base 1: mod_base = OTHER; note = 2'-O-methylguanosine-3'-phosphorothioate
  modified_base 2: mod_base = OTHER; note = 2'-O-methylcytidine-3'-phosphorothioate
  modified_base 3: mod_base = OTHER; note = 2'-O-methyladenosine-3'-phosphate
  modified_base 4: mod_base = OTHER; note = 2'-O-methylcytidine-3'-phosphate
  modified_base 5: mod_base = OTHER; note = 2'-O-methylcytidine-3'-phosphate
  modified_base 6: mod_base = OTHER; note = 2'-O-methyladenosine-3'-phosphate
  modified_base 7: mod_base = OTHER; note = 2'-O-methylcytidine-3'-phosphate
  modified_base 8: mod_base = OTHER; note = 2'-O-methyladenosine-3'-phosphate
  modified_base 9: mod_base = OTHER; note = 2'-fluorouridine-3'-phosphate
  modified_base 10: mod_base = OTHER; note = 2'-fluorocytidine-3'-phosphate
  modified_base 11: mod_base = OTHER; note = 2'-fluoroadenosine-3'-phosphate
  modified_base 12: mod_base = OTHER; note = 2'-O-methylcytidine-3'-phosphate
  modified_base 13: mod_base = OTHER; note = 2'-O-methylcytidine-3'-phosphate
  modified_base 14: mod_base = OTHER; note = 2'-O-methyladenosine-3'-phosphate
  modified_base 15: mod_base = OTHER; note = 2'-O-methyladenosine-3'-phosphate
  modified_base 16: mod_base = OTHER; note = 2'-O-methylcytidine-3'-phosphate
  modified_base 17: mod_base = OTHER; note = 2'-O-methylcytidine-3'-phosphate
  modified_base 18: mod_base = OTHER; note = 2'-O-methyluridine-3'-phosphate
  modified_base 19: mod_base = OTHER; note = 2'-O-methylguanosine-3'-phosphate
  modified_base 20: mod_base = OTHER; note = 2'-O-methylguanosine-3'-phosphate
  modified_base 21: mod_base = OTHER; note = 2'-O-methyluridine-3'-phosphate N-[tris(GalNAc-alkyl)-amidodecanoyl)]-4-hydroxyprolinol (Hyp-(GalNAc-alkyl)3)
gcaccacatcaccaacctggt

SEQ ID NO: 6760 - RNA, 21 nt, synthetic construct
  source 1..21: mol_type = other RNA
  modified_base 1: mod_base = OTHER; note = 2'-O-methylcytidine-3'-phosphorothioate
  modified_base 2: mod_base = OTHER; note = 2'-O-methylcytidine-3'-phosphorothioate
  modified_base 3: mod_base = OTHER; note = 2'-O-methyladenosine-3'-phosphate
  modified_base 4: mod_base = OTHER; note = 2'-O-methylcytidine-3'-phosphate
  modified_base 5: mod_base = OTHER; note = 2'-O-methyladenosine-3'-phosphate
  modified_base 6: mod_base = OTHER; note = 2'-O-methyluridine-3'-phosphate
  modified_base 7: mod_base = OTHER; note = 2'-O-methylcytidine-3'-phosphate
  modified_base 8: mod_base = OTHER; note = 2'-O-methyladenosine-3'-phosphate
  modified_base 9: mod_base = OTHER; note = 2'-fluorocytidine-3'-phosphate
  modified_base 10: mod_base = OTHER; note = 2'-fluorocytidine-3'-phosphate
  modified_base 11: mod_base = OTHER; note = 2'-fluoroadenosine-3'-phosphate
  modified_base 12: mod_base = OTHER; note = 2'-O-methyladenosine-3'-phosphate
  modified_base 13: mod_base = OTHER; note = 2'-O-methylcytidine-3'-phosphate
  modified_base 14: mod_base = OTHER; note = 2'-O-methylcytidine-3'-phosphate
  modified_base 15: mod_base = OTHER; note = 2'-O-methyluridine-3'-phosphate
  modified_base 16: mod_base = OTHER; note = 2'-O-methylguanosine-3'-phosphate
  modified_base 17: mod_base = OTHER; note = 2'-O-methylguanosine-3'-phosphate
  modified_base 18: mod_base = OTHER; note = 2'-O-methylguanosine-3'-phosphate
  modified_base 19: mod_base = OTHER; note = 2'-O-methylcytidine-3'-phosphate
  modified_base 20: mod_base = OTHER; note = 2'-O-methyluridine-3'-phosphate
  modified_base 21: mod_base = OTHER; note = 2'-O-methyluridine-3'-phosphate N-[tris(GalNAc-alkyl)-amidodecanoyl)]-4-hydroxyprolinol (Hyp-(GalNAc-alkyl)3)
ccacatcaccaacctgggctt

SEQ ID NO: 6761 - RNA, 21 nt, synthetic construct
  source 1..21: mol_type = other RNA
  modified_base 1: mod_base = OTHER; note = 2'-O-methylcytidine-3'-phosphorothioate
  modified_base 2: mod_base = OTHER; note = 2'-O-methyladenosine-3'-phosphorothioate
  modified_base 3: mod_base = OTHER; note = 2'-O-methylcytidine-3'-phosphate
  modified_base 4: mod_base = OTHER; note = 2'-O-methyladenosine-3'-phosphate
  modified_base 5: mod_base = OTHER; note = 2'-O-methyluridine-3'-phosphate
  modified_base 6: mod_base = OTHER; note = 2'-O-methylcytidine-3'-phosphate
  modified_base 7: mod_base = OTHER; note = 2'-O-methyladenosine-3'-phosphate
  modified_base 8: mod_base = OTHER; note = 2'-O-methylcytidine-3'-phosphate
  modified_base 9: mod_base = OTHER; note = 2'-fluorocytidine-3'-phosphate
  modified_base 10: mod_base = OTHER; note = 2'-fluoroadenosine-3'-phosphate
  modified_base 11: mod_base = OTHER; note = 2'-fluoroadenosine-3'-phosphate
  modified_base 12: mod_base = OTHER; note = 2'-O-methylcytidine-3'-phosphate
  modified_base 13: mod_base = OTHER; note = 2'-O-methylcytidine-3'-phosphate
  modified_base 14: mod_base = OTHER; note = 2'-O-methyluridine-3'-phosphate
  modified_base 15: mod_base = OTHER; note = 2'-O-methylguanosine-3'-phosphate
  modified_base 16: mod_base = OTHER; note = 2'-O-methylguanosine-3'-phosphate
  modified_base 17: mod_base = OTHER; note = 2'-O-methylguanosine-3'-phosphate
  modified_base 18: mod_base = OTHER; note = 2'-O-methylcytidine-3'-phosphate
  modified_base 19: mod_base = OTHER; note = 2'-O-methyluridine-3'-phosphate
  modified_base 20: mod_base = OTHER; note = 2'-O-methylguanosine-3'-phosphate
  modified_base 21: mod_base = OTHER; note = 2'-O-methyluridine-3'-phosphate N-[tris(GalNAc-alkyl)-amidodecanoyl)]-4-hydroxyprolinol (Hyp-(GalNAc-alkyl)3)
cacatcaccaacctgggctgt

SEQ ID NO: 6762 - RNA, 21 nt, synthetic construct
  source 1..21: mol_type = other RNA
  modified_base 1: mod_base = OTHER; note = 2'-O-methyladenosine-3'-phosphorothioate
  modified_base 2: mod_base = OTHER; note = 2'-O-methylcytidine-3'-phosphorothioate
  modified_base 3: mod_base = OTHER; note = 2'-O-methyladenosine-3'-phosphate
  modified_base 4: mod_base = OTHER; note = 2'-O-methyluridine-3'-phosphate
  modified_base 5: mod_base = OTHER; note = 2'-O-methylcytidine-3'-phosphate
  modified_base 6: mod_base = OTHER; note = 2'-O-methyladenosine-3'-phosphate
  modified_base 7: mod_base = OTHER; note = 2'-O-methylcytidine-3'-phosphate
  modified_base 8: mod_base = OTHER; note = 2'-O-methylcytidine-3'-phosphate
  modified_base 9: mod_base = OTHER; note = 2'-fluoroadenosine-3'-phosphate
  modified_base 10: mod_base = OTHER; note = 2'-fluoroadenosine-3'-phosphate
  modified_base 11: mod_base = OTHER; note = 2'-fluorocytidine-3'-phosphate
  modified_base 12: mod_base = OTHER; note = 2'-O-methylcytidine-3'-phosphate
  modified_base 13: mod_base = OTHER; note = 2'-O-methyluridine-3'-phosphate
  modified_base 14: mod_base = OTHER; note = 2'-O-methylguanosine-3'-phosphate
  modified_base 15: mod_base = OTHER; note = 2'-O-methylguanosine-3'-phosphate
  modified_base 16: mod_base = OTHER; note = 2'-O-methylguanosine-3'-phosphate
  modified_base 17: mod_base = OTHER; note = 2'-O-methylcytidine-3'-phosphate
  modified_base 18: mod_base = OTHER; note = 2'-O-methyluridine-3'-phosphate
  modified_base 19: mod_base = OTHER; note = 2'-O-methylguanosine-3'-phosphate
  modified_base 20: mod_base = OTHER; note = 2'-O-methylguanosine-3'-phosphate
  modified_base 21: mod_base = OTHER; note = 2'-O-methyluridine-3'-phosphate N-[tris(GalNAc-alkyl)-amidodecanoyl)]-4-hydroxyprolinol (Hyp-(GalNAc-alkyl)3)
acatcaccaacctgggctggt

SEQ ID NO: 6763 - RNA, 21 nt, synthetic construct
  source 1..21: mol_type = other RNA
  modified_base 1: mod_base = OTHER; note = 2'-O-methyladenosine-3'-phosphorothioate
  modified_base 2: mod_base = OTHER; note = 2'-O-methyluridine-3'-phosphorothioate
  modified_base 3: mod_base = OTHER; note = 2'-O-methylcytidine-3'-phosphate
  modified_base 4: mod_base = OTHER; note = 2'-O-methyladenosine-3'-phosphate
  modified_base 5: mod_base = OTHER; note = 2'-O-methylcytidine-3'-phosphate
  modified_base 6: mod_base = OTHER; note = 2'-O-methylcytidine-3'-phosphate
  modified_base 7: mod_base = OTHER; note = 2'-O-methyladenosine-3'-phosphate
  modified_base 8: mod_base = OTHER; note = 2'-O-methyladenosine-3'-phosphate
  modified_base 9: mod_base = OTHER; note = 2'-fluorocytidine-3'-phosphate
  modified_base 10: mod_base = OTHER; note = 2'-fluorocytidine-3'-phosphate
  modified_base 11: mod_base = OTHER; note = 2'-fluorouridine-3'-phosphate
  modified_base 12: mod_base = OTHER; note = 2'-O-methylguanosine-3'-phosphate
  modified_base 13: mod_base = OTHER; note = 2'-O-methylguanosine-3'-phosphate
  modified_base 14: mod_base = OTHER; note = 2'-O-methylguanosine-3'-phosphate
  modified_base 15: mod_base = OTHER; note = 2'-O-methylcytidine-3'-phosphate
  modified_base 16: mod_base = OTHER; note = 2'-O-methyluridine-3'-phosphate
  modified_base 17: mod_base = OTHER; note = 2'-O-methylguanosine-3'-phosphate
  modified_base 18: mod_base = OTHER; note = 2'-O-methylguanosine-3'-phosphate
  modified_base 19: mod_base = OTHER; note = 2'-O-methylcytidine-3'-phosphate
  modified_base 20: mod_base = OTHER; note = 2'-O-methyladenosine-3'-phosphate
  modified_base 21: mod_base = OTHER; note = 2'-O-methyluridine-3'-phosphate N-[tris(GalNAc-alkyl)-amidodecanoyl)]-4-hydroxyprolinol (Hyp-(GalNAc-alkyl)3)
atcaccaacctgggctggcat

SEQ ID NO: 6764 - RNA, 21 nt, synthetic construct
  source 1..21: mol_type = other RNA
  modified_base 1: mod_base = OTHER; note = 2'-O-methyluridine-3'-phosphorothioate
  modified_base 2: mod_base = OTHER; note = 2'-O-methylcytidine-3'-phosphorothioate
  modified_base 3: mod_base = OTHER; note = 2'-O-methyladenosine-3'-phosphate
  modified_base 4: mod_base = OTHER; note = 2'-O-methylcytidine-3'-phosphate
  modified_base 5: mod_base = OTHER; note = 2'-O-methylcytidine-3'-phosphate
  modified_base 6: mod_base = OTHER; note = 2'-O-methyladenosine-3'-phosphate
  modified_base 7: mod_base = OTHER; note = 2'-O-methyladenosine-3'-phosphate
  modified_base 8: mod_base = OTHER; note = 2'-O-methylcytidine-3'-phosphate
  modified_base 9: mod_base = OTHER; note = 2'-fluorocytidine-3'-phosphate
  modified_base 10: mod_base = OTHER; note = 2'-fluorouridine-3'-phosphate
  modified_base 11: mod_base = OTHER; note = 2'-fluoroguanosine-3'-phosphate
  modified_base 12: mod_base = OTHER; note = 2'-O-methylguanosine-3'-phosphate
  modified_base 13: mod_base = OTHER; note = 2'-O-methylguanosine-3'-phosphate
  modified_base 14: mod_base = OTHER; note = 2'-O-methylcytidine-3'-phosphate
  modified_base 15: mod_base = OTHER; note = 2'-O-methyluridine-3'-phosphate
  modified_base 16: mod_base = OTHER; note = 2'-O-methylguanosine-3'-phosphate
  modified_base 17: mod_base = OTHER; note = 2'-O-methylguanosine-3'-phosphate
  modified_base 18: mod_base = OTHER; note = 2'-O-methylcytidine-3'-phosphate
  modified_base 19: mod_base = OTHER; note = 2'-O-methyladenosine-3'-phosphate
  modified_base 20: mod_base = OTHER; note = 2'-O-methyluridine-3'-phosphate
  modified_base 21: mod_base = OTHER; note = 2'-O-methyluridine-3'-phosphate N-[tris(GalNAc-alkyl)-amidodecanoyl)]-4-hydroxyprolinol (Hyp-(GalNAc-alkyl)3)
tcaccaacctgggctggcatt

SEQ ID NO: 6765 - RNA, 21 nt, synthetic construct
  source 1..21: mol_type = other RNA
  modified_base 1: mod_base = OTHER; note = 2'-O-methyluridine-3'-phosphorothioate
  modified_base 2: mod_base = OTHER; note = 2'-O-methyladenosine-3'-phosphorothioate
  modified_base 3: mod_base = OTHER; note = 2'-O-methylcytidine-3'-phosphate
  modified_base 4: mod_base = OTHER; note = 2'-O-methylcytidine-3'-phosphate
  modified_base 5: mod_base = OTHER; note = 2'-O-methyluridine-3'-phosphate
  modified_base 6: mod_base = OTHER; note = 2'-O-methyluridine-3'-phosphate
  modified_base 7: mod_base = OTHER; note = 2'-O-methyladenosine-3'-phosphate
  modified_base 8: mod_base = OTHER; note = 2'-O-methyladenosine-3'-phosphate
  modified_base 9: mod_base = OTHER; note = 2'-fluorocytidine-3'-phosphate
  modified_base 10: mod_base = OTHER; note = 2'-fluorouridine-3'-phosphate
  modified_base 11: mod_base = OTHER; note = 2'-fluorocytidine-3'-phosphate
  modified_base 12: mod_base = OTHER; note = 2'-O-methyluridine-3'-phosphate
  modified_base 13: mod_base = OTHER; note = 2'-O-methylguanosine-3'-phosphate
  modified_base 14: mod_base = OTHER; note = 2'-O-methylcytidine-3'-phosphate
  modified_base 15: mod_base = OTHER; note = 2'-O-methylcytidine-3'-phosphate
  modified_base 16: mod_base = OTHER; note = 2'-O-methylcytidine-3'-phosphate
  modified_base 17: mod_base = OTHER; note = 2'-O-methyluridine-3'-phosphate
  modified_base 18: mod_base = OTHER; note = 2'-O-methylcytidine-3'-phosphate
  modified_base 19: mod_base = OTHER; note = 2'-O-methyluridine-3'-phosphate
  modified_base 20: mod_base = OTHER; note = 2'-O-methyladenosine-3'-phosphate
  modified_base 21: mod_base = OTHER; note = 2'-O-methyluridine-3'-phosphate N-[tris(GalNAc-alkyl)-amidodecanoyl)]-4-hydroxyprolinol (Hyp-(GalNAc-alkyl)3)
taccttaactctgccctctat

SEQ ID NO: 6766 - RNA, 21 nt, synthetic construct
  source 1..21: mol_type = other RNA
  modified_base 1: mod_base = OTHER; note = 2'-O-methyladenosine-3'-phosphorothioate
  modified_base 2: mod_base = OTHER; note = 2'-O-methylcytidine-3'-phosphorothioate
  modified_base 3: mod_base = OTHER; note = 2'-O-methylcytidine-3'-phosphate
  modified_base 4: mod_base = OTHER; note = 2'-O-methyluridine-3'-phosphate
  modified_base 5: mod_base = OTHER; note = 2'-O-methyluridine-3'-phosphate
  modified_base 6: mod_base = OTHER; note = 2'-O-methyladenosine-3'-phosphate
  modified_base 7: mod_base = OTHER; note = 2'-O-methyladenosine-3'-phosphate
  modified_base 8: mod_base = OTHER; note = 2'-O-methylcytidine-3'-phosphate
  modified_base 9: mod_base = OTHER; note = 2'-fluorouridine-3'-phosphate
  modified_base 10: mod_base = OTHER; note = 2'-fluorocytidine-3'-phosphate
  modified_base 11: mod_base = OTHER; note = 2'-fluorouridine-3'-phosphate
  modified_base 12: mod_base = OTHER; note = 2'-O-methylguanosine-3'-phosphate
  modified_base 13: mod_base = OTHER; note = 2'-O-methylcytidine-3'-phosphate
  modified_base 14: mod_base = OTHER; note = 2'-O-methylcytidine-3'-phosphate
  modified_base 15: mod_base = OTHER; note = 2'-O-methylcytidine-3'-phosphate
  modified_base 16: mod_base = OTHER; note = 2'-O-methyluridine-3'-phosphate
  modified_base 17: mod_base = OTHER; note = 2'-O-methylcytidine-3'-phosphate
  modified_base 18: mod_base = OTHER; note = 2'-O-methyluridine-3'-phosphate
  modified_base 19: mod_base = OTHER; note = 2'-O-methyladenosine-3'-phosphate
  modified_base 20: mod_base = OTHER; note = 2'-O-methylguanosine-3'-phosphate
  modified_base 21: mod_base = OTHER; note = 2'-O-methyluridine-3'-phosphate N-[tris(GalNAc-alkyl)-amidodecanoyl)]-4-hydroxyprolinol (Hyp-(GalNAc-alkyl)3)
accttaactctgccctctagt

SEQ ID NO: 6767 - RNA, 21 nt, synthetic construct
  source 1..21: mol_type = other RNA
  modified_base 1: mod_base = OTHER; note = 2'-O-methylcytidine-3'-phosphorothioate
  modified_base 2: mod_base = OTHER; note = 2'-O-methylcytidine-3'-phosphorothioate
  modified_base 3: mod_base = OTHER; note = 2'-O-methyluridine-3'-phosphate
  modified_base 4: mod_base = OTHER; note = 2'-O-methyluridine-3'-phosphate
  modified_base 5: mod_base = OTHER; note = 2'-O-methyladenosine-3'-phosphate
  modified_base 6: mod_base = OTHER; note = 2'-O-methyladenosine-3'-phosphate
  modified_base 7: mod_base = OTHER; note = 2'-O-methylcytidine-3'-phosphate
  modified_base 8: mod_base = OTHER; note = 2'-O-methyluridine-3'-phosphate
  modified_base 9: mod_base = OTHER; note = 2'-fluorocytidine-3'-phosphate
  modified_base 10: mod_base = OTHER; note = 2'-fluorouridine-3'-phosphate
  modified_base 11: mod_base = OTHER; note = 2'-fluoroguanosine-3'-phosphate
  modified_base 12: mod_base = OTHER; note = 2'-O-methylcytidine-3'-phosphate
  modified_base 13: mod_base = OTHER; note = 2'-O-methylcytidine-3'-phosphate
  modified_base 14: mod_base = OTHER; note = 2'-O-methylcytidine-3'-phosphate
  modified_base 15: mod_base = OTHER; note = 2'-O-methyluridine-3'-phosphate
  modified_base 16: mod_base = OTHER; note = 2'-O-methylcytidine-3'-phosphate
  modified_base 17: mod_base = OTHER; note = 2'-O-methyluridine-3'-phosphate
  modified_base 18: mod_base = OTHER; note = 2'-O-methyladenosine-3'-phosphate
  modified_base 19: mod_base = OTHER; note = 2'-O-methylguanosine-3'-phosphate
  modified_base 20: mod_base = OTHER; note = 2'-O-methyluridine-3'-phosphate
  modified_base 21: mod_base = OTHER; note = 2'-O-methyluridine-3'-phosphate N-[tris(GalNAc-alkyl)-amidodecanoyl)]-4-hydroxyprolinol (Hyp-(GalNAc-alkyl)3)
ccttaactctgccctctagtt

SEQ ID NO: 6768 - RNA, 21 nt, synthetic construct
  source 1..21: mol_type = other RNA
  modified_base 1: mod_base = OTHER; note = 2'-O-methylcytidine-3'-phosphorothioate
  modified_base 2: mod_base = OTHER; note = 2'-O-methyluridine-3'-phosphorothioate
  modified_base 3: mod_base = OTHER; note = 2'-O-methyluridine-3'-phosphate
  modified_base 4: mod_base = OTHER; note = 2'-O-methyladenosine-3'-phosphate
  modified_base 5: mod_base = OTHER; note = 2'-O-methyladenosine-3'-phosphate
  modified_base 6: mod_base = OTHER; note = 2'-O-methylcytidine-3'-phosphate
  modified_base 7: mod_base = OTHER; note = 2'-O-methyluridine-3'-phosphate
  modified_base 8: mod_base = OTHER; note = 2'-O-methylcytidine-3'-phosphate
  modified_base 9: mod_base = OTHER; note = 2'-fluorouridine-3'-phosphate
  modified_base 10: mod_base = OTHER; note = 2'-fluoroguanosine-3'-phosphate
  modified_base 11: mod_base = OTHER; note = 2'-fluorocytidine-3'-phosphate
  modified_base 12: mod_base = OTHER; note = 2'-O-methylcytidine-3'-phosphate
  modified_base 13: mod_base = OTHER; note = 2'-O-methylcytidine-3'-phosphate
  modified_base 14: mod_base = OTHER; note = 2'-O-methyluridine-3'-phosphate
  modified_base 15: mod_base = OTHER; note = 2'-O-methylcytidine-3'-phosphate
  modified_base 16: mod_base = OTHER; note = 2'-O-methyluridine-3'-phosphate
  modified_base 17: mod_base = OTHER; note = 2'-O-methyladenosine-3'-phosphate
  modified_base 18: mod_base = OTHER; note = 2'-O-methylguanosine-3'-phosphate
  modified_base 19: mod_base = OTHER; note = 2'-O-methyluridine-3'-phosphate
  modified_base 20: mod_base = OTHER; note = 2'-O-methylguanosine-3'-phosphate
  modified_base 21: mod_base = OTHER; note = 2'-O-methyluridine-3'-phosphate N-[tris(GalNAc-alkyl)-amidodecanoyl)]-4-hydroxyprolinol (Hyp-(GalNAc-alkyl)3)
cttaactctgccctctagtgt

SEQ ID NO: 6769 - RNA, 21 nt, synthetic construct
  source 1..21: mol_type = other RNA
  modified_base 1: mod_base = OTHER; note = 2'-O-methyluridine-3'-phosphorothioate
  modified_base 2: mod_base = OTHER; note = 2'-O-methyluridine-3'-phosphorothioate
  modified_base 3: mod_base = OTHER; note = 2'-O-methyladenosine-3'-phosphate
  modified_base 4: mod_base = OTHER; note = 2'-O-methyladenosine-3'-phosphate
  modified_base 5: mod_base = OTHER; note = 2'-O-methylcytidine-3'-phosphate
  modified_base 6: mod_base = OTHER; note = 2'-O-methyluridine-3'-phosphate
  modified_base 7: mod_base = OTHER; note = 2'-O-methylcytidine-3'-phosphate
  modified_base 8: mod_base = OTHER; note = 2'-O-methyluridine-3'-phosphate
  modified_base 9: mod_base = OTHER; note = 2'-fluoroguanosine-3'-phosphate
  modified_base 10: mod_base = OTHER; note = 2'-fluorocytidine-3'-phosphate
  modified_base 11: mod_base = OTHER; note = 2'-fluorocytidine-3'-phosphate
  modified_base 12: mod_base = OTHER; note = 2'-O-methylcytidine-3'-phosphate
  modified_base 13: mod_base = OTHER; note = 2'-O-methyluridine-3'-phosphate
  modified_base 14: mod_base = OTHER; note = 2'-O-methylcytidine-3'-phosphate
  modified_base 15: mod_base = OTHER; note = 2'-O-methyluridine-3'-phosphate
  modified_base 16: mod_base = OTHER; note = 2'-O-methyladenosine-3'-phosphate
  modified_base 17: mod_base = OTHER; note = 2'-O-methylguanosine-3'-phosphate
  modified_base 18: mod_base = OTHER; note = 2'-O-methyluridine-3'-phosphate
  modified_base 19: mod_base = OTHER; note = 2'-O-methylguanosine-3'-phosphate
  modified_base 20: mod_base = OTHER; note = 2'-O-methylguanosine-3'-phosphate
  modified_base 21: mod_base = OTHER; note = 2'-O-methyluridine-3'-phosphate N-[tris(GalNAc-alkyl)-amidodecanoyl)]-4-hydroxyprolinol (Hyp-(GalNAc-alkyl)3)
ttaactctgccctctagtggt

SEQ ID NO: 6770 - RNA, 21 nt, synthetic construct
  source 1..21: mol_type = other RNA
  modified_base 1: mod_base = OTHER; note = 2'-O-methyluridine-3'-phosphorothioate
  modified_base 2: mod_base = OTHER; note = 2'-O-methyladenosine-3'-phosphorothioate
  modified_base 3: mod_base = OTHER; note = 2'-O-methyladenosine-3'-phosphate
  modified_base 4: mod_base = OTHER; note = 2'-O-methylcytidine-3'-phosphate
  modified_base 5: mod_base = OTHER; note = 2'-O-methyluridine-3'-phosphate
  modified_base 6: mod_base = OTHER; note = 2'-O-methylcytidine-3'-phosphate
  modified_base 7: mod_base = OTHER; note = 2'-O-methyluridine-3'-phosphate
  modified_base 8: mod_base = OTHER; note = 2'-O-methylguanosine-3'-phosphate
  modified_base 9: mod_base = OTHER; note = 2'-fluorocytidine-3'-phosphate
  modified_base 10: mod_base = OTHER; note = 2'-fluorocytidine-3'-phosphate
  modified_base 11: mod_base = OTHER; note = 2'-fluorocytidine-3'-phosphate
  modified_base 12: mod_base = OTHER; note = 2'-O-methyluridine-3'-phosphate
  modified_base 13: mod_base = OTHER; note = 2'-O-methylcytidine-3'-phosphate
  modified_base 14: mod_base = OTHER; note = 2'-O-methyluridine-3'-phosphate
  modified_base 15: mod_base = OTHER; note = 2'-O-methyladenosine-3'-phosphate
  modified_base 16: mod_base = OTHER; note = 2'-O-methylguanosine-3'-phosphate
  modified_base 17: mod_base = OTHER; note = 2'-O-methyluridine-3'-phosphate
  modified_base 18: mod_base = OTHER; note = 2'-O-methylguanosine-3'-phosphate
  modified_base 19: mod_base = OTHER; note = 2'-O-methylguanosine-3'-phosphate
  modified_base 20: mod_base = OTHER; note = 2'-O-methylcytidine-3'-phosphate
  modified_base 21: mod_base = OTHER; note = 2'-O-methyluridine-3'-phosphate N-[tris(GalNAc-alkyl)-amidodecanoyl)]-4-hydroxyprolinol (Hyp-(GalNAc-alkyl)3)
taactctgccctctagtggct

SEQ ID NO: 6771 - RNA, 21 nt, synthetic construct
  source 1..21: mol_type = other RNA
  modified_base 1: mod_base = OTHER; note = 2'-O-methyladenosine-3'-phosphorothioate
  modified_base 2: mod_base = OTHER; note = 2'-O-methyladenosine-3'-phosphorothioate
  modified_base 3: mod_base = OTHER; note = 2'-O-methylguanosine-3'-phosphate
  modified_base 4: mod_base = OTHER; note = 2'-O-methyluridine-3'-phosphate
  modified_base 5: mod_base = OTHER; note = 2'-O-methylcytidine-3'-phosphate
  modified_base 6: mod_base = OTHER; note = 2'-O-methyluridine-3'-phosphate
  modified_base 7: mod_base = OTHER; note = 2'-O-methylguanosine-3'-phosphate
  modified_base 8: mod_base = OTHER; note = 2'-O-methylguanosine-3'-phosphate
  modified_base 9: mod_base = OTHER; note = 2'-fluorouridine-3'-phosphate
  modified_base 10: mod_base = OTHER; note = 2'-fluoroguanosine-3'-phosphate
  modified_base 11: mod_base = OTHER; note = 2'-fluorouridine-3'-phosphate
  modified_base 12: mod_base = OTHER; note = 2'-O-methylcytidine-3'-phosphate
  modified_base 13: mod_base = OTHER; note = 2'-O-methylcytidine-3'-phosphate
  modified_base 14: mod_base = OTHER; note = 2'-O-methyluridine-3'-phosphate
  modified_base 15: mod_base = OTHER; note = 2'-O-methylguanosine-3'-phosphate
  modified_base 16: mod_base = OTHER; note = 2'-O-methyladenosine-3'-phosphate
  modified_base 17: mod_base = OTHER; note = 2'-O-methyladenosine-3'-phosphate
  modified_base 18: mod_base = OTHER; note = 2'-O-methyladenosine-3'-phosphate
  modified_base 19: mod_base = OTHER; note = 2'-O-methylcytidine-3'-phosphate
  modified_base 20: mod_base = OTHER; note = 2'-O-methyluridine-3'-phosphate
  modified_base 21: mod_base = OTHER; note = 2'-O-methyluridine-3'-phosphate N-[tris(GalNAc-alkyl)-amidodecanoyl)]-4-hydroxyprolinol (Hyp-(GalNAc-alkyl)3)
aagtctggtgtcctgaaactt
